(19) United States
(12) Patent Application Publication
(10) Pub. No.: US 2011/0165568 A1
(43) Pub. Date: Jul. 7, 2011

(54) SEQUENCES OF E.COLI 055:H7 GENOME

(75) Inventors: Paolo Vatta, San Mateo, CA (US); Pius Brzoska, Woodside, CA (US); Elizabeth Newton, Foster City, CA (US); Melissa Barker, Gilroy, CA (US); Olga V. Petrauskene, San Carlos, CA (US); Manohar Furtado, San Ramon, CA (US); Craig Cummings, Pacifica, CA (US)

(73) Assignee: LIFE TECHNOLOGIES CORPORATION, Carlsbad, CA (US)

(21) Appl. No.: 12/981,795

(22) Filed: Dec. 30, 2010

Related U.S. Application Data
(60) Provisional application No. 61/291,652, filed on Dec. 31, 2009.
(60) Provisional application No. 61/291,662, filed on Dec. 31, 2009.
(60) Provisional application No. 61/292,438, filed on Jan. 5, 2010.

(51) Int. Cl. C12Q 1/68; C07H 21/04

(52) U.S. Cl. 435/6.11; 536/23.1

(57) ABSTRACT

Disclosed is the genomic sequence for E. coli O55:H7 as well as compositions, methods, and kits for detecting, identifying and distinguishing E. coli O55:H7 from non-O55:H7 strains. In some embodiments, isolated nucleic acid compositions unique and/or specific to E. coli O55:H7 are described. Methods of detection and/or indentifying E. coli O55:H7 comprising detecting at least one nucleic acid sequences comprising or derived from SEQ ID NO:1-5, SEQ ID NO: 66, SEQ ID NO: 252, SEQ ID NO: 1113, and SEQ ID NO: 1461, are described. Primer and probe compositions and methods of use of primers and probes are also provided. Kits for identification of E. coli O55:H7 are also described.

### CROSS-REFERENCE TO RELATED APPLICATIONS

[0001] This application claims the benefit under 35 U.S.C. §119(e) of U.S. Provisional Patent Application U.S. Ser. No. 61/291,652 filed Dec. 31, 2009; U.S. Provisional Patent Application U.S. Ser. No. 61/291,662 filed Dec. 31, 2009; and U.S. Provisional Patent Application U.S. Ser. No. 61/292,438 filed Jan. 5, 2010; the entire contents of which are incorporated herein by reference.

### EFS INCORPORATION PARAGRAPH RELATING TO SEQUENCE LISTING

[0002] The instant application contains a Sequence Listing which has been submitted in ASCII format via EFS-WEB and is hereby incorporated by reference in its entirety. Said ASCII copy, created on Dec. 27, 2010, is named LT0078US.TXT and is 14,312,068 bytes in size.

### FIELD

[0003] The present teachings relate to compositions, methods and kits for detection and identification of Escherichia coli (E. coli) O55:H7. More particularly, the specification describes compositions and kits comprising nucleic acid sequences specific and/or unique to E. coli O55:H7 and methods of use thereof. Methods for differentially detecting E. coli O55:H7 from other pathogens (including closely related serotypes such as E. coli O157:H7) are also described.

### BACKGROUND

[0004] Escherichia coli O55:H7 is a serotype of E. coli that is occasionally associated with hemorrhagic diarrhea and infantile diarrhea in humans. E. coli O55:H7 is thought to be harbored in the digestive tract of cattle and therefore has the potential to enter the food supply.

[0005] E. coli O55:H7 is very closely related to a pathogenic serotype of E. coli, E. coli O157:H7, a causative agent of enterohemorrhagic colitis and hemorrhagic uremic syndrome in humans. E. coli O157:H7 has been identified by the United States Department of Agriculture (USDA) as a pathogen required to be tested while determining food safety. E. coli O157:H7 appears to have evolved stepwise from E. coli O55:H7. These two serotypes are more closely related at the nucleotide level while divergence is markedly different at the gene level. Likewise, other E. coli serotypes have been shown to be less divergent at the nucleotide level making identification of pathogenic strains difficult. Most assays that target E. coli O157:H7 also detect E. coli O55:H7. Furthermore, designing assays specific for E. coli O157:H7 has been difficult due to the absence of genomic information regarding its closest relative, E. coli O55:H7.

[0006] Design and development of molecular detection assays that differentiate or identify a target sequence that is present in organisms to be detected, and absent or divergent in organisms not to be detected is an unmet need for the definitive detection of the pathogenic O157:H7 serotype of E. coli.

### SUMMARY OF SOME EMBODIMENTS OF THE DISCLOSURE

[0007] The present disclosure, in some embodiments, discloses the complete genomic sequence of an E. coli O55:H7. In some embodiments, the disclosure describes isolated nucleic acid sequence compositions comprising portions of an E. coli O55:H7 genome. In some embodiments, isolated nucleic acid sequence compositions of the disclosure comprise nucleic acid sequences unique to and/or specific to an E. coli O55:H7 organism. In some embodiments, isolated nucleic acid sequences of the disclosure may have at least 90% sequence identity, at least 80% sequence identity, and/or at least 70% sequence identity to nucleic acid sequences comprising unique and/or specific portions of an E. coli O55:H7 genome.

[0008] In some embodiments, unique E. coli O55:H7 nucleic acid sequences may comprise isolated nucleic acid molecules comprising a nucleotide sequence of SEQ ID NO:66, SEQ ID NO:252, SEQ ID NO:1113, SEQ ID NO:1461, SEQ ID NO:1, SEQ ID NO:2, SEQ ID NO:3, SEQ ID NO:4, SEQ ID NO:5, fragments thereof, and/or complements thereof. In some embodiments, unique E. coli O55:H7 sequences may comprise isolated nucleic acid molecules comprising a nucleotide sequence having at least a 90% sequence identity, at least 80% sequence identity and/or at least 70% sequence identity to the nucleotide sequences of SEQ ID NO:66, SEQ ID NO:252, SEQ ID NO:1113, SEQ ID NO:1461, SEQ ID NO:1, SEQ ID NO:2, SEQ ID NO:3, SEQ ID NO:4, SEQ ID NO:5, fragments thereof and/or complements thereof.

[0009] In some embodiments, E. coli O55:H7 isolated nucleic acid sequences may comprise nucleic acid molecules comprising at least 40 nucleotide sequence of SEQ ID NO:66, SEQ ID NO:252, SEQ ID NO:1113, SEQ ID NO:1461, SEQ ID NO:1, SEQ ID NO:2, SEQ ID NO:3, SEQ ID NO:4, SEQ ID NO:5; at least 30 nucleotide sequence of SEQ ID NO:66, SEQ ID NO:252, SEQ ID NO:1113, SEQ ID NO:1461, SEQ ID NO:1, SEQ ID NO:2, SEQ ID NO:3, SEQ ID NO:4, SEQ ID NO:5; at least 25 nucleotide sequence of SEQ ID NO:66, SEQ ID NO:252, SEQ ID NO:1113, SEQ ID NO:1461, SEQ ID NO:1, SEQ ID NO:2, SEQ ID NO:3, SEQ ID NO:4, SEQ ID NO:5; at least 20 nucleotide sequence of SEQ ID NO:66, SEQ ID NO:252, SEQ ID NO:1113, SEQ ID NO:1461, SEQ ID NO:1, SEQ ID NO:2, SEQ ID NO:3, SEQ ID NO:4, SEQ ID NO:5; at least 15 nucleotide sequence of SEQ ID NO:66, SEQ ID NO:252, SEQ ID NO:1113, SEQ ID NO:1461, SEQ ID NO:1, SEQ ID NO:2, SEQ ID NO:3, SEQ ID NO:4, SEQ ID NO:5; at least 10 nucleotide sequence of SEQ ID NO:66, SEQ ID NO:252, SEQ ID NO:1113, SEQ ID NO:1461, SEQ ID NO:1, SEQ ID NO:2, SEQ ID NO:3, SEQ ID NO:4, SEQ ID NO:5; any intermediate number of contiguous sequences from at least about 10 nucleotides of sequence to at least about 40 nucleotides of sequence of SEQ ID NO:66, SEQ ID NO:252, SEQ ID NO:1113, SEQ ID NO:1461, SEQ ID NO:1, SEQ ID NO:2, SEQ ID NO:3, SEQ ID NO:4, SEQ ID NO:5 and sequences having 90% identity to the foregoing sequences.

[0010] In some embodiments, the disclosure describes compositions of isolated nucleic acid sequences having SEQ ID NO: 6, SEQ ID NO:7, SEQ ID NO:8, SEQ ID NO:9, SEQ ID NO:10, SEQ ID NO: 11, SEQ ID NO:12, SEQ ID NO:13, SEQ ID NO:14, SEQ ID NO:15, SEQ ID NO:16, SEQ ID NO: 17, SEQ ID NO:18, SEQ ID NO:19, SEQ ID NO:20, SEQ ID NO:21, SEQ ID NO:22, SEQ ID NO:23, SEQ ID NO:24, SEQ ID NO:25, SEQ ID NO:26, SEQ ID NO:27, SEQ ID NO:28, SEQ ID NO:29, SEQ ID NO:30, SEQ ID NO:31, SEQ ID NO:32, fragments thereof, at least 10 contiguous nucleotide sequences thereof, complements thereof and isolated nucleic acid sequence comprising at least 90% nucleic acid sequence identity to the sequences set forth above.

[0011] In some embodiments, isolated nucleic acid sequence compositions of the disclosure may further comprise one or more label, such as, but not limited to, a dye, a radioactive isotope, a chemiluminescent label, a fluorescent moiety, a bioluminescent label an enzyme, and combinations thereof.

[0012] The disclosure also describes recombinant constructs comprising nucleic acid sequences unique to E. coli O55:H7 as set forth in sections above. Accordingly, a recombinant construct of the disclosure may comprise a nucleotide sequence of SEQ ID NO:66, SEQ ID NO:252, SEQ ID NO:1113, SEQ ID NO:1461, SEQ ID NO:1, SEQ ID NO:2, SEQ ID NO:3, SEQ ID NO:4, SEQ ID NO:5, fragments thereof, complements thereof as well as nucleotide sequences having at least a 90% identity, at least 80% identity and/or at least 70% identity to the nucleotide sequences described above. In some embodiments, a recombinant construct of the disclosure may comprise a nucleotide sequence of SEQ ID NO: 6, SEQ ID NO:7, SEQ ID NO:8, SEQ ID NO:9, SEQ ID NO:10, SEQ ID NO: 11, SEQ ID NO:12, SEQ ID NO:13, SEQ ID NO:14, SEQ ID NO:15, SEQ ID NO:16, SEQ ID NO: 17, SEQ ID NO:18, SEQ ID NO:19, SEQ ID NO:20, SEQ ID NO:21, SEQ ID NO:22, SEQ ID NO:23, SEQ ID NO:24, SEQ ID NO:25, SEQ ID NO:26, SEQ ID NO:27, SEQ ID NO:28, SEQ ID NO:29, SEQ ID NO:30, SEQ ID NO:31, SEQ ID NO:32, fragments thereof, at least 10 contiguous nucleotide sequences thereof, complements thereof and isolated nucleic acid sequence comprising at least 90% nucleic acid sequence identity to the sequences set forth above.

[0013] The specification also discloses methods for detection of an E. coli O55:H7 organism from a sample and methods to exclude the presence of an E. coli O55:H7 organism in a sample, wherein the detection of at least one nucleic acid sequence that is unique to an E. coli O55:H7 is indicative of the presence of an E. coli O55:H7 and the absence of detection of any nucleic acid sequence unique to an E. coli O55:H7 is indicative of the absence of an E. coli O55:H7 in the sample. Accordingly, a method of the disclosure, in some embodiments, may comprise detecting, in a sample, a nucleic acid sequence having at least 10 to at least 25 nucleic acids of SEQ ID NO:66, SEQ ID NO:252, SEQ ID NO:1113, SEQ ID NO:1461, SEQ ID NO:1, SEQ ID NO:2, SEQ ID NO:3, SEQ ID NO:4, SEQ ID NO:5, and/or complementary sequences thereof, wherein detection of the nucleic acid sequence indicates the presence of an E. coli O55:H7 organism in the sample. Methods of detection may also comprise identification steps and may further comprise steps of sample preparation. Such embodiments are described in detail in sections below.

[0014] Some embodiments describe methods of distinguishing an E. coli O55:H7 from a non-O55:H7 E. coli strains and may comprise: detecting at least one of a nucleic acid sequence having a nucleic acid sequence of SEQ ID NO: 66, SEQ ID NO:252, SEQ ID NO:1113, SEQ ID NO:1461, SEQ ID. NO: 1, SEQ ID NO: 2, SEQ ID NO: 3, SEQ ID NO:4, SEQ ID NO:5, fragments thereof, complements thereof and/or sequences comprising at least 90% nucleic acid sequence identity thereof, wherein detection of one of the at least one nucleic acid sequences identifies E. coli O55:H7. In other embodiments, not detecting at least one of a nucleic acid sequence selected from nucleotides described by either SEQ ID NO:66, SEQ ID NO:252, SEQ ID NO:1113, SEQ ID NO:1461, SEQ ID. NO: 1, SEQ ID NO: 2, SEQ ID NO: 3, SEQ ID NO:4, SEQ ID NO:5, fragments thereof, complements thereof and/or sequences comprising at least 90% nucleic acid sequence identity thereof may be used to exclude the presence of E. coli O55:H7 in a sample.

[0015] Some methods for identifying and/or detecting E. coli O55:H7 in a sample may comprise using a nucleotide sequence composition of the disclosure for detection. Exemplary compositions of the disclosure used for detection methods may comprise, but are not limited to, SEQ ID NO: 6, SEQ ID NO:7, SEQ ID NO:8, SEQ ID NO:9, SEQ ID NO:10, SEQ ID NO: 11, SEQ ID NO:12, SEQ ID NO:13, SEQ ID NO:14, SEQ ID NO:15, SEQ ID NO:16, SEQ ID NO: 17, SEQ ID NO:18, SEQ ID NO:19, SEQ ID NO:20, SEQ ID NO:21, SEQ ID NO:22, SEQ ID NO:23, SEQ ID NO:24, SEQ ID NO:25, SEQ ID NO:26, SEQ ID NO:27, SEQ ID NO:28, SEQ ID NO:29, SEQ ID NO:30, SEQ ID NO:31, SEQ ID NO:32, fragments thereof, at least 10 contiguous nucleotide sequences thereof, complements thereof, isolated nucleic acid sequence comprising at least 90% nucleic acid sequence identity to the sequences set forth above and/or labeled derivatives thereof.

[0016] Some embodiments of the present disclosure are kits for detection of E. coli O55:H7. A kit of the disclosure may comprise one or more isolated nucleic acid sequences of the disclosure as set forth herein. Some nucleic acid compositions of the disclosure may comprise primers for amplification of target nucleic acid sequences from a contaminating E. coli O55:H7 that may be present in a sample. Some nucleic acid compositions of the disclosure may comprise probes for the detection of target nucleic acid sequences and/or amplified target nucleic acid regions from a contaminating E. coli O55:H7 present in a sample. Probes and primers comprised in kits may be labeled. Kits may additionally comprise one or more components such as, but not limited to: buffers, enzymes, nucleotides, salts, reagents to process and prepare samples, probes, primers, agents to enable detection and control nucleotides. Each component of a kit of the disclosure may be packaged individually or together in various combinations in one or more suitable container means. Kits of the disclosure, in some embodiments, may be used to distinguish the presence of non-O55:H7 bacteria.

[0017] It is a feature of the embodiments disclosed herein that a subject bacterium, referred to as E. coli O55:H7 (Applied Biosystems, collection designation, PE704), has been deposited with the American Type Culture Collection (ATCC) on Jul. 23, 2009 and has the ATCC designation number PTA-10235.

### BRIEF DESCRIPTION OF THE DRAWINGS

[0018] Some specific example embodiments of the disclosure may be understood by referring, in part, to the following description and the accompanying drawings, wherein:

[0019] FIG. 1 is a table that depicts exemplary E. coli O55:H7 specific and unique nucleic acid sequences.

[0020] FIG. 2 is a plot of SNP density in 1 Kb windows across an E. coli O55:H7 genome.

[0021] FIG. 3 lists and describes a few selected identified open reading frames in an E. coli O55:H7 pseudochromosome (pseudochromosome sequence is comprised in SEQ ID NO 1695 in the attached Sequence Listing).

### DETAILED DESCRIPTION OF EXEMPLARY EMBODIMENTS

[0022] For purposes of interpreting this specification, the following definitions will apply and whenever appropriate, terms used in the singular will also include the plural and vice versa. In the event that any definition set forth below conflicts with the usage of that word in any other document, including any document incorporated herein by reference, the definition set forth below shall always control for purposes of interpreting this specification and its associated claims unless a contrary meaning is clearly intended (for example in the document where the term is originally used). It is noted that, as used in this specification and the appended claims, the singular forms “a,” “an,” and “the,” include plural referents unless expressly and unequivocally limited to one referent. The use of “or” means “and/or” unless stated otherwise. For illustration purposes, but not as a limitation, “X and/or Y” can mean “X” or “Y” or “X and Y”. The use of “comprise,” “comprises,” “comprising,” “having,” “include,” “includes,” and “including” are interchangeable and open terms not intended to be limiting. Furthermore, where the description of one or more embodiments uses the term “comprising,” those skilled in the art would understand that, in some specific instances, the embodiment or embodiments can be alternatively described using the language “consisting essentially of” and/or “consisting of”. The term “and/or” means one or all of the listed elements or a combination of any two or more of the listed element.

[0023] The section headings used herein are for organizational purposes only and are not to be construed as limiting the described subject matter in any way. All literature cited in this specification, including but not limited to, patents, patent applications, articles, books, and treatises are expressly incorporated by reference in their entirety for any purpose. In the event that any of the incorporated literature contradicts any term defined herein, this specification controls. While the present teachings are described in conjunction with various embodiments, it is not intended that the present teachings be limited to such embodiments. On the contrary, the present teachings encompass various alternatives, modifications, and equivalents, as will be appreciated by those of skill in the art.

[0024] The practice of the present embodiments may employ conventional techniques and descriptions of organic chemistry, polymer technology, molecular biology (including recombinant techniques), cell biology, biochemistry, and immunology, which are within the skill of the art, in light of the present teachings. Some conventional techniques include, but may not be limited to, oligonucleotide synthesis, hybridization, extension reactions and detection of hybridization using a label. Specific illustrations of suitable techniques may be described in example herein below. However, other equivalent conventional procedures may also be used. General conventional techniques and their descriptions can be found in standard laboratory manuals such as Genome Analysis: A Laboratory Manual Series (Vols. I-IV), PCR Primer: A Laboratory Manual, and Molecular Cloning: A Laboratory Manual (all from Cold Spring Harbor Laboratory Press, 1989), Gait, “Oligonucleotide Synthesis: A Practical Approach” 1984, IRL Press, London, Nelson and Cox (2000), Lehninger, Principles of Biochemistry 3^{rd} Ed., W. H. Freeman Pub., New York, N.Y. and Berg et al. (2002) Biochemistry, 5^{th} Ed., W. H. Freeman Pub., New York, N.Y. all of which are herein incorporated in their entirety by reference for all purposes.

[0025] The terms “amplifying” and “amplification” are used in a broad sense and refer to any technique by which a target region, an amplicon, or at least part of an amplicon, is reproduced or copied (including the synthesis of a complementary strand), typically in a template-dependent manner, including a broad range of techniques for amplifying nucleic acid sequences, either linearly or exponentially. Some non-limiting examples of amplification techniques include primer extension, including the polymerase chain reaction (PCR), reverse transcription polymerase chain reaction (RT-PCR), asynchronous PCR (A-PCR), and asymmetric PCR (AM-PCR), strand displacement amplification (SDA), multiple displacement amplification (MDA), nucleic acid strand-based amplification (NASBA), rolling circle amplification (RCA), transcription-mediated amplification (TMA), and the like, including multiplex versions, and combinations thereof. Descriptions of certain amplification techniques can be found in, among other places, Molecular Cloning, A Laboratory Manual, Cold Spring Harbor Press, 3d ed., 2001 (hereinafter “Sambrook and Russell”); Sambrook et al.; Ausubel et al.; PCR Primer: A Laboratory Manual, Diffenbach, Ed., Cold Spring Harbor Press (1995); Msuih et al., J. Clin. Micro. 34:501-07 (1996); McPherson; Rapley; U.S. Pat. Nos. 6,027,998 and 6,511,810; PCT Publication Nos. WO 97/31256 and WO 01/92579; Ehrlich et al., Science 252:1643-50 (1991); Favis et al., Nature Biotechnology 18:561-64 (2000); Protocols & Applications Guide, rev. 9/04, Promega, Madison, Wis.; and Rabenau et al., Infection 28:97-102 (2000).

[0026] The terms “amplicon,” “amplification product” and “amplified sequence” are used interchangeably herein and refer to a broad range of techniques for increasing polynucleotide sequences, either linearly or exponentially and can be the product of an amplification reaction. An amplicon can be double-stranded or single-stranded, and can include the separated component strands obtained by denaturing a double-stranded amplification product. In certain embodiments, the amplicon of one amplification cycle can serve as a template in a subsequent amplification cycle. Exemplary amplification techniques include, but are not limited to, PCR or any other method employing a primer extension step. Other nonlimiting examples of amplification include, but are not limited to, ligase detection reaction (LDR) and ligase chain reaction (LCR). Amplification methods can comprise thermal-cycling or can be performed isothermally. In various embodiments, the term “amplification product” and “amplified sequence” includes products from any number of cycles of amplification reactions.

[0027] As used herein, the term “analyzing” refers to evaluating and comparing the results of a method. In some exemplary embodiments, “analyzing” refers to evaluating and comparing the results of a sample tested to a second sample and/or to a control in a method of the disclosure.

[0028] As used herein, “complement” and “complements” are used interchangeably and refer to the ability of a nucleotide, a polynucleotide or two single stranded polynucleotides (for instance, a primer and a target polynucleotide) to base pair with each other, where an adenine on one strand of a polynucleotide will base pair to a thymine or uracil on a strand of a second polynucleotide and a cytosine on one strand of a polynucleotide will base pair to a guanine on a strand of a second polynucleotide. Two polynucleotides are complementary to each other when a nucleotide sequence in one polynucleotide can base pair with a nucleotide sequence in a second polynucleotide. For instance, 5′-ATGC-3′ and 5′-GCAT-3′ are complementary.

[0029] As used herein the term “complementary nucleotide sequence” and “complementary sequences” refers to a (second) nucleotide sequence which, by base pairing, is the complement of a first nucleotide sequence. For example, a forward strand with the sequence 5′-ATGGC-3′ would have the complementary nucleotide sequence 3′-TACCG-5′, also termed the “reverse strand.”

[0030] As used herein, the term “contacting” as used herein refers to the hybridization between a primer and its substantially complementary region. “Contacting” may also refer to bringing in contact at least two moieties (reagents, cells, nucleic acids) to bring about a change or a reaction in one or all the moieties. The process of contacting may also comprise “incubating” (contacting for a certain time lengths) and/or incubating at certain temperatures to bring about the change or reaction.

[0031] As used herein, “DNA” refers to deoxyribonucleic acid in its various forms as understood in the art, such as genomic DNA, cDNA, isolated nucleic acid molecules, vector DNA, and chromosomal DNA. “Nucleic acid” refers to DNA or RNA in any form. Examples of isolated nucleic acid molecules include, but are not limited to, recombinant DNA molecules contained in a vector, recombinant DNA molecules maintained in a heterologous host cell, partially or substantially purified nucleic acid molecules, and synthetic DNA molecules. Typically, an “isolated” nucleic acid is free of sequences which naturally flank the nucleic acid (i.e., sequences located at the 5′ and 3′ ends) in the native nucleic acid or genomic DNA of the organism from which the nucleic acid is derived. Moreover, an “isolated” nucleic acid molecule, such as a cDNA molecule, is generally substantially free of other cellular material when isolated from a cell and/or culture medium when produced by recombinant techniques, and/or substantially free of chemical precursors or other chemicals when chemically synthesized.

[0032] The terms “detecting” and “detection” are used in a broad sense herein and encompass any technique by which one can determine the absence or presence of something, and/or identify a nucleic acid sequence and/or a protein encoded by a nucleic acid sequence. In some embodiments, detecting comprises quantitating a detectable signal from the nucleic acid, including without limitation, a real-time detection method, such as quantitative PCR (“Q-PCR”). In some embodiments, detecting comprises determining the sequence of a sequencing product or a family of sequencing products generated using an amplification product as the template; in some embodiments, such detecting comprises obtaining the sequence of a family of sequencing products.

[0033] As used here, “distinguishing” and “distinguishable” are used interchangeably and refer to differentiating between at least two results from substantially similar or identical reactions, including but not limited to, two different amplification products, two different melting temperatures, two different melt curves, and the like. The results can be from a single reaction, two reactions conducted in parallel, two reactions conducted independently, i.e., separate days, operators, laboratories, and so on.

[0034] As used herein, the term “E. coli O55:H7-specific nucleotide sequence” and “a nucleic acid sequence unique to E. coli O55:H7” refers broadly to nucleotide sequences specific and/or unique to E. coli O55:H7 and not known or found in other E. coli strains or in other related and/or unrelated microorganisms. These include, but are not limited to, nucleic acid sequences comprised in SEQ ID NO: 66, SEQ ID NO:252, SEQ ID NO:1113, SEQ ID NO:1461, SEQ ID NO:1, SEQ ID NO:2, SEQ ID NO:3, SEQ ID NO:4, SEQ ID NO:5, as well as fragments, complements, and sequences having at least 90% sequence identity thereof.

[0035] As used herein, the term “homology” refers to a degree of complementarity at the nucleic acid level that can be determined by known methods, e.g. computer-assisted sequence comparisons (Basic local alignment search tool, S. F. Altschul et al., J. Mol. Biol. 215 (1990), 403 410). The term “homology” known to the skilled person describes the degree to which two or more nucleic acid molecules are related, this being determined by the concordance between the sequences. The percentage of “homology” is obtained from the percentage of identical regions in two or more sequences, taking into account gaps or other sequence peculiarities. The homology of nucleic acid molecules which are related to one another can be determined with the aid of known methods. As a rule, special computer programs with algorithms which take account of the particular requirements are employed. There can be partial homology or complete homology (i.e., identity). A partially complementary sequence that at least partially inhibits a completely complementary sequence from hybridizing to a target nucleic acid is referred to using the functional term “substantially homologous.”

[0036] The term “selectively hybridize” and variations thereof means that under appropriate stringency conditions, a given sequence (for example, but not limited to, a primer) anneals with a second sequence comprising a complementary string of nucleotides (for example but not limited to a target flanking sequence or a primer-binding site of an amplicon), but does not anneal to undesired sequences, such as non-target nucleic acids or other primers. Typically, as the reaction temperature increases toward the melting temperature of a particular double-stranded sequence, the relative amount of selective hybridization generally increases and mis-priming generally decreases. In this specification, a statement that one sequence hybridizes or selectively hybridizes with another sequence encompasses situations where the entirety of both of the sequences hybridize to one another and situations where only a portion of one or both of the sequences hybridizes to the entire other sequence or to a portion of the other sequence.

[0037] The terms “identity”, “nucleic acid sequence identity” and “sequence identity” are used interchangeably and refer to the percentage of pair-wise identical residues—following homology alignment of a sequence of a polynucleotide with a sequence in question—with respect to the number of residues in the longer of these two sequences. The term “identity” as known in the art refers to a relationship between the sequences of two or more polypeptide molecules or two or more nucleic acid molecules, as determined by comparing the sequences. In the art, “identity” also means the degree of sequence relatedness between nucleic acid molecules or polypeptides, as the case may be, as determined by the match between strings of two or more nucleotide or two or more amino acid sequences. “Identity” measures the percent of identical matches between the smaller of two or more sequences with gap alignments (if any) addressed by a particular mathematical model or computer program (i.e., “algorithms”).

[0038] The term “percent (%) nucleic acid sequence identity” with respect to a nucleic acid sequence refers to the percentage of nucleotides in a first sequence that are identical with the nucleotides in a second nucleic acid sequence of interest, after aligning the sequences and introducing gaps, if necessary, to achieve the maximum percent sequence identity. Alignment for purposes of determining percent nucleic acid sequence identity can be achieved in various ways that are known to one of skill in the art, for instance, using publicly available computer software such as BLAST, BLAST-2, ALIGN or Megalign (DNASTAR) software.

[0039] Percent nucleic acid sequence identity may also be determined using the sequence comparison program NCBI-BLAST2 (Altschul et al., Nucleic Acids Res. 25:3389-3402 (1997)). The NCBI-BLAST2 sequence comparison program may be downloaded from http://www.ncbi.nlm.nih.gov or otherwise obtained from the National Institute of Health, Bethesda, Md. NCBI-BLAST2 uses several search parameters, wherein all of those search parameters are set to default values including, for example, unmask=yes, strand=all, expected occurrences=10, minimum low complexity length=15/5, multi-pass e-value=0.01, constant for multi-pas s=25, dropoff for final gapped alignment=25 and scoring matrix=BLOSUM62.

[0040] In situations where NCBI-BLAST2 is employed for sequence comparisons, the % nucleic acid sequence identity of a given nucleic acid sequence C to, with, or against a given nucleic acid sequence D (which can alternatively be phrased as a given nucleic acid sequence C that has or comprises a certain % nucleic acid sequence identity to, with, or against a given nucleic acid sequence D) is calculated as follows: 100 times the fraction W/Z where W is the number of nucleotides scored as identical matches by the sequence alignment program NCBI-BLAST2 in that program's alignment of C and D, and where Z is the total number of nucleotides in D. It will be appreciated that where the length of nucleic acid sequence C is not equal to the length of nucleic acid sequence D, the % nucleic acid sequence identity of C to D will not equal the % nucleic acid sequence identity of D to C.

[0041] The term “label” refers to any moiety which can be attached to a molecule and: (i) provides a detectable signal; (ii) interacts with a second label to modify the detectable signal provided by the second label, e.g. FRET; (iii) stabilizes hybridization, i.e. duplex formation; or (iv) provides a capture moiety, i.e. affinity, antibody/antigen, ionic complexation. Labelling can be accomplished using any one of a large number of known techniques employing known labels, linkages, linking groups, reagents, reaction conditions, and analysis and purification methods. Labels include light-emitting compounds which generate a detectable signal by fluorescence, chemiluminescence, or bioluminescence (Kricka, L. in Nonisotopic DNA Probe Techniques (1992), Academic Press, San Diego, pp. 3-28). Another class of labels comprise hybridization-stabilizing moieties which serve to enhance, stabilize, or influence hybridization of duplexes, e.g. intercalators, minor-groove binders, and cross-linking functional groups (Blackburn, G. and Gait, M. Eds. “DNA and RNA structure” in Nucleic Acids in Chemistry and Biology, 2^{nd} Edition, (1996) Oxford University Press, pp. 15-81). Yet another class of labels effect the separation or immobilization of a molecule by specific or non-specific capture, for example biotin, digoxigenin, and other haptens (Andrus, A. “Chemical methods for 5′ non-isotopic labeling of PCR probes and primers” (1995) in PCR 2: A Practical Approach, Oxford University Press, Oxford, pp. 39-54). A label may include but is not limited to a dye, a radioactive isotope, a chemiluminescent label, a fluorescent moiety, a bioluminescent moiety, and/or an enzyme.

[0042] As used herein, the terms “polynucleotide”, “oligonucleotide”, and “nucleic acid sequences” are used interchangeably and refer to single-stranded and double-stranded polymers of nucleotide monomers, including without limitation 2′-deoxyribonucleotides (DNA) and ribonucleotides (RNA) linked by internucleotide phosphodiester bond linkages, or internucleotide analogs, and associated counter ions, e.g., H⁺, NH₄⁺, trialkylammonium, Me⁺, Na⁺, and the like. A polynucleotide may be composed entirely of deoxyribonucleotides, entirely of ribonucleotides, or chimeric mixtures thereof and can include nucleotide analogs. The nucleotide monomer units may comprise any nucleotide or nucleotide analog. Polynucleotides typically range in size from a few monomeric units, e.g. 5-40 when they are sometimes referred to in the art as oligonucleotides, to several thousands of monomeric nucleotide units. Unless denoted otherwise, whenever a polynucleotide sequence is represented, it will be understood that the nucleotides are in 5′ to 3′ order from left to right and that “A” denotes deoxyadenosine, “C” denotes deoxycytosine, “G” denotes deoxyguanosine, “T” denotes thymidine, and “U” denotes deoxyuridine, unless otherwise noted.

[0043] As used herein, the terms “target polynucleotide,” “nucleic acid target” and “target nucleic acid” are used interchangeably and refer to a particular nucleic acid sequence of interest. The “target” can be a polynucleotide sequence that is sought to be amplified and can exist in the presence of other nucleic acid molecules or within a larger nucleic acid molecule. The target polynucleotide can be obtained from any source, and can comprise any number of different compositional components. For example, the target can be a nucleic acid (e.g. DNA or RNA). It will be appreciated that target polynucleotides can be cut or sheared prior to analysis, including the use of such procedures as mechanical force, sonication, restriction endonuclease cleavage, or other methods known in the art.

[0044] As used herein, the “polymerase chain reaction” or PCR comprises amplification of a nucleic acid consisting of an initial denaturation step which separates the strands of a double stranded nucleic acid sample, followed by repetition of (i) an annealing step, which allows amplification primers to anneal specifically to positions flanking a target sequence; (ii) an extension step which extends the primers in a 5′ to 3′ direction thereby forming an amplicon polynucleotide complementary to the target sequence, and (iii) a denaturation step which causes the separation of the amplicon from the target sequence (Mullis et al., EDS, The Polymerase Chain Reaction, BirkHauser, Boston, Mass. (1994)). Each of the above steps may be conducted at a different temperature, preferably using an automated thermocycler (Applied Biosystems LLC, a division of Life Technologies Corporation, Foster City, Calif.). If desired, RNA samples can be converted to DNA/RNA heteroduplexes or to duplex cDNA by methods known to one of skill in the art. PCR methods may also include reverse transcriptase-PCR and other reactions that follow principles of PCR.

[0045] As used herein “preparing” or “preparing a sample” or “processing” or processing a sample” refers to one or more of the following steps to achieve extraction and separation of a nucleic acid from a sample: (1) bacterial enrichment, (2) separation of bacterial cells from the sample, (3) cell lysis, and (4) nucleic acid extraction and/or purification (e.g., DNA extraction, total DNA extraction, genomic DNA extraction, RNA extraction). Embodiments of the nucleic acid extracted include, but are not limited to, DNA, RNA, mRNA and miRNA.

[0046] As used herein, “presence” refers to the existence (and therefore to the detection) of a reaction, a product of a method or a process (including but not limited to, an amplification product resulting from an amplification reaction), or to the “presence” and “detection” of an organism such as a pathogenic organism or a particular strain or species of an organism.

[0047] The term “primer” refers to a polynucleotide and analogs thereof that are capable of selectively hybridizing to a target nucleic acid or a “template,” a target region flanking sequence or to a corresponding primer-binding site of an amplification product; and allows detection of a double-stranded nucleic acid formed by hybridization or the synthesis of a sequence complementary to the corresponding polynucleotide template, flanking sequence or amplification product from the primer's 3′ end. Typically a primer can be between about 10 to 100 nucleotides in length and can provide a point of initiation for template-directed synthesis of a polynucleotide complementary to the template, which can take place, in the presence of appropriate enzyme(s), cofactors, substrates such as nucleotides and the like.

[0048] As used herein, the term “amplification primer” refers to an oligonucleotide, capable of annealing to an RNA or DNA region adjacent a target nucleic acid sequence, and serving as an initiation primer for nucleic acid synthesis under suitable conditions well known in the art. Typically, a PCR reaction employs a pair of amplification primers including an “upstream” or “forward” primer and a “downstream” or “reverse” primer, which delimit a region of the RNA or DNA to be amplified.

[0049] As used herein, the term “primer-binding site” refers to a region of a polynucleotide sequence, typically a sequence flanking a target region and/or an amplicon that can serve directly, or by virtue of its complement, as the template upon which a primer can anneal for any suitable primer extension reaction known in the art, for example, but not limited to, PCR. It will be appreciated by those of skill in the art that when two primer-binding sites are present on a single polynucleotide, the orientation of the two primer-binding sites is generally different. For example, one primer of a primer pair is complementary to and can hybridize with the first primer-binding site, while the corresponding primer of the primer pair is designed to hybridize with the complement of the second primer-binding site. Stated another way, in some embodiments the first primer-binding site can be in a sense orientation, and the second primer-binding site can be in an antisense orientation. A primer-binding site of an amplicon may, but need not comprise the same sequence as or at least some of the sequence of the target flanking sequence or its complement.

[0050] The terms “reporter probe” and “probe” are used interchangeably and refer to a detectable sequence of nucleotides or a detectable sequence of nucleotide analogs operable to specifically anneal with a corresponding amplicon, such as but not limited to, a target nucleic acid sequence and/or a PCR product and is further operable to be detected or identified. Reporter probes or probes may be detectable by a variety of methods, including but not limited to, detecting color, detecting radiation, fluorescence, luminescence, emitted wavelengths. In some embodiments, detecting a change in intensity, a change in radiation, a change in an emitted wavelength, a change in fluorescence, a change in luminescence, or a change in color or intensity of color may be used to identify and/or quantify a corresponding amplicon or a target polynucleotide. In one exemplary embodiment, by indirectly detecting an amplicon from a sample or processed sample, one can determine that a microorganism having a corresponding target sequence is present in a sample. Most reporter probes can be categorized based on their mode of action, for example but not limited to: nuclease probes, including without limitation TaqMan® probes; extension probes including without limitation scorpion primers, Lux™ primers, Amplifluors, and the like; and hybridization probes including without limitation molecular beacons, Eclipse probes, light-up probes, pairs of singly-labeled reporter probes, hybridization probe pairs, and the like. In certain embodiments, reporter probes may comprise an amide bond, an LNA, a universal base, and/or combinations thereof, and may include stem-loop and/or stem-less reporter probe configurations. Certain reporter probes may be singly-labeled, while other reporter probes are doubly-labeled. Dual probe systems that comprise FRET between adjacently hybridized probes are within the intended scope of the term reporter probe. In certain embodiments, a reporter probe may comprise a fluorescent reporter group and a quencher (including without limitation dark quenchers and fluorescent quenchers). Some non-limiting examples of reporter probes include TaqMan® probes; Scorpion probes (also referred to as scorpion primers); Lux™ primers; FRET primers; Eclipse probes; molecular beacons, including but not limited to FRET-based molecular beacons, multicolor molecular beacons, aptamer beacons, PNA beacons, and antibody beacons; labeled PNA clamps, labeled PNA openers, labeled LNA probes, and probes comprising nanocrystals, metallic nanoparticles and similar hybrid probes (see, e.g., Dubertret et al., Nature Biotech., 19:365-70, 2001; Zelphati et al., BioTechniques 28:304-15, 2000). In certain embodiments, reporter probes may further comprise minor groove binders including but not limited to TaqMan® MGB probes and TaqMan® MGB-NFQ probes (both from Applied Biosystems). In certain embodiments, reporter probe detection may comprise fluorescence polarization detection (see, e.g., Simeonov and Nikiforov, Nucl. Acids Res. 30:E91, 2002).

[0051] Those skilled in the art understand that as a target nucleic acid region (target sequence) is amplified by an amplification means, the complement of the primer-binding site is synthesized in the complementary amplicon or the complementary strand of the amplicon. Accordingly, it is to be understood that the complement of a primer-binding site is expressly included within the intended meaning of the term primer-binding site, as used herein.

[0052] As used herein, the term “genome” refers to the complete nucleic acid sequence, containing the entire genetic information, of a bacterium, a virus, a plasmid, a gamete, an individual, a population, a species, or a strain of a species.

[0053] As used herein, the term “pseudochromosome” refers to the concatenation, in their most likely order, of all available sequence contigs and scaffolds derived from sequencing of a bacterial genome, in which undefined gaps between contigs and scaffolds are represented by unidentified nucleobases.

[0054] As used herein, the term “genomic DNA” refers to the chromosomal DNA sequence of a gene or segment of a gene including the DNA sequence of non-coding as well as coding regions. Genomic DNA also refers to DNA isolated directly from cells, chromosomes or plasmid(s) within the genome of an organism, or cloned copies of all or part of such DNA.

[0055] As used herein the term “sample” refers to a starting material suspected of harboring a particular microorganism or group of microorganisms. A “contaminated sample” refers to a sample harboring a pathogenic microbe thereby comprising nucleic acid material from the pathogenic microbe. Examples of samples include, but are not limited to, food samples (including but not limited to samples from food intended for human or animal consumption such as processed foods, raw food material, produce (e.g., fruit and vegetables), legumes, meats (from livestock animals and/or game animals), fish, sea food, nuts, beverages, drinks, fermentation broths, and/or a selectively enriched food matrix comprising any of the above listed foods), water samples, environmental samples (e.g., soil samples, dirt samples, garbage samples, sewage samples, industrial effluent samples, air samples, or water samples from a variety of water bodies such as lakes, rivers, ponds etc.), air samples (from the environment or from a room or a building), forensic samples, agricultural samples, pharmaceutical samples, biopharmaceutical samples, samples from food processing and manufacturing surfaces, and/or biological samples. A “biological sample” refers to a sample obtained from eukaryotic or prokaryotic sources. Examples of eukaryotic sources include mammals, such as a human, a cow, a pig, a chicken, a turkey, a livestock animal, a fish, a crab, a crustacean, a rabbit, a game animal, and/or a member of the family Muridae (a murine animal such as rat or mouse). A biological sample may include blood, urine, feces, or other materials from a human or a livestock animal. Examples of prokaryotic sources include enterococci. A biological sample can be, for instance, in the form of a single cell, in the form of a tissue, or in the form of a fluid.

[0056] A sample may be tested directly, or may be prepared or processed in some manner prior to testing. For example, a sample may be processed to enrich any contaminating microbe and may be further processed to separate and/or lyse microbial cells contained therein. Lysed microbial cells from a sample may be additionally processed or prepares to separate, isolate and/or extract genetic material from the microbe for analysis to detect and/or identify the contaminating microbe. Analysis of a sample may include one or more molecular methods. For example, according to some exemplary embodiments of the present disclosure, a sample may be subject to nucleic acid amplification (for example by PCR) using appropriate oligonucleotide primers that are specific to one or more microbe nucleic acid sequences that the sample is suspected of being contaminated with. Amplification products may then be further subject to testing with specific probes (or reporter probes) to allow detection of microbial nucleic acid sequences that have been amplified from the sample. In some embodiments, if a microbial nucleic acid sequence is amplified from a sample, further analysis may be performed on the amplification product to further identify, quantify and analyze the detected microbe (determine parameters such as but not limited to the microbial strain, pathogenecity, quantity etc.).

[0057] Recitation of numerical ranges by endpoints in this specification include all numbers subsumed within that range (e.g., 1 to 5 includes 1, 1.5, 2, 2.75, 3, 3.80, 4, 5, etc.).

[0058] Various embodiments of the present teachings relate to compositions, methods and kits for identification of an E. coli O55:H7 microorganism. E. coli O55:H7 is known to cause human disease and hence is a pathogen that is a potential food contaminant, an environmental contaminant and may be a used as a biowarfare agent or a bioterrorism agent.

[0059] The present disclosure, in some embodiments discloses nucleotide sequences specific to E. coli O55:H7 and discloses detection assays designed using nucleotide sequences specific for this E. coli serotype. The specific and unique sequences were discovered by whole-genome sequencing of the bacterium E. coli O55:H7. The entire genome of a strain of E. coli O55:H7 is presented herein, providing the genomic information necessary to design highly specific E. coli O55:H7 assays. Embodiments relating to sequencing E. coli O55:H7 are described in the section entitled Examples.

[0060] Various embodiments of the present teachings relate to compositions based on newly discovered genomic sequence regions specific and unique to E. coli O55:H7. The entire genomic sequence as sequences is provided in the concurrently filed sequence listing. Example compositions of the disclosure include isolated sequences described in FIG. 1 that are uniquely found in E. coli O55:H7 but not in other closely related E. coli strains. These include, in some exemplary embodiments, at least isolated nucleic acid sequences described herein as SEQ ID NO: 66, SEQ ID NO: 252, SEQ ID NO: 1113, SEQ ID NO: 1461, SEQ ID NO:1, SEQ ID NO: 2, SEQ ID NO: 3, SEQ ID NO: 4 and SEQ ID NO: 5, fragments thereof and complements thereof. Compositions of the disclosure also include sequences that are complements of, fragments of, and/or sequences comprising at least 90% nucleic acid sequence identity to the sequences set forth in FIG. 1 and/or described herein as SEQ ID NO: 66, SEQ ID NO: 252, SEQ ID NO: 1113, SEQ ID NO: 1461, SEQ ID NO:1, SEQ ID NO: 2, SEQ ID NO: 3, SEQ ID NO: 4 and SEQ ID NO: 5. Nucleic acid sequences corresponding to SEQ ID NO: 66, SEQ ID NO: 252, SEQ ID NO: 1113, SEQ ID NO: 1461, SEQ ID NO:1, SEQ ID NO: 2, SEQ ID NO: 3, SEQ ID NO: 4 and SEQ ID NO: 5 are provided in the Sequence Listing and also in Table 5.

[0061] In some embodiments, isolated nucleic acid sequences of the disclosure may comprise nucleic acid molecules comprising at least a 40 nucleotide sequence of SEQ ID NO:66, SEQ ID NO:252, SEQ ID NO:1113, SEQ ID NO:1461, SEQ ID NO:1, SEQ ID NO:2, SEQ ID NO:3, SEQ ID NO:4, SEQ ID NO:5; at least a 30 nucleotide sequence of SEQ ID NO:66, SEQ ID NO:252, SEQ ID NO:1113, SEQ ID NO:1461, SEQ ID NO:1, SEQ ID NO:2, SEQ ID NO:3, SEQ ID NO:4, SEQ ID NO:5; at least a 25 nucleotide sequence of SEQ ID NO:66, SEQ ID NO:252, SEQ ID NO:1113, SEQ ID NO:1461, SEQ ID NO:1, SEQ ID NO:2, SEQ ID NO:3, SEQ ID NO:4, SEQ ID NO:5; at least a 20 nucleotide sequence of SEQ ID NO:66, SEQ ID NO:252, SEQ ID NO:1113, SEQ ID NO:1461, SEQ ID NO:1, SEQ ID NO:2, SEQ ID NO:3, SEQ ID NO:4, SEQ ID NO:5; at least a 15 nucleotide sequence of SEQ ID NO:66, SEQ ID NO:252, SEQ ID NO:1113, SEQ ID NO:1461, SEQ ID NO:1, SEQ ID NO:2, SEQ ID NO:3, SEQ ID NO:4, SEQ ID NO:5; at least a 10 nucleotide sequence of SEQ ID NO:66, SEQ ID NO:252, SEQ ID NO:1113, SEQ ID NO:1461, SEQ ID NO:1, SEQ ID NO:2, SEQ ID NO:3, SEQ ID NO:4, SEQ ID NO:5; any intermediate number of contiguous sequences from at least about 10 nucleotides of sequence to at least about 25 nucleotides of sequence of SEQ ID NO:66, SEQ ID NO:252, SEQ ID NO:1113, SEQ ID NO:1461, SEQ ID NO:1, SEQ ID NO:2, SEQ ID NO:3, SEQ ID NO:4, SEQ ID NO:5 and sequences having 90% identity to the foregoing sequences.

[0062] The present disclosure also provides in some embodiments compositions comprising primer and/or probe sequences that may be used for detection, identification, quantitation and/or differential detection of an E. coli O55:H7 organism. Probes and/or primers generally comprise, but are not limited to, oligonucleotide sequence having from about 10 to about 40 nucleotides. Exemplary probe and/or primer compositions of the disclosure include, but are not limited to, an isolated nucleic acid molecules having nucleic acid sequences comprised in SEQ ID NOs: 6-32, and/or nucleic acid sequences having at least 90% sequence identity to nucleic acid sequences comprised in SEQ ID NOs: 6-32, and/or fragments thereof, and/or oligonucleotide sequences having from at least 10 contiguous nucleotides of SEQ ID NOs: 6-32, oligonucleotide sequences having from at least 15 contiguous nucleotides of SEQ ID NOs: 6-32, oligonucleotide sequences having from at least 20 contiguous nucleotides of SEQ ID NOs: 6-32, and/or complementary sequences thereof. The sequences described in the sentence above are referred to collectively as “sequences comprising or derived from SEQ ID NOS: 6-32.” Nucleic acids corresponding to SEQ ID NOS: 6-32 are described in the Sequence Listing as well as in Table 5.

[0063] In some embodiments, exemplary probe and/or primer sequences set forth above comprising or derived from SEQ ID NOs: 6-32 may also comprise a label. A label may include, but is not limited to, a dye, a radioactive isotope, a fluorescent label, a bioluminescent label, a chemiluminescent label, an enzyme. A dye in some embodiments may be a fluorescein dye, a rhodamine dye, a cyanine dye, such as but not limited to FAM™ dye, and/or a VIC® dye.

[0064] In some embodiments, probes and/or primers of the disclosure for detection, identification, quantitation and/or differential detection methods and/or steps that are described in sections below. These methods may comprise embodiments such as hybridization that utilize one or more probe sequences of the disclosure, such as, but not limited, to sequences comprising or derived from SEQ ID NOS: 6-32; embodiments such as amplification (e.g., PCR) utilizing at least one primer pair of the disclosure, such as, but not limited, to sequences comprising or derived from SEQ ID NOS: 6-32; embodiments such as multiplex amplification using multiple primer pairs, such as, but not limited, to sequences comprising or derived from SEQ ID NOS: 6-32; embodiments such as quantitative detection (e.g., by real-time PCR) of amplified DNA using at least one probe and at least one primer pair.

[0065] Embodiments of the disclosure also relate to designing additional probe and/or primer sequences based on unique regions specific to E. coli O55:H7 described herein. Several programs and algorithms may be used to design primers and/or probes based on the nucleotide sequences specific to E. coli O55:H7 that are disclosed in the present specification. Probe or primer compositions of the disclosure may be synthesized or isolated by methods known in the art in light of the teachings of the present disclosure and the sequences provided herein. In some embodiments, a probe or a primer may comprise a sequence having as few as 10 nucleic acids, at least 15, at least 20 and at least about 25 nucleotides in length to at least about 40 nucleotides in length may be used.

[0066] Recombinant constructs comprising a probe and/or a primer sequence of the disclosure may comprise, but are not limited to, a recombinant construct comprising a sequences comprising or derived from SEQ ID NOS: 6-32.

[0067] Some embodiments describe methods for detection and identification of one or more unique sequences in a target nucleic acid extracted from or present in a sample suspected of containing an E. coli to identify the microorganism as E. coli O55:H7. E. coli O55:H7 specific and unique sequences may be identified alone or in any combination in order to identify or determine the presence of E. coli O55:H7. Exemplary sequences that are unique to E. coli O55:H7 are set forth in FIG. 1 and/or described herein as SEQ ID NO: 66, SEQ ID NO: 252, SEQ ID NO: 1113, SEQ ID NO: 1461, SEQ ID NO:1, SEQ ID NO: 2, SEQ ID NO: 3, SEQ ID NO: 4 and SEQ ID NO: 5.

[0068] Methods of the disclosure may be used for diagnostic detection and testing methods (such as for food safety testing) and are useful to prevent and protect against E. coli O55:H7 based human/animal infections.

[0069] In some embodiments, methods for detection of E. coli O55:H7 may comprise detecting in a sample at least one (or more) of a nucleic acid sequence selected from the group consisting of SEQ ID NO: 66, SEQ ID NO: 252, SEQ ID NO: 1113, SEQ ID NO: 1461, SEQ ID. NO: 1, SEQ ID NO:2, SEQ ID NO:3, SEQ ID NO:4, SEQ ID NO:5, fragments thereof, and complements thereof, wherein detection of one of the at least one nucleic acid sequences identifies E. coli O55:H7. Methods may also employ sequences that have at least 90% nucleic acid sequence identity to these sequences.

[0070] An exemplary testing method may comprise: preparing a sample which may comprise: a) processing a sample to extract any genetic material contained in the sample and to render the genetic material amenable to detection steps (e.g., isolating nucleic acid from a sample); b) providing a composition of the disclosure comprising at least one isolated nucleotide sequence of an E. coli O55:H7-specific nucleotide sequence (such as but not limited to at least one nucleic acid sequence having the sequence of SEQ ID NO: 66, SEQ ID NO: 252, SEQ ID NO: 1113, SEQ ID NO: 1461, SEQ ID NO:1, SEQ ID NO: 2, SEQ ID NO: 3, SEQ ID NO: 4, SEQ ID NO: 5, a fragment of the foregoing nucleic acids (also referred to as fragments thereof), a nucleic acid having from at least 10 to at least 25 nucleotides of contiguous sequences of the foregoing sequences, complements thereof and/or sequences comprising at least 90% nucleic acid sequence identity thereof); c) contacting the at least one E. coli O55:H7-specific isolated nucleotide sequence with the sample (processed sample); and d) detecting hybridization of the at least one E. coli O55:H7-specific nucleotide sequence to a complementary nucleotide sequence in the sample. Detecting one or more nucleotide sequences that are unique to E. coli O55:H7 are indicative that the test sample contains E. coli O55:H7. Embodiments of the disclosure also describe quantitative assays by which one of skill in the art, in light of this disclosure, may quantify the amount of E. coli O55:H7 in the sample.

[0071] In some embodiments, a nucleic acid may be isolated from a sample prior to practicing a method of the disclosure by isolating nucleic acids by methods known in the art to isolate nucleic acids from samples. Samples of various kinds as described in sections above may be amenable to the methods. In some embodiments, methods of the disclosure may comprise testing a food sample for contamination by E. coli O55:H7 and may comprise isolating nucleic acid from a food sample having a selectively enriched food matrix.

[0072] Detecting the at least one nucleic acid sequence from a sample may be performed by one or more technologies, such as, but not limited to, nucleic acid amplification, hybridization, mass spectrometry, nanostring, microfluidics, chemiluminescence, enzyme technologies and combinations thereof. Some of these technologies are described in later sections of the specification.

[0073] In one embodiment, a method of the disclosure for specifically detecting E. coli O55:H7 may comprise identifying at least a first unique region specific to E. coli O55:H7 referred to as a “first target nucleic acid sequence” for detection, obtaining or designing one or more primer pairs (polynucleotides) each primer pair comprising a “first primer” operable to hybridize to a first sequence within the first target nucleic acid sequence and at least a “second primer” operable to hybridize to a second sequence within the first target nucleic acid sequence; hybridizing at least a first pair to the first target nucleic acid sequence; amplifying the first target nucleic acid sequence to form a first amplified target nucleic acid sequence product; and detecting the at least first amplified target nucleic acid sequence product, wherein detection of the at least first amplified target nucleic acid sequence product is indicative of the presence of E. coli O55:H7. In some embodiments, the method is also indicative of the absence of E. coli O157:H7 in the sample and/or the absence of non-E. coli O55:H7 bacteria.

[0074] In some embodiments, a method as described above may further comprise: identifying at least a second target nucleic acid sequence specific to E. coli O55:H7; hybridizing a second pair of polynucleotide primers to the second target nucleic acid sequence; amplifying the second target nucleic acid sequence to form a second amplified target nucleic acid sequence product; and detecting the second amplified target nucleic acid sequence product, wherein detection of the second amplified target nucleic acid sequence product is indicative of the presence of E. coli O55:H7. In some embodiments, the detection of the first and second amplified target nucleic acid sequence product indicates the presence of E. coli O55:H7. Multiple targets nucleic acids may be amplifies and identified to increase the specificity of the assay if desired.

[0075] In some embodiments, the first target nucleic acid sequence specific to E. coli O55:H7 and the second target nucleic acid sequence specific to E. coli O55:H7 may comprise one or more sequences such as but not limited to: SEQ ID NO: 66, SEQ ID NO: 252, SEQ ID NO: 1113, SEQ ID NO: 1461, SEQ ID NO:1, SEQ ID NO: 2, SEQ ID NO: 3, SEQ ID NO: 4, SEQ ID NO: 5, fragments thereof, at least 25 nucleotide sequences thereof, complements thereof and sequences comprising at least 90% nucleic acid sequence identity thereof.

[0076] The first primer pair and the second primer pair of the methods, in some embodiments, may be one or more of: SEQ ID NO: 6, SEQ ID NO:7, SEQ ID NO:8, SEQ ID NO:9, SEQ ID NO:10, SEQ ID NO: 11, SEQ ID NO:12, SEQ ID NO:13, SEQ ID NO:14, SEQ ID NO:15, SEQ ID NO:16, SEQ ID NO: 17, SEQ ID NO:18, SEQ ID NO:19, SEQ ID NO:20, SEQ ID NO:21, SEQ ID NO:22, SEQ ID NO:23, SEQ ID NO:24, SEQ ID NO:25, SEQ ID NO:26, SEQ ID NO:27, SEQ ID NO:28, SEQ ID NO:29, SEQ ID NO:30, SEQ ID NO:31, SEQ ID NO:32, fragments thereof, at least 10 contiguous nucleotide sequences thereof complements thereof, and labeled derivatives thereof.

[0077] In some embodiments, detection of an amplified target nucleic acid sequence product (such as a first amplified target nucleic acid sequence product and/or a second amplified target nucleic acid sequence product) as set forth in the embodiment methods described above may comprise use of a probe. Exemplary probes may comprise but are not limited to one or more sequences such as SEQ ID NO: 6, SEQ ID NO:7, SEQ ID NO:8, SEQ ID NO:9, SEQ ID NO:10, SEQ ID NO: 11, SEQ ID NO:12, SEQ ID NO:13, SEQ ID NO:14, SEQ ID NO:15, SEQ ID NO:16, SEQ ID NO: 17, SEQ ID NO:18, SEQ ID NO:19, SEQ ID NO:20, SEQ ID NO:21, SEQ ID NO:22, SEQ ID NO:23, SEQ ID NO:24, SEQ ID NO:25, SEQ ID NO:26, SEQ ID NO:27, SEQ ID NO:28, SEQ ID NO:29, SEQ ID NO:30, SEQ ID NO:31, SEQ ID NO:32, fragments thereof, at least 10 contiguous nucleotide sequences thereof complements thereof, and labeled derivatives thereof.

[0078] Labeled probes and/or primers are helpful in detection and quantitation methods. Label for primers and probes may comprise at least one of the following: a dye, a radioactive isotope, a chemiluminescent label, a fluorescent label, a bioluminescent label, and an enzyme. Dye's may comprise a fluorescein dye, a rhodamine dye, and/or a cyanine dye. Some probes and primers may be dually labeled. Non-limiting examples of nucleic acid dyes include ethidium bromide, DAPI, Hoechst derivatives including without limitation Hoechst 33258 and Hoechst 33342, intercalators comprising a lanthanide chelate (for example but not limited to a nalthalene diimide derivative carrying two fluorescent tetradentate β-diketone-Eu³⁺ chelates (NDI-(BHHCT-Eu³⁺)₂), (See, e.g., Nojima et al., Nucl. Acids Res. Supplement No. 1, 105-06 (2001)), ethidium bromide, and certain unsymmetrical cyanine dyes such as SYBR® Green, PicoGreen®, and BOXTO dyes. SYBR Green dye is an “intercalating dye” which, as used herein, refers to a fluorescent molecule that is specific for a double-stranded polynucleotide or that at least shows a substantially greater fluorescent enhancement when associated with a double-stranded polynucleotide than with a single-stranded polynucleotide. Typically nucleic acid dye molecules associate with double-stranded segments of polynucleotides by intercalating between the base pairs of the double-stranded segment, by binding in the major or minor grooves of the double-stranded segment, or both.

[0079] Various embodiments of the present teachings relate to a multi-primer assay for detecting E. coli O55:H7 in a sample. Methods of the disclosure, in some embodiments, comprise amplification methods that yield one or more amplification products. In some embodiments an amplification product may be detected by a real-time assay. A real-time assay may be, but is not limited to a SYBR® Green dye assay or a TaqMan® assay.

[0080] In embodiments of methods where more than one (e.g., two) amplification products may be formed, detection of a first amplification product may entail the use of a first probe and detection of a second amplification product may entail the use of a second probe. In such embodiments, a first probe may have a first label and a second probe may comprise a second label. In one example embodiment, a first probe may be labeled with a FAM™ dye and a second probe may be labeled with VIC® dye. In some embodiments, hybridizing and amplifying with a first pair of polynucleotide primers may be carried out in a first vessel and hybridizing and amplifying with a second pair of polynucleotide primers may be carried in a second vessel. In some embodiments, hybridizing and amplifying with a first pair of polynucleotide primers and hybridizing and amplifying with a second pair of polynucleotide primers may be carried out in a single vessel. In some embodiments, detection of amplified products may be by a real-time assay such as a SYBR® Green dye assay or a TaqMan® assay.

[0081] In some embodiments, the present disclosure describes methods based on utilizing whole-genome sequencing of a bacterium(s) and/or bacterial strain(s) of interest (e.g., E. Coli O55:H7) and comparison to other known bacterial organisms (e.g., E. Coli O157:H7) to identifying the bacterium of interest.

[0082] For example, some embodiments of the disclosure describe assays to distinguish E. coli O55:H7 from E. coli O157:H7. E. coli O157:H7 is a known pathogen that is highly similar at the nucleotide level to the E. coli O55:H7 serotype. Tests to detect E. coli O157:H7 often cross detect E. coli O55:H7, thereby picking up false positives. The present disclosure provides nucleotide sequence information that may be used to design specific tests for the distinct detection of E. coli O157:H7 that does not cross-detect E. coli O55:H7. For example, in some embodiments, using the genome sequence of E. coli O55:H7 as described herein and the genomic sequence of E. coli O157:H7, primers and probes may be designed that detect sequences unique to E. coli O157:H7 that are not present in E. coli O55:H7.

[0083] In other embodiments, a specific testing method may comprise: testing a sample that has been detected to be positive for E. coli O157:H7 comprising: a) providing an isolated nucleotide sequence of an E. coli O55:H7-specific nucleotide sequence (such as but not limited to at least one nucleic acid sequence having the sequence of SEQ ID NO: 66, SEQ ID NO: 252, SEQ ID NO: 1113, SEQ ID NO: 1461, SEQ ID NO:1, SEQ ID NO: 2, SEQ ID NO: 3, SEQ ID NO: 4, SEQ ID NO: 5, a fragment of the foregoing nucleic acids (also referred to as fragments thereof), a nucleic acid having at least 25 nucleotides of contiguous sequences of the foregoing sequences, complements thereof and/or sequences comprising at least 90% nucleic acid sequence identity thereof; b) contacting the at least one E. coli O55:H7-specific isolated nucleotide sequence with the sample; and c) detecting hybridization of the at least one E. coli O55:H7-specific nucleotide sequence to a complementary nucleotide sequence in the sample. Detecting one or more nucleotide sequences that are unique to E. coli O55:H7 are indicative that the test sample contains E. coli O55:H7. Several exemplary detecting methods that may be used have been described in sections above. Embodiments of the disclosure also describe quantitative assays by which one of skill in the art, in light of this disclosure, may quantify the amount of E. coli O55:H7 in the sample. This may be compared to the quantity of E. coli O157:H7 detected in the sample to determine whether the sample is devoid of E. coli O157:H7 or is contaminated with a combination of E. coli O157:H7 and E. coli O55:H7.

[0084] In some embodiments, methods for distinguishing a bacteria from an E. coli O55:H7 are described and may comprise analyzing the genome of the bacteria for the presence of a sequence selected from the group consisting of SEQ ID NO:1, SEQ ID NO:66, SEQ ID NO:2, SEQ ID NO:252, SEQ ID NO:3, SEQ ID NO:4, SEQ ID NO:1113, SEQ ID NO:5 and SEQ ID NO:1461, fragments thereof, at least 25 nucleotide sequences thereof and sequences comprising at least 90% nucleic acid sequence identity thereof. Such methods may be used to distinguish the presence of E. coli O55:H7 from a bacterium of several species. For example, methods of the disclosure may be used to distinguish the presence of E. coli O55:H7 from other E. coli bacteria such as an E. coli O26:H11. Methods of the disclosure may also be used to distinguish the presence of E. coli O55:H7 from a bacteria of a Salmonella sp. and/or Shigella spp. In some embodiments, the Shigella spp. may be Shigella dysenteriae, Shigella flexneri, Shigella boydii and Shigella sonnei. In some embodiments, Shigella dysentaeria may be a strain selected from the group consisting of strain 1012, strain M131649 and strain Sd197. In some embodiments, the Shigella flexneri may be a strain selected from the group consisting of strain 2457T, strain 301 and strain 8401. In some embodiments, Shigella boydii may be a strain selected from the group consisting of strain BS512 and strain Sb227. In some embodiments, the Shigella sonnei may be a strain selected from the group consisting of strain 53G and strain Ss046.

[0085] Methods of the disclosure may further comprise preparing a test sample for amplification prior to hybridizing and/or amplification and may include steps such as but not limited to (1) bacterial enrichment, (2) separation of bacterial cells from other components of the sample, (3) lysis of bacterial cells, and (4) nucleic acid extraction.

[0086] In various embodiments, a variety of methods for amplifying nucleic acid sequences may be employed. Amplification may be mediated by polymerase chain reaction, having at least a first pair of polynucleotide primers and in some embodiments at least a second pair of polynucleotide primers. Amplification methods include, but are not limited to, polymerase chain reaction (PCR), RT-PCR, asynchronous PCR (A-PCR), and asymmetric PCR (AM-PCR), strand displacement amplification (SDA), multiple displacement amplification (MDA), nucleic acid strand-based amplification (NASBA), and/or rolling circle amplification (RCA), transcription-mediated amplification (TMA). (See, e.g., PCR Technology: Principles and Applications for DNA Amplification (ed. H. A. Erlich, Freeman Press, NY, N.Y., 1992); PCR Protocols: A Guide to Methods and Applications (eds. Innis, et al., Academic Press, San Diego, Calif., 1990); Mattila et al., Nucleic Acids Res. 19, 4967 (1991); Eckert et al., PCR Methods and Applications 1, 17 (1991); PCR (eds. McPherson et al., IRL Press, Oxford); and U.S. Pat. Nos. 4,683,202, 4,683,195, 4,800,159 4,965,188 and 5,333,675 each of which is incorporated herein by reference in their entirety).

[0087] Nucleic acid amplification techniques are traditionally classified according to the temperature requirements of the amplification process. Isothermal amplifications are conducted at a constant temperature, in contrast to amplifications that require cycling between high and low temperatures. Examples of isothermal amplification techniques are: Strand Displacement Amplification (SDA; Walker et al., 1992, Proc. Natl. Acad. Sci. USA 89:392 396; Walker et al., 1992, Nuc. Acids. Res. 20:1691 1696; and EP 0 497 272, all of which are incorporated herein by reference), self-sustained sequence replication (3SR; Guatelli et al., 1990, Proc. Natl. Acad. Sci. USA 87:1874 1878), the Qβ replicase system (Lizardi et al., 1988, BioTechnology 6:1197 1202), and the techniques disclosed in WO 90/10064 and WO 91/03573.

[0088] Examples of techniques that require temperature cycling are: polymerase chain reaction (PCR; Saiki et al., 1985, Science 230:1350 1354), ligase chain reaction (LCR; Wu et al., 1989, Genomics 4:560 569; Barringer et al., 1990, Gene 89:117 122; Barany, 1991, Proc. Natl. Acad. Sci. USA 88:189 193), transcription-based amplification (Kwoh et al., 1989, Proc. Natl. Acad. Sci. USA 86:1173 1177) and restriction amplification (U.S. Pat. No. 5,102,784), and self-sustained sequence replication (Guatelli et al., Proc. Nat. Acad. Sci. USA, 87, 1874 (1990)) and nucleic acid based sequence amplification (NABSA). (See, U.S. Pat. Nos. 5,409,818, 5,554517 and 6,063,603). The latter two amplification methods include isothermal reactions based on isothermal transcription, which produce both single-stranded RNA (ssRNA) and double-stranded DNA (dsDNA) as the amplification products in a ratio of about 30 or 100 to 1, respectively.

[0089] Other exemplary techniques include Nucleic Acid Sequence-Based Amplification (“NASBA”; see U.S. Pat. No. 5,130,238), and Rolling Circle Amplification (see Lizardi et al., Nat Genet. 19:225 232 (1998)). Amplification primers comprising nucleic acid sequences unique to E. coli O55:H7 and/or designed based on these unique E. coli O55:H7 sequences of the present disclosure may be used to carry out, for example, but not limited to, PCR, SDA or tSDA.

[0090] PCR is an extremely powerful technique for amplifying specific polynucleotide sequences, including genomic DNA, single-stranded cDNA, and mRNA among others. Various methods of conducting PCR amplification and primer design and construction for PCR amplification using sequences disclosed in this specification are described in the present disclosure. Generally, in PCR a double-stranded DNA to be amplified is denatured by heating the sample. New DNA synthesis is then primed by hybridizing primers to one or more target sequence(s) in the presence of DNA polymerase and excess dNTPs. In subsequent cycles, the primers hybridize to the newly synthesized DNA to produce discreet products comprising the primer sequences at either end. These amplified products accumulate exponentially with each successive round of amplification. The DNA polymerase used in PCR is often a thermostable polymerase. This allows the enzyme to continue functioning after repeated cycles of heating necessary to denature the double-stranded DNA for allowing primer annealing. Polymerases that are useful for PCR include, but are not limited to, Taq DNA polymerase, Tth DNA polymerase, Tfl DNA polymerase, Tma DNA polymerase, Tli DNA polymerase, and Pfu DNA polymerase. There are many commercially available modified forms of these enzymes including: AmpliTaq® and AmpliTaq Gold® both available from Applied Biosystems. Many are available with or without a 3′ to 5′ proofreading exonuclease activity. See, for example, Vent® and Vent®. (exo-) available from New England Biolabs.

[0091] Amplified products may be detected using probes or labeled primers. Since primers are incorporated into the ends of an amplicon, in some embodiments, labeled probes that are complementary to the primer sequences may be used. Alternatively labeled probes may be used for detection. Several other methods for the detection of an amplified product (e.g., PCR amplification product) include, but are not limited to, gel electrophoresis, capillary electrophoresis, and are known to one of skill in the art and may be applicable in light of the teachings of the present disclosure.

[0092] The disclosure also describes kits for the detection of E. coli O55:H7. A kit of the disclosure may comprise at least one pair of amplification primers (e.g., PCR primers) that may be designed or derived from nucleic acid sequences of SEQ ID NO:1, SEQ ID NO: 2, SEQ ID NO: 3, SEQ ID NO: 4, SEQ ID NO: 5, SEQ ID NO: 66, SEQ ID NO: 252, SEQ ID NO: 1113, SEQ ID NO: 1461, fragments thereof, complementary sequences thereof, sequences comprising at least 90% nucleic acid sequence identity thereof and complementary sequences comprising at least 90% nucleic acid sequence identity thereof. In some embodiments, the primers of a kit may be labeled. A kit comprising two (or more) pairs of primers may have primer pairs labeled with at least two (or more) different labels that may be detectable separately. A kit may further comprise at least one probe designed and/or derived from nucleic acid sequences comprising SEQ ID NO:1, SEQ ID NO: 2, SEQ ID NO: 3, SEQ ID NO: 4, SEQ ID NO: 5, SEQ ID NO: 66, SEQ ID NO: 252, SEQ ID NO: 1113, SEQ ID NO: 1461, fragments thereof, complementary sequences thereof, sequences comprising at least 90% nucleic acid sequence identity thereof and complementary sequences comprising at least 90% nucleic acid sequence identity thereof. Probes comprised in kits of the disclosure may be labeled. If a kit comprises multiple probes each probe may be labeled with a different label to allow detection of different products that may be the target of each different probe.

[0093] In some embodiments, a kit for the detection of E. coli O55:H7 may comprise: at least one pair of amplification primers (e.g., PCR primers) and/or at least one probe designed and/or derived from nucleic acid sequences comprising SEQ ID NO: 6, SEQ ID NO:7, SEQ ID NO:8, SEQ ID NO:9, SEQ ID NO:10, SEQ ID NO: 11, SEQ ID NO:12, SEQ ID NO:13, SEQ ID NO:14, SEQ ID NO:15, SEQ ID NO:16, SEQ ID NO: 17, SEQ ID NO:18, SEQ ID NO:19, SEQ ID NO:20, SEQ ID NO:21, SEQ ID NO:22, SEQ ID NO:23, SEQ ID NO:24, SEQ ID NO:25, SEQ ID NO:26, SEQ ID NO:27, SEQ ID NO:28, SEQ ID NO:29, SEQ ID NO:30, SEQ ID NO:31, SEQ ID NO:32, fragments comprising at least 10 contiguous nucleotide sequences thereof and complements thereof. In some embodiments, kit primers may be labeled. A kit comprising multiple pairs of primers may have primer pairs each labeled with different labels that may be detectable separately. Probes comprised in kits of the disclosure may be labeled. If a kit comprises multiple probes each probe may be labeled with a different label to allow detection of different products that may be the target of each different probe.

[0094] A kit of the disclosure may further comprise one or more components such as but not limited to: at least one enzyme, dNTPs, at least one buffer, at least one salt, at least one control nucleic acid sample, loading solution for preparation of the amplified material for electrophoresis, genomic DNA as a template control, a size marker to insure that materials migrate as anticipated in a separation medium, and an instruction protocol and manual to educate a user and limit error in use. It is within the scope of these teachings to provide test kits for use in manual applications or test kits for use with automated sample preparation, reaction set-up, detectors or analyzers. In some embodiments, a kit amplification product may be further analyzed by methods such as but not limited to electrophoresis, hybridization, mass spectrometry, nanostring, microfluidics, chemiluminescence and/or enzyme technologies.

[0095] Components of kits may be individually and in various combinations comprised in one or a plurality of suitable container means.

[0096] While the principles of inventions disclosed herein have been described in connection with specific embodiments, it should be understood clearly that these descriptions are made only by way of example and are not intended to limit the scope of inventions described herein. The present disclosure is for the purposes of illustration and description. It is not intended to be exhaustive or to limit disclosed embodiments to the precise forms as described. In light of this disclosure, many modifications and variations will be apparent to a practitioner skilled in the art. What is disclosed was chosen and described in order to best explain the principles and practical application of the disclosed embodiments of the art described, thereby enabling others skilled in the art to understand various embodiments and various modifications that are suited to contemplated uses. It is intended that the scope of what is disclosed be defined by the following claims and their equivalence.

### EXAMPLES

[0097] Some embodiments of the present disclosure may be understood in connection with the following examples. However, one skilled in the art will readily appreciate the specific materials, compositions, and results described are merely illustrative of the disclosure, and are not intended to, nor should be construed to, limit the scope disclosure and its various embodiments.

### Example I

### Strain Selection

[0098] One E. coli O55:H7 (PE704) bacterium strain was selected based on its close phylogenetic relationship with the E. coli O157:H7 strain. The E. coli O157:H7 (EDL933) strain sequence was used as a reference due to its availability as a finished genome in the public databases. Genomic DNA was isolated from a fresh bacterial lawn of E. coli O55:H7 strain PE704 using the DNeasy Blood and Tissue Kit (Qiagen, Valencia, Calif.) according to the manufacturer's directions.

### Example II

### SOLiD™ Sequencing

[0099] Mate-pair libraries were constructed from the isolated E. coli O55:H7 PE704 strain genomic DNA. Sequencing was carried out to 2×25 base pairs using SOLiD™ V1 chemistry (Applied Biosystems) according to the manufacturer's instructions.

### Example III

### Sequencing of E. coli O55:H7 O55:H7 Genome

[0100] In some embodiments, the genomic sequence of E. coli O55:H7 has been sequenced and specific and unique regions identified. The source of the E. coli O55:H7 nucleic acid used for sequencing is the strain PE704 (Applied Biosystems).

[0101] Genomic DNA was isolated from a fresh bacterial lawn of strain PE704 using the DNeasy Blood and Tissue Kit (Qiagen, Valencia, Calif.) according to the manufacturer's directions (Example I). The isolated genomic DNA was used to construct mate-pair libraries, which were sequenced to 2×25 base pairs using SOLiD™ V1 chemistry (Applied Biosystems), according to the manufacturer's instructions (Example II).

[0102] The complete genomic sequence of E. coli O55:H7, strain PE704 was sequenced using the SOLiD™ instrument platform using 25 nucleotide mate-paired reads. Mate-paired SOLiD reads from the E. coli O55:H7 PE704 genome were mapped against the E. coli O157:H7 EDL933 reference genome (Refseq Acc. NC_{—}002655.2) and from these, a consensus E. coli O55:H7 genomic sequence was derived. The consensus E. coli O55:H7 genomic sequence derived as set forth above is also referred to in this application as E. coli O55:H7 “pseudochromosome,” and its nucleic acid sequence is described in SEQ ID NO:1695, presented in concurrently filed Sequence Listing and described in Example IV below. The consensus sequence contained a number of gaps where sequence was not present in E. coli O55:H7 genome relative to E. coli O157:H7 genome. By breaking the consensus sequence at regions where read coverage dropped to zero, the E. coli O55:H7 genomic sequence assembly was reduced into contigs for which sequence was known, separated by gaps, in which sequence was unknown. Contig nucleic acid sequences are described in SEQ ID NOS: 33-1694, presented in concurrently filed Sequence Listing.

[0103] In order to close some of the gaps, long-range PCR was attempted for a number of these regions, and when successful, the resulting amplicons were sequenced using primer walking and Sanger sequencing methods. Some of these sequences represented E. coli O55:H7 insertions relative to the E. coli O157:H7 EDL933 genome. The ungapped SOLiD™ consensus contigs and Sanger sequence reads were assembled using GAP4 (R. Staden, D. P. Judge and J. K. Bonfield. Managing Sequencing Projects in the GAP4 Environment. Introduction to Bioinformatics. A Theoretical and Practical Approach. Eds. Stephen A. Krawetz and David D. Womble. Human Press Inc., Totawa, N.J. 07512 (2003)), yielding a total of 1,662 contigs (described in SEQ ID NOS: 33 through 1694, presented in concurrently filed Sequence Listing). Some of the E. coli O55:H7 genomic regions with a large number of clustered sequence gaps, primarily corresponding to some prophages in the E. coli O157:H7 EDL933 reference genome, were not able to be spanned by long-range PCR. The assembled sequence formed a pseudochromosome for E. coli O55:H7 (described in SEQ ID NO: 1695, see concurrently filed Sequence Listing) in which contigs were arranged in the most likely order and stitched together with intervening ambiguous spacers, indicated by one or more ‘N’ characters, which represent the undetermined bases in the inter-contig gaps.

[0104] The clustered sequence gaps are between each of SEQ ID NOS: 66 through 100, representing 34 gaps; SEQ ID NOS: 109 through 118, representing 9 gaps; SEQ ID NOS: 256 through 325, representing 69 gaps; SEQ ID NOS: 365 through 433, representing 68 gaps; SEQ ID NOS: 463 through 521, representing 58 gaps; SEQ ID NOS: 526 through 589, representing 63 gaps; SEQ ID NOS: 602 through 652, representing 50 gaps; SEQ ID NOS: 654 through 747, representing 93 gaps; SEQ ID NOS: 749 through 844, representing 95 gaps; SEQ ID NOS: 904 through 973, representing 69 gaps; SEQ ID NOS: 975 through 1042, representing 67 gaps; SEQ ID NOS: 1043 through 1050, representing 7 gaps; SEQ ID NOS: 1114 through 1120, representing 6 gaps; SEQ ID NOS: 1123 through 1320, representing 197 gaps; SEQ ID NOS: 1375 through 1385, representing 10 gaps; SEQ ID NOS: 1388 through 1447, representing 59 gaps. (See concurrently filed Sequence Listing for sequence information/description).

[0105] The consensus sequence (SEQ ID NO:1695, see concurrently filed Sequence Listing) was submitted to the JCVI Annotation Service (jcvi.org/cms/research/projects/annotation-service/overview/) for automated gene finding and annotation. The results, a listing of the open reading frames (ORFs) matched to putative functions were derived. A detailed listing of ORFs are described in one or more provisional applications, to which the present application claims priority to, and the specifications of which, are incorporated herein by reference in their entirety. FIG. 3 describes a selected annotation of ORFs for E. coli O55:H7 unique and/or specific nucleic acid sequences that are described in FIG. 1. An encoded protein from each ORF can be determined by converting the DNA sequence in an ORF to the corresponding amino acid sequence using the genetic code by methods known to one of skill in the art in light of the sequences and other teachings of the present disclosure.

[0106] The E. coli O55:H7 genome reads covered 91% of the E. coli O157:H7 EDL933 genome at an average depth of 20. The frequency of single nucleotide polymorphisms (SNPs) in the O55:H7 versus O157:H7 was 0.28%, confirming that the O55:H7 and O157:H7 serotypes are very closely related.

[0107] SNPs were detected by aligning the E. coli O55:H7 consensus sequence to the E. coli O157:H7 EDL933 sequence using the MUMmer suite (Kurtz, S. et al., (2004) Genome Biol. 5 R12.). SNPs in indel regions and in the artificial spacer sequences used to separate the contigs were omitted. Table 1 indicates the number of SNPs identified in the E. coli O55:H7 genome and Table 2 identifies the few regions having greater than half (54.3%) of the total SNPs, comprising 165 Kb (about 3% of the genome). Coordinates refer to the E. coli O55:H7 consensus genome (i.e, to nucleic acid residues as numbered in SEQ ID NO:1695, see concurrently filed Sequence Listing). The plot of SNP density in 1 Kb windows across the O55:H7 genome is shown in FIG. 2.

TABLE 1

| | |
|---|---|
| Non-coding SNPS | 985 |
| Synonymous coding SNPs | 3,534 |
| Non-synonymous coding SNPs | 2,445 |
| Total SNPS | 6,964 |

TABLE 2

| Left boundary | Right boundary | Range length | Features | Num SNPs | Notes |
|---|---|---|---|---|---|
| 1350800 | 1391400 | 40,600 | CP-933C, CP-933X | 416 | a |
| 1403500 | 1411000 | 7,500 | CP-933X | 68 | a |
| 1869000 | 1871000 | 2,000 | CP-933P | 17 | a |
| 1913000 | 1921500 | 8,500 | CP-933P | 137 | a |
| 2324000 | 2336000 | 12,000 | CP-933U | 63 | a |
| 2347000 | 2353000 | 6,000 | CP-933U | 204 | a |
| 2413500 | 2423000 | 7,500 | his operon | 338 | b |
| 2439500 | 2457000 | 17,500 | O-antigen, colanic | 2,426 | b |
| | | | acid loci | | |
| 2596500 | 2660000 | 63,500 | CP-933V | 115 | a |
| TOTALS | | 165,100 | | 3,784 | |

^{a}Disintegration of cryptic prophage that are no longer under selection, and occupation of the site by an alternate related prophage may be most plausible explanations. However, mapping artifacts due to repeated sequences may be a possibility.
^{b}The his, O-antigen, and colanic acid loci all appeared to have co-transferred during the event that converted O55 to O157. Estimation of the recombination breakpoints from this analysis may be performed. The present E. coli O55 sequence in the 67 kb region sequenced by Iguchi (Microbiology. 2008 Feb; 154(Pt 2): 559-70) (not this whole region) differs from E. coli O55:H7 TB182 by only 24 SNPs, indicating accuracy of the sequence assembly.
Average SNP rate in these regions is 2.3%. When calculating divergence times and other factors atypical regions may be omitted from the analysis. SNP rate in the rest of the genome is only about 0.06%, 38-fold lower than for these regions.

[0108] In some embodiments sequences specific and unique to E. coli O55:H7 genome can be used to identify E. coli O55:H7 or distinguish E. coli O55:H7 from all other E. coli and Shigella genomes. One example method used to identify E. coli O55:H7 specific sequences is outlined in Example IV.

[0109] Prior to the teachings of the present disclosure, ‘O-islands’ where described as nucleic acid sequence regions specific and unique to and found only in E. coli O157:H7 serotype, (Perna, N. T., et al., (2001) Nature 409(25):529-533). O-islands regions total 1.34 megabases. Comparison of the genome of E. coli O157:H7 with that of E. coli O55:H7 unexpectedly revealed that E. coli O55:H7 serotype also contained many of the O-islands, most of which were virtually identical to those of E. coli O157:H7. Therefore, prior to the teachings of the present disclosure, a definitive identification of E. coli O157:H7, and likewise of E. coli O55:H7, was difficult due to genome sequence similarity, even in supposedly E. coli O157:H7 serotype specific regions, i.e., O-islands.

[0110] Embodiments of the present disclosure have identified serotype specific and unique DNA sequences for E. coli O55:H7 (e.g., but not limited to, SEQ ID NO:66, SEQ ID NO:252, SEQ ID NO:1113, SEQ ID NO:1461, SEQ ID NO:1, SEQ ID NO:2, SEQ ID NO:3, SEQ ID NO:4 and SEQ ID NO:5) which were utilized for an assay design (described in Example V) and the subsequent detection of E. coli O55:H7 and not E. coli O157:H7 by amplification (PCR), hybridization and other molecular biology techniques as known to one skilled in the art.

[0111] Five E. coli O55:H7 specific sequences, covering a sum of 1,124 nucleotides were found using the analysis of Example IV. These sequences are shown in FIG. 1 and in the submitted sequence listing. Further analysis, including PCR and sequencing from a diverse panel of E. coli O55:H7 strains is currently underway. Assays targeting these sequences are also being screened against a large panel of E. coli non-O55:H7 serotypes to empirically validate specificity.

[0112] In some embodiments, the sequences designated by SEQ ID NOS:1-5 and SEQ ID NO:66, SEQ ID NO:252, SEQ ID NO:1113, SEQ ID NO:1461, are signature sequences against which E. coli O55:H7-specific diagnostic assays have been designed in the present disclosure. No comparable sequences were found in the GenBank database (release 175.0) and unexpectedly, appear to be specific and unique to only E. coli O55:H7. The coordinates of E. coli O55:H7 specific sequences are provided in Table 3.

TABLE 3

| Signature | Contig | | |
|---|---|---|---|
| SEQ ID | SEQ ID | Contig left | Contig right |
| NO: | NO: | coordinate | coordinate |
| 1 | 66 | 5504 | 5652 |
| 2 | 252 | 1887 | 2650 |
| 3 | 1113 | 1617 | 1676 |
| 4 | 1113 | 1734 | 1794 |
| 5 | 1461 | 23329 | 23418 |

[0113] In some embodiments, SEQ ID NOS:1-5 represent nucleic acid sequence substrings selected from nucleic acid sequences set forth in SEQ ID NO:66, SEQ ID NO:252, SEQ ID NO:1113 (SEQ ID NOS:3-4), and SEQ ID NO:1461 respectively. Any of these sequences as well as complements and sequences comprising at least 90% nucleic acid sequence identity thereof can be used to identify and/or distinguish E. coli O55:H7 from other E. coli serotypes, Salmonella sp., and Shigella genomes. In some embodiments, a sequence having at least 25 contiguous nucleotides of these sequences as well as complementary sequences and sequences comprising at least 90% nucleic acid sequence identity to SEQ ID NOS:1-5 and SEQ ID NO:66, SEQ ID NO:252, SEQ ID NO:1113 (SEQ ID NOS:3-4), and SEQ ID NO:1461 may also be used to identify and/or distinguish E. coli O55:H7 from other E. coli serotypes, Salmonella sp., and Shigella genomes.

[0114] Assays used for the detection and identification of E. coli O55:H7 may include, but are not limited to, use of an oligonucleotide sequence of the disclosure for hybridization, and/or as a primer pair used for PCR, and/or possibly in conjunction with a probe for real-time PCR. The length of an oligonucleotide probe and/or primer sequence may be as few as 10, at least 15, at least 20, at least 25, and up to 40 nucleotides in length. Use of larger than 40 nucleotide oligonucleotides are also contemplated. Design of sequences for hybridization detection and PCT are may be done by one of skill in the art in light of the teachings of this disclosure, such as for example the unique sequences of E. coli O55:H7.

[0115] Some exemplary probe and/or primer sequences of the disclosure may comprise SEQ ID NO: 6, SEQ ID NO:7, SEQ ID NO:8, SEQ ID NO:9, SEQ ID NO:10, SEQ ID NO: 11, SEQ ID NO:12, SEQ ID NO:13, SEQ ID NO:14, SEQ ID NO:15, SEQ ID NO:16, SEQ ID NO: 17, SEQ ID NO:18, SEQ ID NO:19, SEQ ID NO:20, SEQ ID NO:21, SEQ ID NO:22, SEQ ID NO:23, SEQ ID NO:24, SEQ ID NO:25, SEQ ID NO:26, SEQ ID NO:27, SEQ ID NO:28, SEQ ID NO:29, SEQ ID NO:30, SEQ ID NO:31, SEQ ID NO:32, fragments thereof, at least 10 contiguous nucleotide sequences thereof and complements thereof. In some embodiments, the oligonucleotide sequence may be comprised in recombinant constructs as well as complements and sequences comprising at least 90% nucleic acid sequence identity thereof.

### Example IV

### Assembly of the E. coli O55:H7 PE704 Genome

[0116] Mate-paired SOLiD™ reads from E. coli O55:H7 PE704 genome were mapped against the E. coli O157:H7 EDL933 reference genome (Refseq Acc. NC_{—}002655.2) and from these a consensus O55:H7 genomic sequence was derived. Gaps where no consensus sequences could be determined were identified, and PCR primers were designed to flank these regions. Long-range PCR was attempted for a number of these regions, and when successful, the resulting amplicons were sequenced using primer walking and Sanger sequencing methods. Ungapped SOLiD™ consensus contigs and Sanger sequence reads were assembled using GAP4 (See, R. Staden, D. P. Judge and J. K. Bonfield. Managing Sequencing Projects in the GAP4 Environment. Introduction to Bioinformatics. A Theoretical and Practical Approach. Eds. Stephen A. Krawetz and David D. Womble. Human Press Inc., Totawa, N.J. 07512 (2003)), yielding a total of 1,662 contigs (SEQ ID NOs 33 through 1664, (attached in the Sequence Listing filed concurrently herewith). Some of the O55:H7 genomic regions with a large number of clustered sequence gaps, primarily corresponding to some prophages in the EDL933 reference genome, were not able to be spanned by long-range PCR and remain unfinished.

### Example V

### Identification of E. coli O55:H7 Specific and Unique Regions

[0117] An E. coli O55:H7 pseudochromosome was the single inclusion organism, i.e., the organism to be detected and also acted as the reference genome. The exclusion set (organisms to not be detected) consisted of 42 complete and near-complete E. coli and Shigella genomes. Table 4 is a list of the E. coli and Shigella genomes used as exclusion set.

TABLE 4

| Species | Strain | Serotype |
|---|---|---|
| E. coli | 101-1 | O?:H10 |
| E. coli | 53638 | O144 |
| E. coli | 536 | O6:K15:H31 |
| E. coli | APEC_O1 | O1:K1:H7 |
| E. coli | B171 | O111:NM |
| E. coli | B7A | O148:H28 |
| E. coli | B | unknown |
| E. coli | CFT073 | O6:H1 |
| E. coli | E110019 | O111:H9 |
| E. coli | E22 | O103:H2 |
| E. coli | E24377A | O139:H28 |
| E. coli | ec4024 | O157:H7 |
| E. coli | ec4042 | O157:H7 |
| E. coli | ec4045 | O157:H7 |
| E. coli | ec4076 | O157:H7 |
| E. coli | ec4113 | O157:H7 |
| E. coli | ec4115 | O157:H7 |
| E. coli | ec4196 | O157:H7 |
| E. coli | ec4206 | O157:H7 |
| E. coli | ec4401 | O157:H7 |
| E. coli | ec4486 | O157:H7 |
| E. coli | ec4501 | O157:H7 |
| E. coli | ec508 | O157:H7 |
| E. coli | ec869 | O157:H7 |
| E. coli | Sakai | O157:H7 |
| E. coli | EDL933 | O157:H7 |
| E. coli | F11 | O6:H31 |
| E. coli | HS | O9 |
| E. coli | MG1655 | O- |
| E. coli | SECEC_SMS-3-5 | unknown |
| E. coli | UTI89 | O18:K1:H7 |
| E. coli | W3110 | O- |
| S. boydii | BS512 | unknown |
| S. boydii | Sb227 | unknown |
| S. dysenteriae | 1012 | unknown |
| S. dysenteriae | M131649 | unknown |
| S. dysenteriae | Sd197 | unknown |
| S. flexneri | 2457T | 2a |
| S. flexneri | 301 | 2a |
| S. flexneri | 8401 | 5 |
| S. sonnei | 53G | unknown |
| S. sonnei | Ss046 | unknown |

[0118] The 42 genomes described above were aligned against the E. coli O55:H7 pseudochromosome sequence using the MUMmer program. Pairwise alignments between each of the inclusion/reference (E. coli O55:H7) and exclusion genomes were computed using the nucmer program within the MUMmer suite (Delcher, A. L., et al. Nuc. Acids Res. 27:2369-2376 (1999)). Significant hits between the exclusion genomes and the E. coli O55:H7 pseudochromosome (greater than or equal to 80% identity over at least 50 nt) were extracted from the matching output. The union of all significant exclusion genome hits on the E. coli O55:H7 genome was determined utilizing a Perl program to parse MUMmer output files and calculate interval ranges, as would be known to one of skill in the art in light of this disclosure. The signatures of interest were those sequences present in E. coli O55:H7, but not present in any exclusion organism. Expressed in mathematical terms, it is the difference between the intersection of inclusion hits and the union of exclusion hits.

[0119] 27 putative E. coli O55:H7 specific and unique sequences of at least 60 nucleotides in length that did not consist of predominantly N bases (i.e., undetermined sequence) were identified. These 27 sequences covered 23,470 bases of the E. coli O55:H7 genome. 22 of the 27 candidate sequences were eliminated from further consideration by screening using BLASTN against the GenBank non-redundant database. Sequences having a BLASTN hit with more than 80% identity over more than 50 nucletoides to an organism other than E. coli O55:H7 were eliminated from consideration. About half of the 22 eliminated sequences were in the E. coli O55:H7 0-antigen biosynthesis cluster, and were therefore conserved in E. coli serotype O55:H6 strains. Other eliminated candidates shared sequence with E. coli serotypes O127:H6, O7:K1, and O17:K52:H18, and E. fergusonii.

[0120] The remaining five E. coli O55:H7 specific sequences, covering a sum of 1,124 nucleotides, are described in FIG. 1.

### Example V1

### Assays to Specifically Detect E. coli O55:H7

[0121] Exemplary real-time PCR assays were designed from specific and unique and specific E. coli O55:H7 sequence regions, SEQ ID NOS:1-5 and SEQ ID NO: 66, SEQ ID NO: 252, SEQ ID NO: 1113, SEQ ID NO: 1461. These identified E. coli O55:H7 target sequences were used to design primers and probes for real-time PCR assays. Programs for assay design include Primer3 (Steve Rozen and Helen J. Skaletsky (2000) “Primer3” on the World Wide Web for general users and for biologist programmers as published in: Krawetz S, Misener S (eds) Bioinformatics Methods and Protocols: Methods in Molecular Biology. Humana Press, Totowa, N.J., pp 365-386), Primer Express® software (Applied Biosystems), and OLIGO 7 (Wojciech Rychlik (2007). “OLIGO 7 Primer Analysis Software”. Methods Mol. Biol. 402: 35-60)). The subsequently designed PCR primers and probes for use in assays by real-time PCR can detect unambiguously, specifically and with great sensitivity E. coli O55:H7 and not O157:H7.

### Example VII

### Some Exemplary Nucleic Acid Sequences of the Disclosure

TABLE 5
Exemplary Sequences Described in Some
Embodiments with Corresponding SEQ ID NOS:

AAAAGTGCTCATCGTAAAATATCCTCTATACTGGTAAGTCCTTCATTA
TTTAGCCAGATCATGGCGTCATCCGGCAACTTGCTGTCTGGTTTGGCG
TTTTTGAGAGAGGAACTCAGTCGCTTAATCCACATTGTCACCTCAGTA
ATGCG (SEQ ID NO: 1)
CACAACTTAGCATCGAAGGCCTATTGTTTTCGACAGGAGGCCATCGAA
ATGACACTATGGTACCGTCTTTACCCACCGCCTTCTGCTAAGTTTAGG
AATACAAGATGTTGCTGCCGTTAAAAAATAGTCGTAATTTCTATTAGA
ATTTGGGCAATATAACCAGCACATAGATAAGGGAGTCGTTTTATGCAC
GAACTATTTGTGCTGGTTTTGAGCACCTGTGCTAGCCTCAGCAATATG
TCAGGTTGTTCAGTGGACGTAGTGAATGTCAACACCACAAAAGAGCCG
GTAAACGTCTTTTATAGCAGGAAAGACTGCGAAGAAAGCATGAAAAAC
ATTATGCTAAATCATGCTCTATACCATGAAGTATCAGGCAGAGAGCCA
TATATGGCAAAGTGCGAACAAGTATTTGTCTCAAAAAGTTTAATGAAA
TAATTGGCCAAAAACGACATATAACAAACTCTTATAGGAGCTTAACGT
GGAAGATTACTTAGTTTTTGGTTTAGGTTATGAAGGCGATATAAAGAA
CGATGAAGCAGGGCTTGATAAGATAAGCGTGGTAACGAAATCGGTAGT
GCGTTCTACCAATTCCAATGAACCAGTGGTTTACCAAGTGACTGAGTT
TAAAGAATTTAATGTTGTGAGACATCAAGCGTTTGATAGTGAATACTA
CAACATAGCATTCGATGTCTTACCATCCCGCGTCCGTATTGATGCTGC
AATCCGTAAATATCACCCCAAGAAATCCTCCTCAGCTTAGTAAG
(SEQ ID NO: 2)
TGTTGCCCTGGCCATCCAGGAAAAATATGGTTTCCCACCGCTATATAA
TGATTTCCGCAA (SEQ ID NO: 3)
CAAGCTACCTGTCGACTATCCCGTAAAATACACGGACCTTTTCACTCA
CATACACGCCAAT (SEQ ID NO: 4)
TTTATACACGGATCCTGTGTGCCGTGGACCGCCGGTTTATCCCCGCTG
GCGCGGGGAACACCACAAACCGCCCATCTTCCCGATTACTGC
(SEQ ID NO: 5)
GGTAAGTCCT TCATTATTTA GCCAGATCA (SEQ ID NO: 6)
AGCGACTGAG TTCCTCTCTC AA (SEQ ID NO: 7)
GATCCTGTGT GCCGTGGA (SEQ ID NO: 8)
CGGGAAGATG GGCGGTTT (SEQ ID NO: 9)
ACGAACTATT TGTGCTGGTT TTGAG (SEQ ID NO: 10)
CTCTTTTGTG GTGTTGACAT TCACT (SEQ ID NO: 11)
AGTGGTTTAC CAAGTGACTG AGTTT (SEQ ID NO: 12)
GGGATGGTAA GACATCGAAT GCTAT (SEQ ID NO: 13)
GAAGGCCTAT TGTTTTCGAC AG (SEQ ID NO: 14)
AGAAGGCGGT GGGTAAAGAC (SEQ ID NO: 15)
GCAAAGTGCG AACAAGTATT TGTCT (SEQ ID NO: 16)
ACTAAGTAAT CTTCCACGTT AAGCTCCTA (SEQ ID NO: 17)
GAATACAAGA TGTTGCTGCC GTTAA (SEQ ID NO: 18)
CGTGCATAAA ACGACTCCCT TATCT (SEQ ID NO: 19)
GGTTATGAAG GCGATATAAA GAACGATGA (SEQ ID NO: 20)
CGCACTACCG ATTTCGTTAC CA (SEQ ID NO: 21)
GAAAGACTGC GAAGAAAGCA TGAAA (SEQ ID NO: 22)
CATATATGGC TCTCTGCCTG ATACTT (SEQ ID NO: 23)
AAGTTGCCGG ATGACGC (SEQ ID NO: 24)
CCGGTTTATC CCCGCTGGC (SEQ ID NO: 25)
ACGTCCACTG AACAACC (SEQ ID NO: 26)
AACGCTTGAT GTCTCACAAC A (SEQ ID NO: 27)
TAGTGTCATT TCGATGGCCT C (SEQ ID NO: 28)
CCAAAAACGA CATATAACAA AC (SEQ ID NO: 29)
TAGAATTTGG GCAATATAAC C (SEQ ID NO: 30)
CAGGGCTTGA TAAGATAAG (SEQ ID NO: 31)
ATGGTATAGA GCATGATTTA GC (SEQ ID NO: 32)
ANATTCTGCGGGAGAGCCCCGTTGAAAACAGGAAAGTTTTTAACCTGA
GATTGTTAAAGATATATTACAGATTAATGATATTCTTAAAATGTGGTA
ATTTATTAAATCTGTAATAAAAGCGTAAACAACTGCCGCTAGGCTTGC
TGATCCCGCGCAACAAAACGCCATGCTTTGCTCGCAGATGGTTGGCAA
CCGACGACAGTCCTGCTAAAACGTTCGTTTGATATCATTTTTCCTAAA
ATTGAATGGCAGAGAATCATGAGTGACAGCCAGACGCTGGTGGTAAAA
CTCGGCACCAGTGTGCTAACAGGCGGATCGCGCCGCCTGAACCGTGCC
CATATCGTTGAACTTGTTCGCCAGTGCGCGCAGTTACATGCCGCCGGG
CATCGGATTGTTATTGTGACGTCGGGCGCGATCGCCGCCGGACGTGAG
CACCTGGGTTACCCGGAACTGCCAGCGACTATCGCCTCGAAACAACTG
CTGGCGGCGGTAGGGCAGAGTCGACTGATTCAACTGTGGGAACAGCTG
TTTTCGATTTATGGCATTCACGTCGGGCAAATGCTGCTGACTCGTGCT
GATATGGAAGACCGTGAACGCTTCCTGAACGCCCGCGACACCCTGCGT
GCGTTGCTCGATAACAATATCGTTCCGGTAATCAATGAGAACGATGCT
GTCGCTACGGCAGAGATTANNNNCGGCGATAACGACAACCTTTCTGCA
CTGGCGGCGATTCTGGCGGGTGCCGATAAACTGTTGTTACTGACCGAT
CAAAAAGGTTTGTATACCGCTGACCCGCGCAGCAATCCGCAGGCAGAA
CTGATTAAAGATGTTTACGGCATTGATGACGCACTGCGNGCGATTGCT
GGTGACAGCGTTTCAGGCCTCGGAACTGGCGGCATGAGTACCAAATTG
CAGGCCGCTGACGTGGCTTGCCGTGCGGGTATCGACACCATTATTGCC
GCGGGCAGCAAGCCGGGCGTTATTGGTGATGTGATGGAAGGCATTTCC
GTCGGTACGCTGTTCCATGCCCAGGCGACTCCGCTTGAAAACCGTAAA
CGCTGGATTTTCGGTNNNNCGCCTGCGGGTGAAATCACGGTAGATGAA
GGGGCAACCGCCGCCATTCTTGAACGCGGCAGCTCCCTGTTGCCGAAA
GGNNNNAAAAGCGTGACTGGCAACTTCTCGCGTGGTGAAGTCATCCGC
ATTTGTAACCTCGAAGGTCGCGATATCGCCCACGGCGTCAGTCGTTAC
AACAGCGATGCATTACGCCGTATTGCCGGACACCACTCGCAAGAAATT
GATGCAATACTGGGATATGAATACGGCCCGGTTGCCGTTCACCGTGAT
GACATGATCACCCGTTAAGGAGCAGGCTGATGCTGGAACAAATGGGCA
TTGCCGCGAAGCAAGCCTCGTATAAATTAGCGCAACTCTCCAGCCGCG
AAAAAAATCGCGTGCTGGAAAAAATCGCCGATGAACTGGAAGCACAAA
GCGAAATCATCCTCAACGCTAACGCCCAGGATGTTGCTGACGCGCGAG
CCAATGGCCTTAGCGAAGCGATGCTTGACCGTCTGGCACTGACGCCCG
CACGGCTGAAAGGCATTGCCGACGATGTACGTCAGGTGTGCAACCTCG
CCGATCCAGTGGGGCAGGTAATCGATGGCGGCGTACTGGACAGCGGCC
TGCGTCTTGAGCGTCGTCGCGTACCGCTGGGGGTTATTGGCGTGATTT
ATGAAGCGCGCCCGAACGTGACGGTTGATGTCGCTTCGCTGTGCCTGA
AAACCGGTAACGCGGTGATCCTGCGTGGTGGCAAAGAAACCTGTCGCA
CTAACGCGGCAACGGTGGTGGTGATTCAGGACGCCCTGAAATCCTGTG
GCTTACCGGCGGGTGCCGTGCAGGCGATTGATAATCCTGACCGTGCGC
TGGTCAGTGAAATGCTGCGTATGGATAAATACATCGACATGCTGATCC
CGCGCGGCGGGGCTGGTTTGCATAAACTGTGCCGCGAGCAGTCGACGA
TCCCGGTGATCACAGGTGGTATAGGCGTATGCCATATTTATGTTGATG
AAAGTGCAGAGATTGCTGAAGCCCTGAAAGTAATCGTCAATGCGAAAA
CTCAGCGTCCGAGCACATGTAATACGGTAGAAACGTTGCTGGTGAATA
AAAACATCGCCTATAGCTTCCTGCCCGCATTAAGCAAACAAATGGCGG
AAAGCGGCGTGACGTTACACGCAGATGCATCTGCGCTGGCGCAGTTGC
AGACAGGCCCTGCGAAGGTGGTGGCGGTTAAAGCCGAAGAGTATGACG
ATGAGTTTCTGTCATTAGATTTGAACGTCAAAATCGTCAGCGATCTTG
ACGATGCCATCGCCCATATTCGTGAACACGGCACGCAACACTCCGATG
CGATCCTGACCCGCGATATGCGCAACGCCCAGCGTTTTATTAACGAAG
TGGATTCGTCCGCTGTTTACGTTAACGCCTCTACGCGTTTTACCGACG
GCGGCCAGTTTGGACTGGGTGCGGAAGTGGCGGTAAGCACACAAAAAC
TCCACGCNCGTGGCCCAATGGGGCTGGAAGCACTGACCACTTACAAGT
GGATCGGCATTGGTGATTACACCATTCGTGCGTAAATAAAACCGGGTG
ATGCAAAAGTAGCCGTTTGATTCACAAGGCCATTGACGCATCGCCCGG
TTAGTTTTAACCTTGTCCACCGTGATTCACGTTCGTGAACATGTCCTT
TCAGGGCCGATATAGCTCAGTTGGTAGAGCAGCGCATTCGTAATGCGA
AGGTCGTAGGTTCGACTCCTATTATCGNCACCACTTAAATCAATAAGT
TACCTCGCATTTAAGTAAACCACGTTCTCCTCTTGTGCCGTATTTGTG
CCATTGCGACTTATAATCGCATCGATTTTGCTCGCGTGCTCGGTGAGA
TGCCCGGCTGAAAGGTGGGCGTATCTTTGAACCATTTCGAGAGTTTCC
CATCCTCCCATCTCTTTAAGTGCAAGAAGAGAGACACCGGACTGAACC
AGCCAGCTTGCCCAGGTATGCCTCAGGTCATGGAAGCGGAAGTTGCTA
ATGCCTGCCCGCTTTAACGCTCCTTTCCATGCCTTGTTGCTGTCGGTT
CTCATCTTCCTTACCGCTGCTGTTTTTGTTCCGTCGCTTCGGTAGGCA
GGTTTGGTGTGGACAAATACCCATCTCTTATGGAGCCCCTGCTGTTTT
CTTAATATCTGGCATGCGGTTTCGTTAAGAGGAACTCCGATCGCATTG
CCAGCTTTTGTTTCATCAGGGTGCATCCATGCCATTTTCTTATCCAGA
TCGACCTGTGACCACTCAAGGTCTGTAACGTTGGAGCGGCGAAGACCT
GTAGTGATTGCGAACATGACCACAGGGAAGAAATGAGGAGCAATTTCT
GCAAACAGGCGCTTCGATTCCTCCTCTGTAAGCCATCTGATTCGTCCA
TTCTTAACGCGTGGTGTTGATATTTTTGGCGCCCTGTCAAGCCATCCA
CATTCAACAGCCATATTGAGAATAGCGCGAAGTATTGCCAGATGCCGC
GTCTTCGTTCCTTTGCTTGCCAGCTTTGGTTTATACTCCGGCACTGGC
TTGCCAAGCCGCAAACACCTGTCCCGGCTCATCTCCCAGTTCAGGCGA
TGGCGGCGGTTTTCCATCCCGTCTACCGCCTCCATTATTTTTTCTGTT
GTTATGTCAGAGAGAATGGTTTCTCTGAAGTGCAACATCCAGAACGAT
ATAATGCTCTTGTCATCATCAATGGACTTCTTATCCGATTTCTCACGC
AGCCACCGTATGCAGGCTTCCTTGAATAGCTTTTTCGGCGATTCCCCG
AGATTTTTTACTCTCCACGCCTCTGCTTTCAGACGATCGTGAAGTTCT
TGCGCTTGCCTTTTGTCCGATGTTTCAAGAGAGCGTCTAACTCTTGAT
CCATCTTGCGCGACGAAATCGCAGTGCCATGTGCCACCGCGCAGTTTG
ATTGACATGCTTTAACCTCCTGCACATCAACCGCATTCACCGCGCTAT
TGTGTCTCACAGACTTAAGCGCCGCAATGCAGTCTGACTTGCAAATGC
GATATGGGCTTTTAGGTTTATCTGGATTTATCTTTGCGGCCTGAAGTC
GTCCACTTCGTATCCACTGCGTGATAGTGCCTTTGTCTACCTTCAGAT
ACGACGCAGCCTCTTCACGAGTGAAGATTTCTTCTTCCACTTGGAGTC
TCCATTTATTGGATTGACATGATTGCTGTAGGTCTGGATATCTTGAGA
AGCTGGCAGGCCTCATCGAGTGTGAGGCTGTGGTTAGTCCTTGCGTAA
'CTCGCTAATTCTTCTGTAAGTCTCTGGTGCTTTGTTTCCGTGTATCT
TCATTTCAGACTTCAACAGAGCAACGAGAGAATCCCATTCGTTGAGGA
TTCCTTTGAATGCCGGAACGCGCTTTGCAACCTTGTCGAATGAATCTC
TGATTTCTGGAATCTGCTCAACAAGTGCAACGCATCGTCTGAAATCGG
CTGCGTCATGTGGAGCACCGAAGCTATGACCATAGATATTCTTTTTCA
GGCCACATGCGATTGAGGCAAGAGTTGCGCTACTGATGCCGACATCGC
CAGTCGATTGCCATTTCAAAACCTTCATAGCCAAATCTGACATTTCTT
GTCTCCATAAAACAAAACCCGCCGTAGCGAGTTCAGATAAAAGAAATC
CCCGCGAGTGCGAGGATTGTTATTCACCTTTGACGGCAAGTTGCAGGT
TAGCCACGGTTAACTCCTTGCTGTGTGGCGTCGAGTAATAAATCCCAC
AACCGCTGAGAGCAATTTCCGCATGTACAGCGTTGACCCACAACGTTT
ATCGCGTTGCTGATTTCCGGCGTTACCTGTTTAGGAACCATAACCCAA
CCATCCGGAGTTACCGGAAGCGAGAACGGCAGCACATCTCTGTGAACA
AGTTTTTGCTGTGACAGGTTATCCAGAACTTTCTGTACTGCTGCATCA
CCGAATACACCAAGCGCATCTGCCATAACTCCTACAACCTGATAAGCC
TCAGCGCATACCGTGGATAAACCATCCGGAGTTACCGGAGAGTTGCCG
GGTTCTTTAATGTGCAAGCGAGGCTCACCATCTTTTGGCTCAGGCCAC
TGGCGCTCCATGTTGATCTTCAATTTATCTTCCATAGCAGCGGTAATT
TCAGCATCGCTGATGCCGGCACGGCGCTGTGCATCCCACAACAGAAAC
TGCATATCAGCCCACTCGCTAAGATCGTCTGGTTCGGCTGCGGCTTCC
AGAGCCTCTTTTGAGAGGTGTTTCAGTGGACCAATGGGGCCAACGCAG
CCAAATGTGGAGTCAGACCATTTGGCATGCTCGTGGCGAATCTGTTCG
CGTTCCAGTGAGGCGAGAGCGATTTTAAATGCTGTAAGCATGTGTGCT
TGATCGTTGTCGAGTCCGAATGGCATTTCATCTCGTGCTGACTCAATA
CTGGTAATCGTATTTTGTAGCCATTCTTTGGTAAAAGTGCTCATCGTA
AAATATCCTCTATACTGGTAAGTCCTTCATTATTTAGCCAGATCATGG
CGTCATCCGGCAACTTGCTGTCTGGTTTGGCGTTTTTGAGAGAGGAAC
TCAGTCGCTTAATCCACATTGTCACCTCAGTAATGCGCCTGTCTTTGC
CTTCCAGCTCAACACGCAGCTTCCCTACCGTTAGCGCAATTTCCTCGC
TCTCTTGGTCGCGTGATTTGATGTATTGCTGGTTTCTTTCCCGTTCAT
CCAGCAGTGCCAAGACGGTAGCAGGATTGGCTGCGGCGATGAATTCAG
CATTGGCCTGCTGTTCCATTTGGAAATCTTCATCGAAACCGCTTTCTG
GATGCGCTCCTTCAATTCTGCAAATAGGAATATATCCAGCAACTTCAC
GATGAATTAGCGCATCATCACCATCAAATCGGCTCTCTCCATATTCGA
GCGACCGCTCACCACACGTTGCTTTTTCTGCCGCCTCACGCAGTGCCT
GAGAGTTAATTTCGCTCACTTCGAACCTCTCTGTTTACTGATAAGCTC
CAGATCCTTCTGGCAACTTGCACAAGTCCGACAACCCTGAACGGCCAG
ACGTCTTAGTTCATCTATCGGATCGCCACACTCACAACAATGAGTGGC
AGATATAGCCTGGTGGTTCAGGCGGTGCATTTTTATTGCTGTGTTGCG
CTGTAATTCTTCAATTTCTGATGCTGAATCAATGATGTCTGCCATCTT
CCATTAATCCCTGAATTGTTGGTTAATACGCTTGAGAGTGAATGCGAA
TAATAAAAAAGGAGCCTGTAGCTCCCTGATGATTTTGCTTTTCATGTT
CACCGTTCCTTAAAGACGCCGTTTAACATACCGATTGCCAGACTTAAG
TGAGTCGGTGTGAATCCCATCAGCGTTACCGTTTCGCGGTGCTTCTTC
AGTACGCTACGGCAAATGTCATCGACGTTTTTATCCGGAAACTGCTGT
CTGGCTTTTTTGATTTCAGAATTAGCCTGACGGGCAATACTGCGAAGG
GCGTTTTCTTGCTGAGGTGTCATTGAACAAGTCCCATGTCGGCAAGCA
TAAGCACACAGAATATGAAGCCCGCTGCCAGAAAAATGCATTCAGTGG
TTGTCATACCAGGTCTCTCTCATCTGCTTCTGCTTTCGCCACCATCAT
TTCCAGCTTTTGCGAAAGGGATGTGGCTAACGTATGAAATTCTTCGTC
TGTTTCTACTGGTATTGGCACAAACCTGACTCCAATTTGAGCAAGGCT
ATGTGCCATCTCAATACTCGTTCTTAACTCAACAGGAGATGCTTTGTG
CATATCGCCTCCCGTTTATTATTTATCTCCTCAGCCAGCCGCTGGGCT
TTCAGCGGATTTCGGATAACAGAAAGGCCGGGAAATACCCAGCCTCGC
TTCGTAACGGAGTAGACGAAAGTGATCGTGCCTACGCGGATATTATCG
TGAGGATGCTTCATCGCCATTGCTCCCCAAATACAAAACCAATTTCAG
CCAGTGCCTCGTCCATTTTTTCGATGAACTCCGGCACCATCTCGTCAA
AACCCGCCATGTACTTTTCATCCCGCTCAACCACGACATAATGCAGGC
CTTCACGCTTCATACGCGGGTCATAGTTGGCAAAGTACCAGGCATCTT
TTCGCGTCACCCACATGCTGTACTGCACCTGGGCCATGTAAGCCGACT
TTATGGCCTCGAAACCACCGAGCCTGAACTTCATGAAATCCCGGGAGG
TAAACGGGCATTTCAGCTCAAGGCCGTTGCCGTCACTGCATAAACCAT
CGGGAGAGCAGGCGGTGCGCATACTTTCGTCGCGATAGATGATCGGGG
ATTCAGTAACATTCACGCCGGAAGTGAATTCAAACAGGGTTCTGGCGT
CGTTCTCGTACTGTTTTCCCCAGGCCAGCGCCTTAGCATTAACTTCCG
GAGCCACACCGGTGCAAACCTCAGCCAGCAGGGTGTGGAAGTAGGACA
TTTTCATGTCAGGCCACTTCTTTCCTGAGCGGGGCTTTGCTATCACGT
TGTGAACTTCTGAAGCGGTGATGACGCCGAGCCGTAATTTGTGCCATG
CATCATCCCCCTGTTCGACAGCTCTCACGTCGATCCCGGTACGCTGCA
GGATAATGTCCGGTGTCATGCTGCCACCTTCTGCTCAGTGGCTTTCTG
TTTCAGGAATCCAAGAGCTTTCACTGCTTCGGCCTGTGTCAGTTCTGA
CGATGCGCGAATGTCGCGGCGAAATATCTGGGAACAGAGCGGCAATAA
GTCGTCATCCCATGTTTTATCCAGGGCGATTAGCAGAGTGTTAATCTC
CTGCATGGTTTCATCGTTAACCGGAGTGATGTCGCGTTCCGGCTGGCG
TTCTGCAGTGTATGCAGTATTTTCGACAATGCGCTCGGCTTCATCCTT
GTCATAGATACCAGCAAATCCGAAGGCCAGACGGGCACACTGAATCAT
AGCTTTATGCCGTAACATCCGTTTAGGATGCGACTGCCACGGCCCCGT
GATTTCTCTGCCTTCGCGGGTTTTGAATGGTTCGCGGCGGCATTCATC
CATCCATTCGGTAACGCAGATCGGATGATTACGGTCCTTGCGGTAAAT
CCGGCATGTACAGGATTCATTGTCCTGCTCAAAGTCCATGCCATCAAA
CTGCTGGTTTTCATTGATGATGCGGGACCAGCCATCAACGCCCACCAC
CGGAACGATGCCGTTCTGCTTATCAGGGAAGGCGTAAATTTCTTTCGT
CCACGGATTAAGGCCGTACTGGTTGGCGACGATCAACAATGTGATGAA
CTGCGCATCGCTGGCATCGCCTTTAAATGCCGTCTGGCGAAGAGTGGT
GATCAGTTCCTGTGGGTCGACAGAATCCATGCCGACACGTTCAGCCAG
CTTCCCTGCCAGCGTTGCGAGTGCTGTACTCATCCGTTTTATACCTCT
GAATCAATATCAACCTGATGGTGAGCAATGGTTTCAACCATGTACCGG
ATGTGTTCTGCCATGCGCTCCTGAAACTCAACATCGTCATCAAACGCA
CGGGTAATGGCTTTTTTGCTGGCCCCGTGGCGTTGCAAATGACCGATG
CATAGCGATTCAAACAGGTGCTGGGGCAGGCCTTTTTCCATGTCGTCT
GCCAGTTCTGCCTCTTTCTCTTCACGGGCTATCTGCTGGTAGTGACGC
GCCCAGCTCTGAGCCTCAAGACGATCCTGAATGTAATAAGCGTTCATG
GCCGAACTCCTGAAATAGCTGTGAAAATATCGCCCGCGAAATGCCGGG
CTGATTAGGAAAACAGGAAAGGGGTTAGTGAATGCTTTTGCTTGATCT
CAGTTTCAGTATTAATATCCATTTTNNANNNGCNNNNACGGCTTCACG
AAACATCTTTTCAT (SEQ ID NO: 66)
CTGAGATATTCAATTTTCCAGTGCCGGATGAGGCACAAAAGGAGCGGC
GCGTGGCAGATCTCGATGATGGTTATACGCGCATTGCAAATGAGTTGC
TGGAAGCTGTGATGCTGGCCGGATTAACACAGCACCAGCTTCTGGTCT
TCCTGGCTGTCATGCGCAAAACATATGGCTTTAATAAAAAACTGGATT
GGGTGAGCAACGAGCAACTTTCCGAATTGACCGGGATATTGCCGCACA
AGTGTTCTTCTGCAAAAAGCGTTCTGGTAAAGCGTGGGATTCTTATTC
AGAGCGGGCGGAATATCGGCATTAATAATGTGGTCAGTGAATGGTCAA
CATTACCCGAATCAGGTAAGAAAAATAAAGTTTACCTGAAANNGGTAA
NNTTACCTGAATCAGGTAAGAAAAGTTTACCCAAATCAGGTAAAGGCG
TTTACCCGAATCAGGTAAACACAAAAGACAAACTAACAAAAGACAATA
TAAAACCTTTTTCGTCCGAGAATTCTGGCGAATCCTCTGACCAACCAG
AAAACGATCTTCCTGTGGAGAAACCAGATGCTGCAATTCAGAGCGGCA
GCAGGTGGGGGACAGCAGAAGACCTGACCGCCGCAGAGTGGATGTTTG
ACATGGTGAAGACCATCGCGCCATCAGCCAGAAAACCGAATTTTGCAG
GGTGGGCTAACGATATCCGCCTGATGCGTGAACGTGACGGACGTAACC
ACCGCGACATGTGCGTGCTGTTCCGCTGGGCATGCCAGGACAACTTCT
GGTCCGGTAACGTGCTAAGTCCGGCCAAACTCCGCGACAAGTGGACCC
AACTCGAAATCAACCGTAACAAGCAACAGGCTGGCGTGACAGCCGGAA
AATCAAAACTGGACCTGACAAACACTGACTGGATTTATGGGGTGGATT
TATGAAAAACATCGCCGCACAGATGGTTAACTTTGACCGTGAGCAGAT
GCGCCGGATCGCCAATAACATGCCGGAACAGTACGACGAAAAGCCGCA
GGTACAGTTGGTAGCGCAGATCATCAACGGTGTGTTCAGCCAGTTACT
GGCAACTTTCCCGGCGAGCCTGGCTAACCGGGACCAGAACGAACTGAA
CGAAATCCGCCGCCAGTGGGTTCTGGCTTTCCGGGAAAACGGGATCAC
CACAATGGAACAGGTTAACGCAGGAATGCGCGTAGCCCGTCGGCAGAA
TCGACCATTTCTGCCATCACCCGGGCAGTTTGTTGCATGGTGCCGGGA
AGAAGCATCCGTTATCGCCGGACTGCCAANCGTCAGCGAGCTGGTTGA
TATGGTTTACGAGTATTGCCGGAAGCGAGGCCTGTATCCGGATGCAGA
GTCTTATCCGTGGAAATCGAACGCGCACTACTGGCTGGTTACCAACCT
GTACCAGAACATGCGGGCCAATGCGCTGACTGACGCGGAATTACGACG
CAAGGCTGCCGATGAACTGACCTGTATGGCAGCGCGAATTAACCGTGG
TGAGACGATACCTGAACCAGTAAAACAACTTCCTGTCATGGGCGGCAG
ACCTCTAAATCGTGTTCAGGCGCTGGCGAAGATCGCAGAAATTAAAGC
TAAGTTCGGACTGAAAGGAGCAAGTGTATGACGGGCGAAGAGGCAATT
ATTCATTACCTGGGGACGCATAATAGCTTCTGTGCGCCGGACGTTGCC
GCGCTAACAGGCGCAACAGTAACCAGCATAAATCAGGCCGCGGCTAAA
ATGGCACGGGCAGGTCTTCTGGTTATCGAAGGTAAGGTCTGGCGAACG
GTGTATTACCGGTTTGCTACCAAGGAAGAACGGGAAGGAAAGGTGAGC
ACGAATATGATTTTTAAGGAGTGTCGCCAGAGTGCCGCGATGAAACGG
GTATTGTTGGTATACACAACTTAGCATCGAAGGCCTATTGTTTTCGAC
AGGAGGCCATCGAAATGACACTATGGTACCGTCTTTACCCACCGCCTT
CTGCTAAGTTTAGGAATACAAGATGTTGCTGCCGTTAAAAAATAGTCG
TAATTTCTATTAGAATTTGGGCAATATAACCAGCACATAGATAAGGGA
GTCGTTTTATGCACGAACTATTTGTGCTGGTTTTGAGCACCTGTGCTA
GCCTCAGCAATATGTCAGGTTGTTCAGTGGACGTAGTGAATGTCAACA
CCACAAAAGAGCCGGTAAACGTCTTTTATAGCAGGAAAGACTGCGAAG
AAAGCATGAAAAACATTATGCTAAATCATGCTCTATACCATGAAGTAT
CAGGCAGAGAGCCATATATGGCAAAGTGCGAACAAGTATTTGTCTCAA
AAAGTTTAATGAAATAATTGGCCAAAAACGACATATAACAAACTCTTA
TAGGAGCTTAACGTGGAAGATTACTTAGTTTTTGGTTTAGGTTATGAA
GGCGATATAAAGAACGATGAAGCAGGGCTTGATAAGATAAGCGTGGTA
ACGAAATCGGTAGTGCGTTCTACCAATTCCAATGAACCAGTGGTTTAC
CAAGTGACTGAGTTTAAAGAATTTAATGTTGTGAGACATCAAGCGTTT
GATAGTGAATACTACAACATAGCATTCGATGTCTTACCATCCCGCGTC
CGTATTGATGCTGCAATCCGTAAATATCACCCCAAGAAATCCTCCTCA
GCTTAGTAAGCTTTGATTTTCCATTATCAACCAGCAATAATAATGTCC
TCGGAGCCTGAACAACTCCGGTGACTTCTGCGCTAAACGGGGACGTTT
ATGCGCACATACAATCCAAACTCTCTTCTCCCTTCACTGATGCAGAAA
TGCACCTGTGGTTCTTTGCATCCAACGTTTGACCTCTGCGGAGGTGAA
GCGTGAACCTCCCACAAGACGGTATCAAATTGCATCGCGGTAACTTCA
CTGCTATCGGCCAGCAGATCCAGNCTTATCTG (SED ID NO: 252)
CAGAAGCATTCCTCAATACAGAACTGACCTGGGATGGTATCCAGCAAC
CGCTGTTGGGCCATAAAGTGAATCCGTTTAAGGCGCTGTATAACCGCA
TCGATATGAAACAGGTTGAAGCACTGGTGGAAGCATCTAAAGAAGAAG
TGAAAGCCGCTGCCGCGCCGGTAACTGGCCCGCTGGCAGACGATCCGA
TTCAGGAAACCATCACCTTTGACGACTTCGCTAAAGTTGACCTGCGCG
TGGCGCTGATTGAAAACGCAGAGTTTGTTGAAGGTTCTGACAAACTGC
TGCGCCTGACGCTGGATCTCGGCGGTGAAAAACGCAATGTCTTCTCCG
GCATTCGTTCTGCCTACCCGGATCCGCAGGCACTGATTGGTCGTCACA
CCATTATGGTGGCTAACCTGGCACCACGTAAAATGCGCTTCGGTATCT
CTGAAGGCATGGTGATGGCTGCCGGTCCTGGCGGGAAAGATATTTTCC
GCTAAGCCCGGATGCCGGTGCTAAACCGGGTCATCAGGTGAAATAATC
TCCTTTCAAGGCGCTGTATCGACAGCGCCTTTTCTTTATAAATTCCTA
AAGTTGTTTTCTTGCGATTTTGTCTCTCTCTAACCCGCATAAATACTG
GTAGCATCTGCATTCAACTGGATAAAATTACAGGGATGCAGAATGAGA
CACTTTATCTATCAGGACGAAAAATCACATAAATTCTGGGCGGTTGAG
CAGCAGGGAAACGAGCTGCATATCAACTGGGGCAAAGTCGGCACTAAC
GGGCAAAGCCAGATAAAAAGTTTTGCGGATGCTGCGGCAGCGGCAAAA
GCGGAGCTTAAGCTGATCGCAGAGAAAACGAAAAAAGGCTATGTGGAA
AATGCTTCAGCAAACGTGCATATCCCCCCCATTACCAAAGCCACTCCT
GAAGTTGAAACTTCCCCTGAGAGTAAAAACCAACGCCCCTGGCTGGCT
GATGATGCGGTCATCGGCTAACTGACGATATTAATCGATTTGCTTTTC
CTCATCGCTCTCGCCCCAGAGAGATCAATTATCTGCGCAAAGACGGTG
AGATATGGAAGCGTATTGCAGATAACACTAGGGCATATGATCCCGACA
ACAATTACCGCTCTTATCCAGAAAACTGGCAGCAGGCTTTTGCTGAGT
TACAAATGCGAGTTCAGGGTAATCAACAGACAGGAAGTGCGCAATCTG
ATGCGGCATTGCTCTGGAGTTTCTGGAACTCTTACTCTACAGATGAAC
TGGTCGATGACTTAGTCATTCGCTGTGGTCTGGAAAGTGCCGTTGAAA
TCGCCCTTCTCGCTCTTCAACTTAGATATAAACCAGTAAAAGGCGCAG
TAACCACCACCATTCCACCTAATCACAAAGCAGAATCGCTACCTAGTT
GGCATCAACGTCTATGTCATCATCTTTCACTCGCTTCAGAAGATGAGT
GGCAACGCTGTGTAGATAAAGTACTCGCGGCTATTCCCTCGCTATCCC
CAGCACGGGAACCTTTTGCGGCGTTACTGCTCCCTGAACGCCCGGATA
TTGCCAATGCTATGGCGCTACGTTATGCAGACCAAAACGTTCCGGCGA
TCACCTGGTTAAGTATGATGGTAAGCGATGATGTTGCCCTGGCCATCC
AGGAAAAATATGGTTTCCCACCGCTATATAATGATTTCCGCAAATATC
TGGCTACGTTGCTGGCAAATAATGGAATGCGTGGTGTAAGCCGGATTC
TTCTCAAGCTACCTGTCGACTATCCCGTAAAATACACGGACCTTTTCA
CTCACATACACGCCAATGCTGAAGATCTTGTCAAATGGCTATGGAAAA
CGAATCACCCGGATGCGATTCAAATTCTGATCCTCGGTGTAAATGGCA
AGAAAAAGCACCTGGAATACTTAAGCAAAGCCTGCCAAAAACATCCCG
CTGCGGCTATTGCCGCTTATGCTACTTTGCTGGCAATACATGAANATA
ATGAGTGGCGTAAAGCGCTTGTCAAACTGATT (SEQ ID NO: 1113)
GCCCGCAAGCAACTGGTGCTCAACCTGGTTTCCAGCCCAGGTTCCGGT
AAAACCACCCTGCTGACGGAAACCTTAATGCGCCTGAAAGACAGCGTT
CCGTGCGCGGTTATTGAAGGTGACCAGCAAACCGTGAACGATGCCGCA
CGCATTCGCGCTACCGGCACACCAGCGATTCAGGTGAACACCGGTAAA
GGCTGCCATCTTGACGCACAGATGATTGCCGACGCCGCACCGCGTCTG
CCACTGGACGATAACGGTATTCTGTTTATCGAAAACGTTGGCAACNTC
GTATGCCCGGCCAGCTTCGATCTCGGTGAAAAACACAAAGTGGCGGTG
CTTTCCGTTACCGAAGGTGAAGACAAACCGCTGAAATATCCGCATATG
TTTGCCGCCGCCTCGCTGATGCTGCTCAACAAAGTTGACCTGTTGCCG
TATCTCAACTTTGACGTTGAGAAGTGCATCGCCTGCGCCCGCGAAGTC
AATCCAGAAATTGAAATCATCCTTATTTCCGCCACCAGCGGCGAAGGG
ATGGACCAGTGGCTGAACTGGCTGGAGACACAGCGATGTGCATAGGCG
TTCCCGGCCAGATCCGCACCATTGACGGTAACCAGGCGAAAGTCGACG
TCTGCGGCATTCAGCGCGATGTCGATTTAACGTTAGTCGGCAGCTGCG
ATGAAAACGGTCAGCCGCGCGTGGGCCAGTGGGTACTGGTACACGTTG
GCTTTGCCATGAGCGTAATTAATGAAGCCGAAGCACGCGACACTCTCG
ACGCCTTGCAAAACATGTTTGACGTTGAGCCGGATGTCGGCGCGCTGT
TGTATGGCGAGGAAAAATAATGCGTTTTGTTGATGAATATCGCGCGCC
GGAACAGGTGATGCAGTTAATTGAGCATCTGCGCGAACGTGCTTCACA
TCTCTCTTACACCGCCGAACGCCCTCTGCGGATTATGGAAGTGTGCGG
TGGTCATACCCACGCCATTTTTAAATTCGGCCTCGACCAGTTACTGCC
TGAAAACGTTGAGTTTATCCNCGGTCCGGGTTGCCCGGTGTGCGTACT
GCCGATGGGCAGAATCGACACCTGCGTGGAGATTGCCAGCCATCCGGA
AGTCATCTTCTGTACCTTTGGCGACGCCATGCGCGTGCCGGGGAAACA
GGGATCGCTGTTGCAGGCAAAAGCACGCGGTGCCGATGTGCGCATCGT
CTATTCGCCGATGGATGCGTTGAAACTGGCGCAGGAGAATCCAACCCG
CAAAGTGGTGTTCTTCGGCTTAGGTTTTGAAACCACCATGCCGACCAC
CGCCATCACTCTGCAACAGGCGAAAGCGCGTGATGTGCAGAATTTTTA
CTTCTTCTGCCAGCATATTACGCTTATCCCGACGCTGCGCAGTTTGCT
GGAACAGCCGGATAACGGTATCGACGCGTTCCTCGCGCCGGGCCACGT
TAGTATGGTTATCGGCACTGATGCCTATAATTTTATCGCCAGCGATTT
TCAGCGTCCGCTGGTGGTGGCTGGTTTCGAACCCCTTGATCTACTGCA
AGGCGTGGTCATGCTGGTGGAGCAGAAAATAGCGGCCCACAGCAAGGT
AGAGAATCAGTATCGTCGGGTGGTACCGGATGCCGGTAACCTGCTGGC
GCAACAGGCGATTGCCGATGTGTTCTGTGTCAACGGCGACAGCGAATG
GCGCGGCTTAGGCGTGATTGAATCTTCTGGCGTGCACCTGACGCCGGA
TTATCAACGATTCGATGCCGAAGCACATTTCCGCCCGGCACCGCAGCA
GGTCTGCGATGACCCGCGCGCGCGTTGTGGCGAAGTCTTGACGGGCAA
ATGTAAGCCGCATCAATGCCCGCTGTTTGGTAACACCTGTAATCCTCA
AACCGCGTTTGGTGCGCTGATGGTTTCCTCCGAAGGAGCGTGCGCCGC
GTGGTATCAGTATCGTCAGCAGGAGAGTGAAGCGTGAATAATATCCAA
CTCGCCCACGGTAGCGGCGGCCAGGCGATGCAGCAATTAATCAACAGC
CTGTTTATGGAAGCCTTTGCCAACCCGTGGCTGGCAGAGCAGGAAGAT
CAGGCACGTCTTGATCTGGCGCAGCTGGTAGCGGAAGGCGACCGTCTG
GCGTTCTCCACCGACAGTTACGTTATTGACCCGCTGTTCTTCCCTGGC
GGTAATATCGGCAAGCTGGCGATTTGCGGCACCGCGAATGACGTTGCG
GTCAGTGGCGCTATTCCGCGCTATCTCTCCTGTGGCTTTATCCTCGAA
GAAGGATTGCCGATGGAGACACTGAAAGCCGTAGTGACCAGCATGGCA
GAAACCGCCCGCACGGCAGGCATTGCCATCGTTACTGGCGATACTAAA
GTGGTGCAGCGCGGCGCGGCAGATAAACTGTTTATCAACACCGCGGGC
ATGGGCGCAATTCCGGCGAATATTCACTGGGGCGCACAGACGCTAACC
GCAGGCGATGTATTGCTGGTTAGCGGTACACTCGGCGACCACGGGGCG
ACTATCCTTAACCTGCGTGAGCAGCTGGGGCTGGATGGCGAACTGGTC
AGCGACTGCGCGGTGCTGACGCCGCTTATTCAGACGCTGCGTGACATT
CCCGGCGTGAAAGCGCTGCGTGATGCCACCCGTGGTGGTGTAAACGCG
GTGGTTCATGAGTTNGCGGCAGCCTGCGGTTGCGGTATTGAAATTTCT
GAATCAGCGCTGCCGGTTAAACCTGCCGTGCGCGGCGTTTGCGAATTG
CTGGGACTGGACGCCCTGAACTTTGCCAACGAAGGCAAACTGGTGATC
GCCGTTGAACGCAACGCGGCAGAGCAAGTGCTGGCAGCGTTACATTCC
CATCCACTGGGGAAAGACGCGGCGCTGATTGGTGAAGTGGTGGAACGT
AAAGGTGTTCGTCTTGCCGGTCTGTATGGCGTGAAACGAACCCTCGAT
TTACCACACGCCGAACCGCTTCCGCGTATATGCTAATAAAATTCTAAA
TCTCCTATAGTTAGTCAATGACCTTTTGCACCGCTTTGCGGTGCTTTC
CTGGAAGAACAAAATGTCATATACACCGATGAGTGATCTCGGACAGCA
AGGGTTGTTCGACATCACTCGGACACTATTGCAGCAGCCCGATCTGGC
CTCGCTGTGTGAGGCTCTTTCGCAACTGGTAAAGCGTTCTGCGCTCGC
CGACAACGCGGCTATTGTGTTGTGGCAAGCGCAGACTCAACGTGCGTC
TTATTACGCATCGCGTGAAAAAGACACCCCCATTAAATATGAAGACGA
AACTGTTCTGGCACACGGTCCGGTACGCAGCATTTTGTCGCGCCCTGA
TACGTTGCATTGCAGTTACGAAGAATTTTGTGAAACCTGGCCGCAGCT
GGCCGCAGGTGGGCTNTACCCAAAATTTGGTCACTATTGCCTGATGCC
ACTGGCGGCGGAAGGGCATATTTTTGGTGGCTGTGAATTTATTCGTTA
TGACGATCGCCCCTGGAGCGAAAAAGAGTTCAATCGTCTGCAAACATT
TACGCAGATCGTTTCTGTCGTCACCGAACAAATCCAGAGTCGCGTCGT
TAACAATGTCGACTATGAGTTGTTATGCCGGGAACGCGATAACTTCCG
CATCCTGGTCGCCATCACCAACGCGGTGCTTTCCCGCCTGGATATGGA
CGAACTGGTCAGCGAAGTCGCCAAAGAAATCCATTACTATTTCGATAT
TGACGATATCAGTATCGTCTTACGCAGCCACCGTAAAAACAAACTCAA
CATCTACTCCACTCACTATCTTGATAAACAGCATCCCGCCCACGAACA
GAGCGAAGTCGATGAAGCCGGAACCCTCACCGAACGCGTGTTCAAAAG
TAAAGAGATGCTGCTGATTAATCTCCACGAGCGGGATGATTTAGCCCC
CTATGAACGCATGTTGTTCGATACCTGGGGCAACCAGATTCAAACCTT
GTGCCTGTTACCGCTGATGTCTGGCGACACCATGCTGGGCGTGCTGAA
ACTGGCGCAATGTGAAGAGAAAGTGTTTACCACTACCAATCTGAATTT
ACTGCGCCAGATTGCCGAACGTGTGGCAATCGCTGTCGATAACGCCCT
CGCCTATCAGGAAATCCATCGTCTGAAAGAACGGCTGGTTGATGAAAA
CCTCGCCCTGACCGAGCAGCTCAACAATGTTGATAGTGAATTTGGCGA
GATTATTGGCCGCAGCGAAGCCATGTACAGCGTGCTTAAACAAGTTGA
AATGGTGGCGCAAAGTGACAGTACCGTGCTGATCCTCGGTGAAACTGG
CACGGGTAAAGAGCTGATTGCCCGTGCTATCCATAATCTCAGTGGGCG
TAATAATCGCCGCATGGTCAAAATGAACTGCGCGGCGATGCCTGCCGG
ATTGCTGGAGAGCGATCTGTTTGGTCATGAGCGTGGGGCTTTTACCGG
TGCCAGCGCCCAGCGTATCGGTCGTTTTGAACTGGCGGATAAAAGCTC
CCTGTTCCTCGACGAAGTGGGCGATATGCCACTGGAGTTACAGCCGAA
GTTGCTGCGTGTATTGCAGGAACAGGAGTTTGAACGCCTCGGCAGCAA
CAAAATCATTCAGACGGACGTGCGTCTAATCGCCGCGACTAACCGCGA
TCTGAAAAAAATGGTCGCCGACCGTGAGTTCCGTAGCGATCTCTATTA
CCGCCTGAACGTATTCCCGATTCACCTGCCGCCANNNNGCGAGCGTCC
GGAAGATATTCCGCTGCTGGCGAAAGCCTTTACCTTCAAAATTGCCCG
TCGTCTGGGGCGCAATATCGACAGNATTCCTGCCGAGACGTTGCGCAC
CTTGAGCAATATGGAGTGGCCGGGTAACGTACGCGAACTGGAAAACGT
CATTGAGCGCGCGGTATTGCTAACACGCGGCAACGTGCTGCAGCTGTC
ATTGCCAGATATTGCTTTACCGGAGCCTGAAACGCCGCCTGCCGCAAC
GGTTGTCGCTCAGGAGGGCGAAGATGAATATCAGTTGATTGTTCGCGT
GCTGAAAGAAACTAACGGCGTGGTTGCCGGGCCTAAAGGCGCTGCGCA
ACGTCTGGGGCTGAAACGCACGACCCTGCTGTCACGGATGAAGCGACT
GGGAATTGATAAATCGGCATTGATTTAACTGCAAATTGCCGGACAGAT
CTGCCTGTCCGGCATACTATTCACGAGGTTTTTTCGGACGATATTTTT
CCGGCAGTTCTGGCACCGGACACTTGTCATCGATGAGATGACGCACGG
TTAAGATCGGATGACGCCACAGCATTCTCGGCCCGGCCCAACGCATAA
TCTGTTTCATCTCTTCACGCTTTGCAGGCTGGTAACAGTGCACCGGAC
ACTGCTTACAGGCTGGTTTCTCTTCGCCGAACACACATTTATCCAGCC
GCTTTTGCGCGTAAACAAACAACGCCTCGTAATGCTCCGGCTCCGCTG
ACGCCTGCGGGCATTTCGCTTGATAAAGATCGATCATTTTTTTAATCG
TCAGTTTTTCACGAGAGATACGCTTGCCGGACATACTGCCTCCACCTC
ATTAAGATGCATTTATATTACAACTTAATCTTAAAGGGCACTATGACT
CTAAAGAAGAAGGGTTAGCCAACCGATACAATTTTGCGTACTTGCTTC
ATAAGCATCACGCAAAAGCTGCAAAACAGCATCTTTCCCGGAACCAGC
ATCAAGAACTCGCCGTTCGCTTCTTCCCCTGAAATGATTAACTCCGGT
ATCATGTGCGCCTTATGTGATTACAACGAAAATAAAAACCATCACACC
CCATTTAATATCAGGGAACCGGACATAACCCCATGAGTGCAATAGAAA
ATTTCGACGCCCATACGCCCATGATGCAGCAGTATCTCAAGCTGAAAG
CCCAGCATCCCGAGATCCTGCTGTTTTACCGGATGGGTGATTTTTATG
AACTGTTTTATGACGACGCAAAACGCGCGTCGCAACTGCTGGATATTT
CACTGACCAAACGCGGTGCTTCGGCGGGAGAGCCGATCCCGATGGCGG
GGATTCCCTACCATGCGGTGGAAAACTACCTCGCCAAACTGGTGAATC
AGGGCGAGTCCGTTGCCATCTGCGAACAAATTGGCGATCCGGCGACCA
GCAAAGGTCCGGTTGAGCGCAAAGTTGTGCGTATCGTTACGCCAGGCA
CCATCAGCGATGAAGCCCTGTTGCAGGAGCGTCAGGACAACCTGCTGG
CGGCTATCTGGCAGGACAGCAAAGGTTTCGGCTACGCGACGCTGGATA
TCAGTTCCGGTCGTTTTCGCCTGAGCGAACCGGCTGACCGGGAAACGA
TGGCGGCAGAACTGCAACGCACTAATCCTGCGGAACTGCTGTATGCAG
AAGATTTTGCTGAAATGTCGTTAATTGAAGGCCGTCGCGGCCTGCGCC
GTCGCCCGCTGTGGGAGTTTGAAATCGACACCGCGCGCCAGCAGTTGA
ATCTGCAATTTGGGACCCGCGATCTGGTCGGTTTTGGCGTCGAGAACG
CGNNNCNCGGACTTTGTGCTGCCGGTTGTCTGTTGCAGTATGCGAAAG
ATACCCAACGTACGACTCTGCCGCATATTCGTTCCATCACCATGGAAC
GTGAGCAGGACAGCATCATTATGGATGCCGCGACGCGTCGTAATCTGG
AAATCACCCAGAACCTGGCGGGTGGTGCGGAAAATACGCTGGCTTCTG
TGCTCGACTGCACCGTCACGCCGATGGGCAGCCGTATGCTGAAACGCT
GGCTGCATATGCCAGTGCGCGATACCCGCGTGTTGCTTGAGCGCCAGC
AAACTATTGGCGCATTGCAGGATTTCACCGCCGAGTTGCAGCCGGTAC
TACGTCAGGTCGGCGACCTGGAACGTATTCTGGCGCGTCTGGCGTTGC
GTACCGCTCGCCCACGCGATCTGGCCCGTATGCGTCACGCTTTCCAGC
AACTGCCGGAGCTGCGTGCGCAGTTAGAAACTGTTGATAGTGCACCAG
TACAGGCGCTACGTGAGAAGATGGGCGAGTTTGCCGAGCTGCGCGATC
TGCTGGAGCGAGCAATCATCGACACACCGCCGGTGCTGGTACGCGACG
GTGGTGTTATCGCATCAGGCTATAACGAAGANCTGGATGAGTGGCGCG
CGCTGGCTGACGGCGCGACCGATTATCTGGAGCGTCTGGAAGTCCGCG
AGCGTGAACGTACCGGCCTGGACACGCTAAAAGTTGGCTTTAATGCGG
TGCACGGCTACTACATTCAAATCAGCCGTGGGCAAAGCCATCTGGCAC
CTATCAACTATATGCGTCGCCAGACGCTGAAAAACGCCGAGCGCTACA
TCATTCCAGAGCTAAAAGAGTACGAAGATAAAGTCCTCACTTCAAAAG
GCAAAGCACTGGCTCTGGAAAAACAGCTTTATGAAGAGCTGTTCGACC
TGCTGTTGCCGCATCTGGAAGCGTTGCAACAGAGCGCGAGCGCGCTGG
CGGAACTCGACGTGCTGGTGAACCTGGCGGAACGGGCCTATACCCTGA
ACTACACCTGCCCGACCTTCATTGATAAACCGGGCATTCGCATTACCG
AAGGCCGCCATCCGGTGGTTGAACAGGTGCTGAACGAGCCATTTATCG
CCAACCCGCTGAATCTGTCACCGCAGCGCCGGATGTTGATTATTACCG
GTCCGAACATGGGCGGTAAAAGTACNTATATGCGCCAGACCGCACTGA
TTGCGCTGATGGCCTATATCGGCAGCTACGTACCGGCGCAAAAAGTCN
AGATTGGCCCGATTGACCGTATCTTTACCCGCGTAGGGGCAGCGGATG
ATCTGGCTTCCGGGCGTTCAACCTTTATGGTGGAGATGACCGAAACCG
CTAATATTCTGCATAACGCCACCGAGTACAGTCTGGTGCTGATGGATG
AGATTGGGCGCGGAACGTCCACTTACGATGGTCTGTCGCTGGCGTGGG
CGTGCGCGGAAAATCTGGCGAATAAGATTAAGGCGTTGACGCTGTTTG
CCACCCACTATTTCGAGCTGACCCAGTTACCGGAGAAAATGGAAGGCG
TCGCCAACGTGCATCTCGATGCACTGGAGCACGGCGACACCATTGCCT
TTATGCATAGCGTGCAGGATGGCGCGGCGAGCAAAAGCTACGGCCTGG
CGGTTGCAGCTCTGGCCGGCGTGCCAAAAGAGGTTNNNNAGCGCGCAC
GGCAAAAACTGCGTGAGCTGGAAAGCATTTCGCCGAACGACGCCGCTA
CGCAAGTGGATGGTACGCAAATGTCTTTGCTGTCCGTACCGGAAGAAA
CCTCGCCTGCAGTCGAGGCACTGGAAAACCTCGATCCGGATTCACTCA
CCCCGCGTCAGGCGCTGGAATGGATTTATCGCCTGAAGAGTCTGGTGT
AATAATAATTCCCGATAGTCTTTTGCTATCGGGAATATTAACGATAAC
TGACGAATCAAATAAAAATACCCTGTATAATAGGAAAGCTTATTTTAC
AGGGTAAAACCATGCCATCTACACGCTATCAAAAAATCAATACCCATC
ACTATCGCCATATATGGGTCGTTGGTGATATTCATGGTGAATATCAGT
TATTACAATCCCGCTTACATCAACTCTCTTTTTTCCCCGAAACCGACT
TACTTATTTCTGTCGGCGATAATATTGATCGTGGGCCGGAGAGTCTTA
ACGTCCTGCGCCTGCTAAACCAGCCCTGGTTTATCTCCGTTAAAGGCA
ACCACGAAGCAATGGCGCTGGATGCGTTCGCGACCGGCGATGGCAATA
TGTGGCTTGCCAGCGGTGGTGACTGGTTTTTCGATTTAAATGATTCAG
AGCAAAAAGAAGCTACAGATCTGTTGCTGAAATTCCATCACCTTCCAC
ATATTATTGAAATCACTAACGACAACATAAAATATGTCATCGCACATG
CAGATTATCCGGGGAGTGAATATCTCTTTGGTAAAGAAATAGCGGAGA
GCGAATTACTCTGGCCTGTTGATCGTGTGCAGAAATCGCTTAATGGCG
AGTTACAACAAATAAACGGCGCTGATTATTTTATATTTGGACATATGA
TGTTTGATAACATTCAGACGTTCGCTAACCAGATTTATATTGATACCG
GATCGCCGAAAAGCGGGCGGCTGTCATTTTATAAAATAAAGTAATGAG
GCCGGGTAAAGCAAAGCCACTACCCGGCACTTTTTATTAGCGCTTACC
TTCCGCCAGCAGCGGCGGGATGCTCGGCACCATTGGCGCGTCATCAAT
ATCTTTCTGCGTCATGCGGAACGCTTCGGGATAATGTTCGCGGCTGGT
ACGGCGCAGCGGTTCGGTATCGCGCCAGGTATAAAGGCAATGCTGGCA
CTGATATACCGTCCAGACATCTTTCACCGGCGATTTCGCCATCACTTC
AATCTGTTCATCGGCACAACGTGGACAAATCATCTTGTTCTCCTTATT
TACGTGCGGCCAGCATAGCGGTCAGTTTTTCAGCCCAGGCTTTGGTTT
CCGGCAAATCCACCACCGGCTGGCTGTAGTGACCACGGTTGTCCGGGG
CGACAGGCGTGGTGGCGTCGATAATCAGCTTGTCGGTGATCCCCGCCG
GGCTTGAGCCAGGGTCGAGTTCCAGCACGGACATATTCGGCAACTGCA
CCAAATCCCCTGCCGGATTTACTTTCGAGGAGAGCGCCCACATCACCT
GCGGCAGGTTGAACGGGTCAACGTCTTCATCGACCATAATCACCATCT
TTACGTAGCCCAGACCGTGCGGCGTGGTCATCGCACGCAGGCCCACCG
CGCGGGCAAAGCCGCCGTAGCGTTTTTTGGTGGAGATAATCGCCAGCA
GGCCGTGGGTGTACATGGCGTTTACCGCCTGCACTTCCGGGAACTCGG
CTTTCAGTTGTTGATACAGCGGCACACAGGTGGCTGGCCCCATCAGGT
AGTCGATTTCGGTCCACGGCATGCCGAGGTACAGCGATTCGAAAATCG
GCCTGGTGCGGTAAGAGACTTTATCGATACGCACCACGGTCATGTTAC
GCCCGCCGGAGTAGTGCCCGCTAAACTCACCGAACGGCCCTTCGATTT
CGCGTTTGCGGCTTTCGATAACCCCTTCGAGGATCACTTCTGAACCCC
ACGGCACATCAAAACCAGTCAATGGCGCGGTGGCGATCGGGTACGGGC
TTTCGCGCAGCGCGCCTGCCATTTCATACTCAGACTGATCGTATTTCA
GCGGCGTGGCGCCCATAAGGGTGATGATCGGATCGTTACCCAGGGTGA
TGGCAATCGGCAGATCTTCACCGCGCTCTTCCGCTTTATGCAGATGCA
GGGCGATATCGTGCATCGGCACCGGTTGCAGGCCGAGCTTACGCTTGC
CCTTCACTTCCATGCGGTAGATACCGACGTTCTGCTTGCCGAAGTTAT
CCGGGTCGAGCGGATCGCGGGAAACCACGCACGCTTTGTCGAGATAGA
AACCGCCATCACCGTCGTTTAAACGAAACAGCGGCAGGATATCGAACA
GATTAATCTCGTCACCATCGACGGTGTTCTGCGCCCAGGCTGGATTGG
CGCGGCGCTCCGGGGCGATCGGGAAGTTATCCCAGCGGCGGATAAACT
CATCAATCTGTTTTTTAACCGGGGTGTTTGGCGGCAGGCCCAAGGAAA
TCGCGTGGTTCTGCCAGGAACCGATGGTATTCATCGCCACGCGGGCAT
CGGTAAAACCGCGAATATTATCAAACCACAGCGCCGGTGCACCATCGC
CGATACGCCCGGTGGCGTTGGCAGCGGCAGCCAGATCCGGTTCCGCGT
TCACCTCTTCGCTGATTTTCAGTAACTGGCCGTGGTCATCAAGCGCCT
GTAAAAAGCTGCGTAAATCATCAAATGCCATTATTCATTCTCCTGAGA
AAAATTCCGGGCCTGCGGCAATCCTTGCCAGCGCCTGGCGTAGGGATG
TTCAAGGCCAAATTGATCCAGCACGCGGGCTACCACGTGGTGGACAAT
GTCATCTACCGTTTCGGGATGGTTATAAAAGGCAGGCATCGGCGGCAC
CATCGCCACGCCCATGCGTGAAAGTGCGAGCATATTTTCGAGATGGAT
GGTGCTAAGCGGCATTTCACGCGGCACCAGCACCAGTTTGCGGCCTTC
TTTGAGCACGACGTCCGCCGCGCGCCCTACCAGGCCATCAGCGTAACC
AGCGCGGATACCGGCGAGCGTTTTCATACTGCACGGAATAACGATCAT
GCCGTCTGTACGAAAGGAACCTGAGGAGATGGTCGCCGCCTGATCCGC
CGGGTTATGGCTGAAGTCAGCGAGGGCAGCAACATCGCGGGCGCTGTA
AGGCGTTTCCAGTTCAATGGTGGTTTTCGCCCACTTCGACATCACCAG
ATGAGTCTCGACATTCGGCATCTCCCGCAGCGCTTGCAGTAATGCCAC
ACCAAGANGCGCACCGGTAGCCCCTGTCATCCCGACGATCAGTTTCAT
TGCTTACTCTCTTAATTGTTCGTATACGAACATTATTATTAAAATACG
CCTCTGTTCTCATTGCGGCAAGCACTGAAAAGTAACAACATCCCCTTC
GTCACTGAAAAACCGCTATGATAGCGGCAGATAGTTTGCCCGGAGTTT
ACATGGCGTTACGAAATAAAGCGTTCCATCAGTTACGACAGCTTTTTC
AGCAGCACACGGCTCGCTGGCAGCACGAGTTACCTGACCTGACCAAAC
CACAGTATGCGGTGATGCGCGCCATTGCTGATAAGCCTGGTATCGAAC
AGGTGGCACTGATAGAAGCAGCAGTCAGCACCAAAGCAACGTTGGCAG
AAATGTTGGCAAGAATGGAGAATCGTGGCTTAGTCAGACGTGAACATG
ATGCCGCTGACAAGCGGCGTCGCTTTGTCTGGCTGACTGCCGAAGGAG
AAAAGATACTTGCTGCGGCGATACCGATTGGTGACAGCGTGGATGAGG
AATTTTTGGGGCGTTTGAGTGCAGAAGAGCAGGAGCTGTTTGTGCAGC
TGGTGCGCAAGATGATGAACACATAGGATGCAAATTGCCGGGTAGGAC
GCTGACGTGTCTTATCCAGGCGACAAAAACACAAGCTTCCCAAACAAA
AGAAAAAGGCCAGCCTCGCTTGAGACTGGCCTTTCTGACAGATGCTTA
CTTACTCGCGGAACAGCGCTTCGATATTCAGCCCCTGCGTNTGCAGGA
TTTCGCGCAAACGGCGCAGGCCTTCAACCTGAATCTGGCGAACACGTT
CACGGGTGAGGCCAATTTCACGACCTACATCTTCCAGTGTTGCCGCTT
CGTACCCCAGCAAACCGAATCGACGTGCCAGTACTTCACGCTGTTTGG
CGTTCAGCTCGAACAGCCATTTGACGATGCTCTGCTTCATATCGTCAT
CTTGCGTGGTATCTTCCGGACCGTTCTCTTTTTCATCGGCCAGGATGT
CCAGCAACGCTTTTTCGGAATCACCACCCAGCGGGGTGTCTACCGAGG
TAATGCGCTCGTTAAGACGAAGCATACGGCTGACGTCATCAACTGGCT
TATCCAGTTGCTCTGCGATCTCTTCCGCACTTGGTTCATGGTCCAGCT
TATGGGACAACTCACGTGCGGTTCGCAGGTAAACGTTCAGCTCCTTTA
CGATGTGAATCGGCAAACGAATAGTACGGGTTTGGTTCATAATCGCCC
GTTCAATCGTCTGGCGAATCCACCAGGTTGCGTATGTTGAGAAGCGGA
AACCACGTTCCGGGTCAAACTTNTCTACCGCACGGATCAGCCCCAGGT
TGCCNTCTTCGATAAGGTCCAGCAACGCCAGACCACGATTGCCATAAC
GGCGGGCAATTTTTACCACCAGACGCAAGTTACTCTCGATCATCCGGC
GGCGAGAGGCGACATCTCCACGCAGTGCGCGACGCGCAAAATAAACTT
CTTCTTCGGCCGTTAACAGTGGTGAATAACCAATCTCACCAAGGTAAA
GCTGAGTCGCGTCCAACACACGCTGTGTGGCTCCCTGCGATAACAGTT
CCTCTTCGGCCAAATCGTTATCACTGGGTTCCTCTTCTACTAAGGCCT
TTTCGTCAAAAACCTCAACTCCGTTCTCATCAAATTCCGCATCTTCAT
TTAAATCATGAACTTTCAGCGTATTCTGACTCATAAGGTGGCTCCTAC
CCGTGATCCCTTGACGGAACATTCAAGCAAAAGCCTGGTTCCGCCGAT
TTATCGCTGCGGCAAATAACGCAGCGGGTTTACGGATTTCCCCTTGTA
ACGAATTTCAAAATGCAAGCGTGTTGAACTGGTTCCGGTGCTACCCAT
GGTTGCTATTTTTTGCCCCGCCTTCACTTCTTGTTGTTCCCGGACCAG
CATTGTGTCGTTATGGGCGTAGGCACTCAGGTAATCATCATTATGTTT
GATGATAATCAGATTACCGTAGCCGCGCAGCGCGTTACCGGCATAAAC
AANGCGGCCATCTGCGGTCGCGATAATTGCCTGTCCTTTGCTGCCTGC
GATATCAATCCCCTTGTTGCCCCCCTCAGAAGCGCCAAAGGTTTCGAT
CACTTTGCCCTCAGTCGGCCAGCGCCAGGTGGAGATAGGCGTACTGGT
TGATGTACTGCTGACAGTCGGCTCGGTTGTGCTTGCTGTTGGTACCGT
TACAGGCGCTGTGACCGTGGTCGCAGTTGGCTTGTTGTTCGGCAACAT
TTTGTTAGCACTCTGTTCACCCGAAGACTCAGAATACGTAATTGTCGG
TTGCGACGCAACAGCAACGGTGGAATTTTGTGCAGGCTTGATCACAAC
TCCTTGCTCTGCTGCGTCGGCCTGGGTAATGGCATTTCCGCCAGTGAT
TGGCGTACCGGAAGCATTACCCACCTGTAAGGTCTGACCGACGTTCAG
CGCGTATGGTGCCTGAATATTGTTGCGCTGAGCAAGGTCACGGAAATC
GTTGCCAGTAATCCAGGCGATATAGAAAAGCGTGTCGCCTTTTTTCAC
GGTATAGGTACTGCCGCTATAACTGCCTTTCGGAATGTTCCCATACTG
ACGGTTATAGACGATGCGTCCGTTTTCCATCTGTACCGGCTGCTGAGC
TACTGGCTGCACTGGCTGGATTTGCGGTTGTTGAGTAGCCTGAATTTG
TGGCTGCTGCACCGGCTGAATTTGCGGTTGCTGCGCTGTAGACGTCGT
CCCCATTTTCGGCGGCGGCGTAATCAACATACCAGAATTGGTATGTGC
AGGCGCATTGCCATTAACGGAGCTGACCGGTGCCGGTGGATTTGAAGT
GTCAGAACAGCCTGCCAGCCATAGCGAAACCAGTGACAAAGCCGCAAT
GCGGCGAACGGTGAATTTTGGGCTTCCCGCGCTCATTTATCCCCCAGG
AAAAATTGGTTAATAACCAGTGACATAATTACCGTGCAAGGCACCATA
CTGAACACTGGAAAAGATGTTCACGATACGCTGACCTGCGGCAAAATA
ACCAGGAAAAATCCAGGTATTTCCTCACGTTTTAAGCCAGCTCACCCT
TCACTAAAGGGACAAAGCGCACGGCCTCCACGGTATCGATAATAAATT
CGCCTCCCCGACGACGCACCCGTTTCAAATACTGGTGCTCCTCCCCTA
CGGGTAAGACGAGAATCCCGCCTTCGTCCAGCTGCGTCATTAGCGCAG
TTGGAATTTCCGGCGGTGCCGCCGTAACAATGATAGCGTCAAACGGCG
CACGTGCCTGCCAACCTTGCCATCCATCGCCATGACGGGTTGAAACAT
TATGTAAATCAAGATTTTTCAGGCGGCGACGCGCCTGCCACTGCAAGC
CTTTAATCCGTTCAACCGAGCAAACATGCTGGACAAGATGCGCCAGGA
TTGCCGTTTGATATCCCGAACCGGTGCCAATTTCCAGCACCCGCGACT
GCGGCGTCAGCTCGAGTAATTCGGTCATTCGCGCCACCATATACGGCT
GCGAAATCGTCTGCCCCTGACCTATCGGCAAGGCGATATTGTCCCAGG
CTTTTTGTTCAAACGCTTCATCAACGAATTTTTCACGCGGCACGGCGG
CAAGTGCATTCAGCACCTGCTCATCCTGAATACCTTGCGCACGTAATT
GATCCAGAAGTGCTTGTACGCGTCTGCTTACCATTGCGTGCCAACTCC
CACGCTGTTTAACCAGTCTGAAACCACATCTTGCGCGCTATGCGCAGT
TAAATCCACATGCAGCGGCGTGATGGAGACATAGCCCTCATCTACCGC
AGCAAAATCGGTCCCCGGACCGGCATCACATTTACCGCCCGGCGGGCC
AATCCAGTACAGCGTATTGCCGCGCGGATCTTGCTGCGGGATCACCTG
ATCTGCCGGATGTCGTGTACCGCAGCGCGTCACGCGAATACCTTTGAT
TTGATCCAAGGGTAAATCCGGAACATTAATATTAAGAATACGCCCGGT
GCGCAGCGGCTCTTTACACAGTGCGCGCAAAATTGAACAGGTTACCGC
CGCGGCAGTGTCGTAATGTTTATGCCCGTCAAGCGAGACGGCAAGCGC
CGGAAAACCTAAATGACGGCCTTCCATCGCGGCGGCTACCGTACCGGA
ATAAATAACATCATCCCCCAGATTCGGCCCGGCGTTAATTCCGGACAC
AACAATGTCCGGGCGCGGACGCATCAGAGCATTCACGCCAAGATAGAC
GCAATCGGTCGGGGTTCCCATTTGCACAGCAATATCACCATTTTCAAA
GGTAAACGTGCGCAGGGAGGATTCCAGTGTCAGAGAATTTGAAGCGCC
GCTGCGGTTACGATCGGGGGCGACCACCTGAACGTCAGCAAACTCACG
CAAGGCTTTCGCCAGCGTTTGTATACCGGGTGCATGTACCCCGTCATC
ATTACTCAGCAATATGCGCATAATCACCTGTTGTGTTGATAAGTTCCC
TGACAACGCTGGTTGCAAAACTACCCGCCGGAAGCCAGAAACGGATTT
CTACGGTGACGTCATCCCACCAATTCCAGCTTAATTGTTGCGGATACA
GCAGCATCGCTCTGCGCGCGGCTTCAACTTTTTCGCGCACCAGTAAAG
CTTGTAATTCAGTTTCTGCGGCGAGAGCTGCCTGTTCGAATGCCAGCG
CTTCACGCTGAGTTCCCCATTCACCACTGCCCGGCAATGCGGCGGTTA
TCATCAGCTCTTTATCGTTGACGCGACGCTGTAATTCCACCAGTTCTT
CGGTGGTTGCAACAAACCAGCTACCACGTCCGGCTAATTGTAGCGCAT
CGCCGTCAACAACTTGATTAACGTCTGCTTTTTTGAGGCGCTCAGCAA
CAATCTGATTAAACAACGCACTGCGGGCTGCCGACAACCAAAAACTCC
GTTTATTGCGATCGCGCACCGGAGTATTGGTTTGCGCCCAGCGCAGCG
CGCCCTGCAAGTTGCTACCGCCAATCCCAAAACGTTGGGCACCGAAGT
AGTTCGGTACACCTTTTACGCAAATATCGATCAGACGTTGTTCAACGT
CATCGCGATTGCTCACTTCGCGCAGAACCAGGGTAAAGGCGTTACCTT
TCAGCGCCCCCAAACGCAGCTTGCGCTTGTGCCGCGCATACTCCAGCA
CCTGGCAGCCTTCCAATTGAAAGGCGCTCAGATCGGGCATTTCCTTGC
CCGGCACGCGAGCGCATAACCACTGTTCTGTAACAGCATGTTTGTCTT
TTTGCCCAGCAAAGCTGACTTCACGGGCATGAATTTTCAGGAATTTCG
CCAGTGCATCCGCCACAAAACGGGTATTGCAGCCGTTTTTGAGGATTC
TAACCAGAATATGCTCACCTTCACCATCAGGCTCAAAGCCCAAATCTT
CCACCACCACAAAGTCTTCCGGATTGGCTTTCAGCAGCCCGGTGCCTT
GCGGTTTACCGTGGAGGTAAGTGAGATTATCAAACTCAATCATTTTGT
TGCCTTAATGAGTAGCGCCACCGCTTCACAGGCAATCCCTTCCCCACG
TCCGGTAAATCCAAGTTTTTCCGTAGTAGTGGCTTTCACGTTAACATC
ATCCATATGGCAGCCGAGATCTTCGGCAATAAACACGCGCATTTGTGG
AATGTGCGGCAACATCTTCGGTGCCTGAGCGATGATAGTGACATCGAC
GTTGCCAAGGGTATAACCCTTCGCCTGAATACGACGCCAGGCTTCGCG
TAGCAGCTCGCGGCTATCGGCACCTTTAAATGCCGGATCGGTATCCGG
GAACAGTTTGCCGATATCCCCCAGCGCCGCCGCGCCAAGCAATGCATC
GGTCAACGCATGGAGCGCCACGTCGCCATCAGAATGCGCCAGCAATCC
TTTTTCGTAAGGAATGCGTACGCCACCAATGATAATTGGGCCTTCACC
GCCAAAGGCGTGTACGTCAAAACCGTGTCCAATTCGCATTATGTATTC
TCCTGATGGATGGTTCGGGTGAGGTAAAACTCGGCCAGTGCCAAATCC
TCCGGGCGCGTGACTTTAATGTTATCCGCACGGCCTTCGACCAACTGA
GGATGGAATCCGCAATATTCCAGCGCCGAGGCTTCGTCGGTAATAGTC
GCGCCTTCATTTAGAGCGCGCGTCAGACAGTCATGTAACAGCTCACGA
GGGAAAAATTGCGGCGTCAGCGCGTGCCATAAGCCGTTGCGATCAACG
GTATGAGCAATGGCATTTTTGCCCGGTTCGGCACGTTTCATAGTATCG
CGCACTGGTGCGGCTAGGATCCCTCCCGTGCGGCTGGTTTCGCTCAAC
GCCAACAATCGCGCGAGGTCATCCTGATGCAGACAAGGACGAGCGGCG
TCATGCACCAATACCCACTGCGCGTCGCCAGCGGCTTTCAAACCTGCC
AGCACGGAATCGGCACGCTCATCACCGCCATCTACAACGGTGATTTGC
GGATGATTCGCCAGAGGAAGTTGTGCAAAACGGCTATCGCCAGGACTT
ATGGCAATGACGACACGTTTCACCCGGGGATGCGCCAGCAGCGCATAC
ACCGAGTGTTCAAGAATGGTTTGATTACCGATTGAGAGATATTGCTTA
GGACATTCCGTTTGCATTCGACGGCCAAATCCGGCCGCCGGAACCACG
GCGCAAACATCCAAATGAGTGGTTGCCATGTTAATTCCCGGGCTGATT
TATCGATTGTTTTGCCCCGCAGACTGTGCGCGCTTCGACGCGTCAGGC
ACCAGACGATAAAAAGTTTCGCCCGGCCTGGTCATGCTGAGTTCATTA
CGCGCACGCTCTTCGAGCGCCTCCTGGCCGCCATTGAGATCGTCAATT
TCGGCAAAAAGTTGATCGTTTCGCGCTTTAAGTTTCGCGTTTGTAGCT
TGCTGTGCCGCCACATCATCATTGACGCGGGTATAGTCATGTATACCG
TTCTTACCGAACCACAGCGAATACTGTAGCCAGACCAGAATAGCCAGC
AACAGCAGCGTTAGTTTACCCATCCTGCCCCCTGAAAAACGGCATCAT
CATCCCATGCATCCGAAGACGACTCTACATCCTCTGTTGGGGATACCG
CGACAACGCGGGCAAATGTACCACATTTGTCCATTGTTACGTATACCC
AGGGCGTGCAGAACATAATCTCATTATTAGTTACGGTTTGAATTATGA
ACAGAGGAGACAAGAAAGTACAAATTAGCCCAGTAGCCACATAAACAG
TGCGCCAAACATAATGCCTACTGTCATCAGGGTGAAAACAATACTGTA
GCGTAGCTTTCCGTCCATCAATGAATGCAGCGCAATCCCCACCACTAC
CGCAACGGGCATCAGCGCCAGAAAGAAAGGCCAGGTGTAGATAAAGAA
GAACAGCGTGTTAGAGCCATAAATCAACATCGGCATCGCCAGCGCAAA
TAACCAGGAGATAAAACCGACCACGGCACCAGGCAGTGACCATGTGGT
TTCTTCATCCTCAGTAAGGCTGTCGTTATTTGTTAGTGTAATGTTATG
GCTATTACGCATATTTGATCCTGTTACTTTGACGAACCGGGCATGGAA
ACCCGGTGGTGTCTCAGGATCTGATAATATCGTTCTGTCTCAACAGAT
CTAATAATTGCTGTACCAAATTTGTTACTAATTGTTCACCATTGAGAT
GAATTTCTGCCGATTCAGGCGCTTCGTAAACGGAATCTATTCCCGTAA
AGTTGCGCAGTTCACCGGCACGCGCTTTCTTATATAAGCCTTTTGGAT
CGCGGGCTTCGCAAATCGCCAGCGGCGTATCGACAAACACTTCGATAA
AGCGCCCTTCTCCTACGCGTTCGCGAACCATCTGGCGTTCGGCGCGGT
GTGGCGAGATAAATGCGGTCAGCACCACCAGTCCGGCTTCAACCATCA
AATTCGCCACTTCACCGACGCGACGGATATTCTCTTTACGATCGGCAT
CGCTAAAACCGAGATCGCTGCATAATCCGTGGCGAACATTGTCGCCAT
CCAGCAGATACGTACTGACGCCGAGTTTATGTAACGCCTCCTCCAGCG
CCCCAGCGACCGTTGATTTACCGGACCCGGAGAGGCCGGTAAACCACA
GCACTACACCACGATGACCGTGGTGTAGCTCGCGTTGTTGCACAGTGA
CCGGATGGCTATGCCAGACGACGTTTTCGTCATGCAGCGCCATTATTT
CTCCCCCAGCAAATCGCGNNNNCCCCAGTGTGGAAAGTGGCGGCGAAC
CAGGGCATTCAATTCCAGTTCGAATGCACTAAATTCAGATGGCGCAGC
AGTTGCCTGGCTAACTGGCTCATGCACCATACCGGCACCTACGGTCAC
ATTGCTCAGGCGATCGATAAAAATCAGCCCACCGGTAACCGGGTTTTG
CTGATAACGATCTAACACCAGTGGCTCGTCAAAAGTGAGATCCACCAG
GCCGATGCCGTTCAGCGGCAGGTTTTCAACTTCGCGTTGGGTAAGGTT
ATTAATATCAACCTGATAACGAATGCCATCAACACGAGAACGCGTCTT
CTTACCGGCAATTTTGATGTCGTAACTCTGGCCCGGGGAAAGCGGCTG
TTCCGCCATCCATACCACATCCACCGACGCGCTCTGCACAGCTGGTAA
CGCTTCGTCTGCCGCCAGCAGCAGATCGCCACGGCTGATGTCGATCTC
ATCCGTCAGCACCAGGGTGATAGCTTCTCCGGCAAAGGCTTCTTCGCG
ATCACCATCAAAAGTCACGATCCGCGCGACGTTTGATTCCACACCAGA
GGGCAGCACTTTTACACGTTGCCCGACTTCCACGCGACCGGATGCCAG
CGTTCCGGCGTAGCCACGAAAATCGAGATTTGGGCGGTTAACGTACTG
CACCGGGAAGCGCATTGGCTGGGCATCCACCACTCGCTGAATCTCCAC
GGTTTCCAGCACTTCGAGCAGTGTCGGACCGCTGTACCACGGCATACT
TTCACTTTGCGAAGCCACGTTGTCACCTTCCAGTGCGGAGAGCGGCAC
AAAGCGGATATCCAGATTACCCGGCAGCTGCCCGGCAAAGGTCAGATA
ATCTTCACGAATACGGGTGAACGTCTCTTCACTGTAATCCACCAGATC
CATTTTGTTGATCGCCACGACCAGATGTTTGATCCCCAACAGTGTGGA
GATAAAACTGTGACGACGGGTTTGATCGAGCACGCCTTTACGGGCATC
GATCAGTAAGATCGCCAGTTCACATGTCGATGCGCCAGTCGCCATATT
GCGGGTGTACTGCTCGTGCCCTGGAGTGTCGGCGATAATAAATTTACG
CTTCTCGGTAGAGAAATAGCGGTAGGCCACGTCAATGGTGATGCCCTG
TTCACGCTCAGCTTGCAGGCCGTCCACCAGCAGAGCCAGATCCAGCTT
TTCGCCCTGGGTGCCGTGACGCTTACTGTCATTATGCAGCGATGAGAG
CTGATCTTCATAGATTTGGCGGGTATCGTGCAGCAGACGACCAATCAG
GGTACTTTTGCCGTCATCGACGCTACCACAGGTCAGAAAACGCAGCAG
GCTTTTATGTTGTTGCGCAATCATCCAGGCTTCGACGCCGCCTTCATT
GGCGATTTGTTGTGCAAGTGCGGTGTTCATCTTAAAAATACCCCTGAC
GTTTTTTCAGCTCCATAGAACCAGCTTGGTCGCGGTCAATCACGCGCC
CCTGACGTTCACTGGTGGTGGAAACCAGCATCTCTTCGATGATCTCCG
GCAGCGTTTGTGCATTTGACTCCACCGCACCGGTCAGCGGCCAGCAGC
CCAGCGTACGGAAACGCACCATCCGTTTTTTAATCACTTCGCCCGGTT
GCAGGTCGATACGGTTGTCATCAATCATCATCAACATACCGTCGCGTT
CCAGAACCGGACGTTCCGCAGCGAGATACAGCGGCACAATGTCGATAT
TTTCCAGCCAGATGTATTGCCAGATATCCTGCTCGGTCCAGTTAGAGA
GCGGGAAAACGCGGATGCTTTCGCCTTTGTTAATCTGCCCGTTATAGT
TGTGCCACAGCTCCGGGCGCTGATTTTTCGGGTCCCAGCGATGGAAGC
GATCACGGAAAGAGTAGATACGCTCTTTAGCACGGGATTTCTCTTCGT
CGCGGNGCGCACCACCGAAGGCGGCATCAAAACCGTATTTATTCAGCG
CCTGCTTCAGGCCTTCGGTCTTCATAATATCGGTATGTTTCGCGCTGC
CGTGCACGAATGGATTAATCCCCATCGCCACGCCTTCCGGGTTTTTAT
GCACCAGCAGCTCGCAGCCGTAGGCTTTCGCCGTACGATCGCGGAACT
CATACATCTCACGGAATTTCCAGCCGGTATCGACATGCAGCAACGGGA
AAGGCAGCGTACCTGGATAAAACGCCTTGCGCGCCAGATGCAGCATGA
CGCTGGAATCTTTACCGATAGAGTAGAGCATCACCGGATTTGAGAATT
CTGCCGCCACCTCGCGAATAATGTGGATGCTTTCCGCCTCCAGTTGCC
GCAGGTGAGTAAGTCGTATTTGATCCATAACCGTTCCTTTGCAATACC
GCTATTTTCTTGCCATCAGATGTTTCGACTATAGGGAGCGTAAGAGAA
CGAATGAAATTACCAATTAGAATGAGTAGTTCCTTAACGGAATAACGA
TTTGGCAAAGCTAATATCAAAAAGTGCTTAAGGCACCGGATTTCGGGC
GTTTAGGAAGATTTGAAATTGTTTTAGCGCAGCGGCAGTTTCATACTA
TGGCGGTAAAAAAATTTGCATGGTATTTAAGGACTCACTATGTTTTCC
GCATTGCGCCACCGTACCGCTGCCCTGGCGCTCGGCGTATGCTTTATT
CTCCCCGTACACGCNTCGTCACCTAAACCTGGCGATTTTGCCAATACA
CAGGCGCGACATATTGCCACTTTCTTTCCGGGACGAATGACCGGAACA
CCCGCAGAAATGTTATCTGCCGATTATATTCGGCAACAGTTTCAGCAA
ATGGGTTACCGCAGTGATATTCGTACGTTTAATAGCCGATATATTTAT
ACCGCCCGCGATAACCGCAAAAACTGGCACAACGTGACGGGAAGTACG
GTGATTGCCGCTCATGAAGGCAAAGCGCCGCAGCAGATCATTATTATG
GCGCATCTGGATACCTATGCCCCGCAGAGCGACGCAGATGCAGATGCC
AATCTCGGCGGGCTGACGTTACAAGGAATGGATGATAACGCCGCAGGT
TTAGGTGTCATGCTGGAACTGGCAGAACGCCTGAAAAATACGCCTACC
GAGTATGGTATTCGATTTGTGGCGACCAGTGGAGAAGAGGAAGGGAAA
TTAGGCGCTGAGAATTTACTCAAGCGGATGAGTGACACCGAAAAGAAA
AATACGCTGCTGGTGATTAATCTCGATAACTTAATTGTTGGCGATAAA
TTGTATTTCAACAGCGGTGTAAAAACCCCTGAAGCAGTAAGGAAATTA
ACGCGCGACAGGGCGCTGGCAATTGCGCGTAGTCATGGAATTGCCGCA
ACGACCAATCCGGGTTTGAATAAAAATTATCCGAAAGGCACTGGATGT
TGTAATGACGCAGAAATATTCGACAAAGCGGGCATTGCTGTACTTTCG
GTGGAAGCGACAAACTGGAATCTTGGGAATAAAGATGGTTATCAGCAA
CGCGCAAAAACAGCCGCATTCCCTGCGGGAAATAGCTGGCATGACGTA
AGACTGGATAATCAGCAACATATTGATAAAGCACTTCCTGGAAGAATA
GAACGTCGCTGCCGTGACGTTATGCGGATAATGCTACCGCTGGTGAAG
GAGTTGGCGAAGGCGTCTTGATGGGTTGGAAAATGGGAGCTGGGTGTT
CTACCGCAGGGGCGGGGAATTCTAAGTGATATCCATCATCGCATCCAG
TGCGCCCGGTTTATCCCCGCTGATGCGGGGAACACAGCGGCACGCTGG
ATTGAACAAATCCCTGGGCCGGTTTATCCCCGCTGGCGCGGGGAACAC
TTTATACACGGATCCTGTGTGCCGTGGACCGCCGGTTTATCCCCGCTG
GCGCGGGGAACACCACAAACCGCCCATCTTCCCGATTACTGCAGCCGG
TTTATCCCCGCTGGCGCGGGGAACACACTAAGCATACATATCTGTTTT
TAAACAAATTTATTCCACATCAACAATCTACCAACTAAATTCAAACAT
TTCCTTATTTTTAAAGAACACATAACCTATTGATTATCAACAGGAAGA
AAAGAAACCAAACGTAACCCATCCAAATCCACCGGAATACGTCTGTTT
TCTCCCCAGGTCTGAAATTCAAAACCCGACTCGGTATTGGTCGCCCAG
GCCATCACCACATTTCCGCAACCAGCCAGTTGGGTAATTTGCTGCCAG
ATCATCTCCCGAATACGTTTTGATGTATCACCAACATACACACCGGCA
CGCACTTCCAGTAGCCAGATTGCGAGCCGTCCACGTAAGCGCGGAGGG
ACATTTTCTGTAACAACCACGACCATGCTCATCCGCCGCGCCCCCGGT
GACCACTATCACCCAGCGTTTCAGGTTCAGGGATGGCAGGCGGTAACA
TATCCGGCGCGGGTTGTGGTGGTTCAATTTCACCTGCAGCAAGGACTT
CCTCAATTAACGGTATTAATTTGCCCGTTAACTTAGTGCTACGGAAAA
TATCGCGACAGGCTAATCTGACTTCTTTATCAGGTTCTGCGGGTTGCC
TCGCTGCTATTTCAAATGCCTTTGGCACAACCGAATCAAATTTAATGA
TATCGGCTATGTCATAAACAAATGAAAGCGGTTTGCCACTATGAATAA
ATCCAATAGCGGGCGCATATCCCGCGGCTAATACTGCCGCTTCAGAAA
TACCGTACAGACATGATGTGGCAGCACTGATGCAGCGATTCACAACAT
CGCCTTTTTCCCAGTCTTTAGGATCGTATTTGCGACCATTCCATTTCA
CACCATATTGTTTCGCCAGTAATGCATAGGTCTGGCGAACGCGGGATC
CCTCAATTCCCCGTAGCTGATCCACTGAACAGCGAGCTGGCGGTGGCT
CACGAAAACGTAATTCATACATTTTGCGCACCACCTTCAGGCGTAGAT
CTTCCGTTAAAGCCAGCTTTGCCTGGTAGAGTAATTTATCTGCCCGCG
CCCCTCCGGGTTGTCCGGAAGAGTAAACGCGAACGCCCGCTTCACCGA
CCCAGACCAGCAGTGTTCCCACCGTGGCGGCCAGATGCACCGCCGCGT
GGGAAACTCTCGTTCCCGGTTCGAGCATAATGCAGGCGACCGATCCCA
CCGGAATGTGCGTGCGGATCCCGGTTTTGTCGATCAGCACGAAAGCGC
CGTCCAGTACGTCGATTTGACCGTACTGGAGGAAGATCATAGAGGTGC
GATCTTTTAACGGGATCGGACTCAGTGGTACAAACGTCACACCTCTGC
TCCGGGTTTGATCAGCATCAGACCACAGCCGAACGCGCGGCTTTTGCC
ATACCCCTGACTGAGACGTTGCAGAAATAACCCGGGATCGGTGACCGT
AAGCATCCCCGTATAATCCACGCTACTGAACTGGATCAGTTGCCGGGA
GTTTTCCCGCCGCAGTTGCTGTTGTCGGTAGGCATCAACCGAGGTATC
CAGCAGTGTAAAACCGCTTCTCTCCCCCTGCGCTGCCAGCCAGTCCAG
CGCCGCCTGTTGTTGATGCAACCAGACATCACTTCCTTCCGCCTGCCC
CCTCACCTGCCGTTTCGCCTCCATCAGCAGATCGTGGCGCTTGCCCGC
TTTACAGATTGTTGGATTCGCCCGCAGGTTGAAACAAAGTTGTTGTCC
GGTACGCAGCTCGGGCACAAATGACCGGCATTCGATGGTGAACGTTTC
ACTTTCCGCCGGGCGTTCCTGCGACAGTACAAAAAAGCGAAACGCGCC
CTGGAGTTCTTCCCGACGATAAAGAAATTGCCTTTCTTTGCCGCCAGG
GAAGAGATCCCACAGCCACTGATGCATCACATATTCCCCGCGATCCAC
CAAATGCAGCAACTGCGCAGGCGAAAGCTGGCCGGTATGTAAGGTTAT
TCTTGAGAGGTACATGGTTCCTCCTTGCTGAGCCACGGCCCCTGATTG
ATGGTGCGTTCCCCAAACAGCCACTGCTGACGATTTAAAGGAACATCT
CGGCGACGTAATATTTTGCTCKCGACCAGGCCGTCGTGTTCCCCTTCC
CACCAGCATTCATCCTGAAGTTTCGGGAGTGAGACTTTCAGTTCGCGG
AAACTATCCTGATACTGTTGGTATGCGTTACGTAAGACATCAGACGCG
TTGCCTTCGAGCAGTAACGGCGCAAGTGGTAACGCCAGCGGATGACTT
TTTCGCCCCAGATAAAGCGGAAAAACCGGATGACGTAAACCGTCCTGC
AACTGTTCAAGGCTGTAAGGCGCATCGGGGGTTGTTGCCACCGCCACC
ATCCACCAGGCATCGGTGTAGTAGTCGCGCCGGGAGATAATCGCGCTC
AGAAGATCAGGGGCGCTCAACTCTTCGCGACGGCTGAAATAACGCGCT
TTACGCACCTCTTTTGGCATCTGGACCGTGTGATAATCCCGTGCCCAG
CGCGGGTTACGGCTGGCGCAAACCACCAGTGAATAGTGGCGGTTAAAC
GCGTTTAATCGTTCGGTATCATCACGCCGAATCCCTACCCCGGCAGCC
AGCAGCCCCAGCAATGCTGAGCGCGAAGGCAGTTCATGGGTATGACGC
ACTTCGCCGGGGGCATCGACGCCCCAGGATGCCATTGGCCCATGAAGC
TGAAAAATCAAATATTGGCTCATTAGCCGCCCCTTACGCGCAGATAAA
GTCCAGCACGTCCTTCATGCTTCCCTGTTTGTTCATCACGTCAAAGCT
TGCGCATTCGGTCTTCTGTTCATAGACCGTATTCATATTTTCGCGAAG
CGTTGTAATACGCTGCACCGCCACATCTAACTGCCGGGTGCCATTAAT
GGGTTCATAGAAAGCCGCCGCCAGAGAACGTGGTTGTTCGGTGCCTTT
TTCTGCCAGCGCCCAGGAGGCGTAGGCACGGCTGGCAAAGCTGTTCTG
TTTGCCGGTTGGGGAGACTTTAAGTGCGGCTTCCGTAAAGGCGCGCAA
GGTCTGATTAGCTAACGCTTCGTCACCGCCGAGGTTTTCGACCAGCAG
ATCTTTATCGATGCAGATATAGGTGTAGAACAGCGCAGAACCGAATCC
GGTTTCACCAAGATGCCCGGCACCGGCATCTTCAGAAGCCTGGCGCAA
ATCATCAACGGCGGTGAAAAAATCATCTTCGACAATCGTTTCACTGAC
ACCAAATGCATGCGCGACCTGGCAGGCGGCTTCAACATTAAATTCGGG
TTTATTCGCCAGCATACGACCAAACATAGCGATATCTACCGCCATGCG
ATCTTTACGTAACAAAGCGAGATCTTCCTCTTTTGGCGCGCGCTTTTC
TTCGGCCAGTTGATGGGCCAGCGCTNTTACGGCGTCANATTCTGCCGG
GCTGATATGGACTAATTGTTCAGTTTCGGCGTTAGTGAGCGGATCTTT
TGGTTTTTTGTCGTTTTTAGCTTTCCCAAGATAATCCGCAATTTTTGC
CGCCCATTCGATGGCTNTTTTCTCTTCGATGCCTTTCTCAATCAGGAT
AGTTGCCGCCTCACGCGCAATACGCCCACTGCGAATACCAATATGGCC
CGCCAGTGCCTGTTCAAAAAGTGCAGAAGTGCGCCACGCACGTTTCAG
ACTTTGCGAGGAAACGCGCAGTCGCGTTGCTCCACCCAGGACCACGGT
TTTCGGCGCTCCGGTGTCATCACGGTTAAGGTTGGCTGCAGGGTAAGC
GGTTAACAAATGAAGCTGAATAAATGTCGTCATGAGATAGTCCTTTAT
TGATTTTGTTCGTTATCGACGTCGCCAGCCTGGTAATATTCCAGCGCC
CAGCGGATACGGATAAATTCGGTTGGCCGCTGATGACGGCGGTGATGA
TTGAGCAGATCGTCGCTCTCCTGGCACCAGCGGAAGACACCCTCTGCC
AGAGAGTCAAGATTAACGGAACCGTTTAATAATCTGACTGCGCGACGT
AACTGGCGCAGTAATTCATCCGGTGTTTTTACTGCCGACAGGCGAGTA
AAACGCCCCTTTGACATTACCGCCGCCAGCTGCGCAGCAAAAGGCAGC
CGTTCATCAATGGCTTTAACATTAGCGCTAAGTGCGGCTATCAGCGCC
AGTGCGGTAATACGCCATTCAGGTTCATCCTGCCACTTTATTTCTCTG
TTCTTCAGAAACAGGCGAAATCCATCCGTCAGACAAACATCATTAACC
GTCGTACTACGCCGCAGACTGGCACGTTCGCCGCGTTTCTCCTGCAAT
TCCTCATGCCATTTGCGCAGCGTGGCTTTGTGCTCCTCTTTTACAATA
CTCATTCAGCAGCCTCCTGCTTTTTCTCCCTGGCGGCTTTAGCACTTT
GCTTCTCCGCCGATGTTGTAAAATATTTCTTGCGCNCGGTCATGACGC
GTTCCAAATCAACGGGCTCATAAGGATTGGTGAATACACGCTCGTCAA
AATCCTGACGTGCGAATAACCAAATTTCCTTTTGCCATTTGCCGAGTA
ATTCATCCGCATCCTGACCTTCTTCAATTTGGCGCACTAACCTCAGGA
AGCGATGCTGAGTTTTGTTCCAGAAGTCGATATCCACAAAACTGAAAT
CACCCCTTGCACCTTTTGGATCGGAGAACCATGCTTCTTTCAATGCAC
TCCGTAACAGACTCAGAATCCGTGAAGCCGTTTGCGCAGCCAGCCGCA
GCTTCGGTATCTGGCCTTCTTTTTTATTGAGCAGCAGCGGGAAATGGT
GTTCGTACCAACAGCGCGCTTTCATGTTGTCGAAATCATAACCAAATC
CCCACAGGCCCACTTTTGCCTGTTTCAGACTGCTGGCATTAAAGAGTT
TCACCACCAGCGCGGGAAGTTCCGTATTGTTTTCTGACTTACCCGTTT
CGATAAGGCCTAACCAGTCGCGCCAGATTAAACCGCCCGGTTGTGGTT
TAACGGAGTAAAACTCACCGCCCTCTTTAAGTGGTACACGGTAAGGCG
TTAAGGGATGCTGCCACATGGCATAATTCGCACCGTAATTTTTGGTAG
TCATCAAACTCAGAAGCGCGTCACTCTGCTCACCGCAAATATCGCAGT
TGCCGACTGTCGTGGTATTAAAATCAATACGAATACGCCGCGGCATTC
CCCAGTACGCCTGGAGTTTATTGACCTGATCATCGGTTACCACCGCAC
CGGCCAGTTCGCTGGTACGCGTCGGGCCAAGCCAGGGGAAAACCAGAT
CGTCAAATTTTTTGGGTAGCGGTAAGTCGGCTTCATCCTGCGGCATCA
CGTTGAGCCACAGTTTGCGCCACAAGGGGGCTTGTTGATTGCCCTGAT
ACTCCTGCAATTCAATCAGAGTCGTCATCGNCCCACCGCCGCGTAAAC
CGGTGCGATAGCCTTTGCCACCTGACGGCACATTTAACTGTAGGGAGA
ACAGAGCTAACGCAGAACAATGAGAGCATACGTGTTCAGTCACGCCAC
GCTTAATAAAGTGGTCTTTATTAAACTTCGTTGTTTGAGCGCCGGGAA
TCTCAGGCAGTAGCGAAGCGACCTGAACTTTATCGCCCATGAGCACCT
CGAAATCCTGCATAAATGAAGGTGAATCTGGGCCAAACTGGAAAGCGT
GTTCTAATGACAGCAATGCTTCCCGTAGCTTTTCAGCTTCCAGCCCGT
CTTCCCAGATATCATCCCAACGACGATAATCTTTTGGCGCGAAACTGC
TTTGTAGTAACCCCAGCAAAAACTGCCATGCCGCCCCCTGGAGATCTG
CCCGCGGCGCAGCGATATCGACAACATTTTCATCCGCCAGATCGACTG
GCGCCAGCTTGCCTGTTGTTCCGTCTTTAAAACGAACGGGCAACCACG
GGGTTGTCAGAAGTGAAAACGAGTTCATATGTATCCTCTCGTAAAAAA
GACCATCCCTGGTCGGTTGTCCATCATTCCATCCTTTTCGGTGTATCA
ACTATTCAGAGAGTCCTGTCGCAGGTATCTCAATCAACCTTGCCAATC
AATCCCTCCCTGGCCGAATACCCGCAACTTTCGTCATCAGTGACTAAA
ATCACGTTTGCCATTTCCGGATCTTGCCGCTGTTCAATGCACCACTGC
CTGAACGCTTCCCCTTCCAGTAAAGAAAACTCATCCCGATGTTTTTTC
CACCAGCTTCGACGCACTCTGACAACGCTCATTTCCCATGCGTGAGCA
CCGGTGGCATAAGGCTTCACCACACCGGCAATACAGGTAGCCAGCCAC
AGGGAAACAGATTCCTCAGCCAGACGTGTCGACAGCTTTTCCGGAAGG
TAATCGTTGATATTGGCGGCATAGCCAGGCTTGAAGTTCAGGACAAAC
TTTTTAGCCATTGCGCGATCGCAGTAATATTTGCCCACTTGCTCCTGC
TCGCTGCGGGCAAATCCTTCCGGCATTACCACGTCCTCACCGTAGACT
GATTCAATAAGAAGGCGGGCTGCGTGTGGCATTTGAATAGCGCCTTGC
TCACGCAGTACACGCTGCGTCAGCCAGATTCGTCCATGATCGGGATAG
ACATATGCACTGTTACGCATGGCACTGCCGAACCATTCGTCACCAGGA
GCGTCGTCCCAGACGGGGGCCAGAATCAGCAATTCAGGAGGGGAACGC
TCGTCTTTTCCGTCACGCTTTAACTGACCATTAATATCGCGGATATGC
CGCTGTAATCGCCCCGCTCGCTGAATCAGCAAATCAACAGGGGCCAGG
TCGGAGATCATTTCGTCCAGGTCACAATCAACGCTCTGCTCTAAGACC
TGAGTACAAATGAGGACTTTTCCGGCACGCTGTGAACCGTCTTCTTTA
CCAAAGCGTGCCAGCGTCTCCATTTCAATTCGCTGGCGATCGCTAAAA
GCAAAGCGGCTATGAAAGAGTGAAAGGCTGGAAGCGGGAATGACGCCG
CGGGCAAGCAGCTGACGATGAACCTTAATAGCGTCATCGACAGAATTC
CGGATCCAGGCGATGCATTTTCCCTGACTTACCGCCGATTCGATACGC
GCAATACTCTCTTGTTCACTATGAAGCCAACCCACGCTGACGCTACGC
TCAACGTCTTTGCGCGTCGCTACCCGGTGTGAGTTCACATCGGATTTC
GTGACATGCGTCAGCCAGGGGTAATCATCCTTTTCAAGGAACGGAGCT
TCTTGCTGGCCCTCTGTGCCACGCGCAAAGGCGGCGACGAGTTTGTCG
CGCTGCTGTTGGGATAACGTAGCAGAAAGCAAAATGACGCAGTTTCCG
CCACGCGCCTGCCGCTCGATCAGCCCTTCAAGAATGCACGACATGTAA
GCATCACAGGCATGGATCTCATCAGCCAGCAGGATTTTGTTACTCAAC
CCCAGAAGCCGCAGATTATTATGTTTAAACGGCATCACTGCCATCATC
GCCTGATCCAGCGTGCCGACGCCAATTTCAGCCAGTAGCGCCTTCTTG
TTACTGTTGGCAAACCAGGCCGCACATCCCTGACTGAATGTTTGTTCA
TCCGGTTCTTCTGACCCGACTAAATCACCGGACCAGAGTGATTCATTG
AAGCGGTCCATTAATGTGCGGGCACTGTGTGCCAGCACCAAGCTGGGG
CGGGACTCTGGCGAATAGAAAGCAAGCCAGGTTTTGACCAGCCGATCG
TACATGGCATTGGCCGTTGCCATTGTTGGCAGGCCAAAAAACAAACCC
TGTGCTTTCCTCGCAGCCATCAACCTGTGCGCCAGGATAAGCGCCGCT
TCTGTTTTACCTGCGCCAGTCACGTCTTCCAGAATAAATAACTGTGGC
CCTGGCTGGCTGATATCCAGATCCAGTACCTTTTGCTGTAATGGTGTC
GGGTGCTCAATAAAAGGAAACAGCGTATTAATTCCGGTGAAAGGTGCG
GTTTCTGCTTTTGGAGGAAAGACGGTTAAGGCGTTTTGAGCCTGAACT
AAAGTTTTCTGCCAGTAATCTTTAATATCCATTGGGTGTGCGACGCGT
GGAAAAAATCGCGTTGACGAACCCGTCCAGTCTGCGAGTACGACTGTT
GCAGAGATATACCAGGAAAGTTGTTTTAAAAGTTCAACGCCCTCGTCA
TCATCCCAGAATGTGGGAATCTCTATGAGCGGAAACAGTGCCTTGATT
TCAAGGAGAAAATCTCGCGCGGCAGCTTTGTCTTCAGGCAGAAAATTA
TCCAGCTCATCAATACGGTCAGGTGGTCGACCATGATGCCCGGTAGTT
ATGGACATCCACATCTCTATTACACGTGTAAGTTTACGAGAAGAGAGT
GAAGATGAAGGAAGCAACTCCTCACATTCACTTAAATAATAATTCCAC
AGCCAGTAACCCAGCGTTGAATGAGAGATCTTTTCGTAATTCTTTCTG
GAACCTTCCGGAATCTTGAGTTCAGGGGCCAGGTAAAGTTGCTGAAAA
GAGCGGGCAAATTTTCCAATATCGTGCCAGCACAGCAACCAAGCGAAA
AATTGAGCCGCCTGTTCCTTGTCAGAAATCCCTAATTGACGAAAGTAA
TCAGCCAGCCCGAAGCAATTTCTTTTAACCATTAAATAGCCCATTGCG
GCCACATCCAGCGAATGCCAGCAAAGAAGGTGATAGCCGTCGCCACCC
TCTTTCTCGCCACGTCGGGTTTTTCCCCAGAAATCAAAGAAAGTCACA
ATATTTTTATCCTTCAGTAAACTTAAAGGATATTTACGCATATTTTAA
AAATTATCTGTGATATATATCAGCCAATAAACATTTATATTATGAATA
AATTAATGATTTTCATTTGAAATTCATAATGATAAATAGAGACTATAT
ATTCACATAAANNA (SEQ ID NO: 1461)

[0123] While the foregoing specification teaches the principles of the present claimed embodiments, with examples provided for the purpose of illustration, it will be appreciated by one skilled in the art from reading this disclosure that various changes in form and detail can be made without departing from the spirit and scope of the invention. These methods are not limited to any particular type of nucleic acid sample: plant, bacterial, animal (including human) total genome DNA, RNA, cDNA and the like may be analyzed using some or all of the methods disclosed in this invention. This invention provides a powerful tool for analysis of complex nucleic acid samples. From experiment design to detection of E. coli O55:H7 assay results, the above invention provides for fast, efficient and inexpensive methods for detection of pathogenic E. coli O55:H7.

[0124] All publications and patent applications cited herein are incorporated by reference in their entirety for all purposes to the same extent as if each individual publication or patent application were specifically and individually indicated to be so incorporated by reference. Although the present invention has been described in some detail by way of illustration and example for purposes of clarity and understanding, it will be apparent that certain changes and modifications may be practiced within the scope of the appended claims.

### REFERENCES

[0125] The following references, to the extent that they provide exemplary procedural or other details supplementary to those set forth herein, are specifically incorporated herein by reference:
[0126] 1: Leopold S R, Magrini V, Holt N J, Shaikh N, Mardis E R, Cagno J, Ogura Y, Iguchi A, Hayashi T, Mellmann A, Karch H, Besser T E, Sawyer S A, Whittam T S, Tarr P I. A precise reconstruction of the emergence and constrained radiations of Escherichia coli 0157 portrayed by backbone concatenomic analysis. Proc Natl Acad Sci USA. 2009 May 26; 106(21):8713-8.
[0127] 2: Wick L M, Qi W, Lacher D W, Whittam T S. Evolution of genomic content in the stepwise emergence of Escherichia coli O157:H7. J. Bacteriol. 2005 March; 187(5): 1783-91.
[0128] 3: Zhang Y, Laing C, Steele M, Ziebell K, Johnson R, Benson A K, Taboada E, Gannon V P. Genome evolution in major Escherichia coli O157:H7 lineages. BMC Genomics. 2007 May 16; 8:121.
[0129] 4: Iguchi A, Ooka T, Ogura Y, Asadulghani, Nakayama K, Frankel G, Hayashi T. Genomic comparison of the O-antigen biosynthesis gene clusters of Escherichia coli O55 strains belonging to three distinct lineages. Microbiology. 2008 February; 154(Pt 2):559-70.
[0130] 5: Tarr P I, Schoening L M, Yea Y L, Ward T R, Jelacic S, Whittam T S. Acquisition of the rfb-gnd cluster in evolution of Escherichia coli O55 and 0157. J. Bacteriol. 2000 November; 182(21):6183-91.
[0131] 6: Feng P C, Monday S R, Lacher D W, Allison L, Siitonen A, Keys C, Eklund M, Nagano H, Karch H, Keen J, Whittam T S. Genetic diversity among clonal lineages within Escherichia coli O157:H7 stepwise evolutionary model. Emerg Infect Dis. 2007 November; 13(11):1701-6.
[0132] 7: Laing C R, Buchanan C, Taboada E N, Zhang Y, Karmali M A, Thomas J E, Gannon V P. In silico genomic analyses reveal three distinct lineages of Escherichia coli O157:H7, one of which is associated with hyper-virulence. BMC Genomics. 2009 Jun. 29; 10:287.
[0133] 8. Perna, N. T., et al., (2001) Nature 409(25):529-533

### Patent Applications

[0134] Polymorphic loci that differentiate Escherichia coli O157:H7 from other strains. US 2002/0150902 A1.
[0135] Detection of pathogenic bacteria. US 2004/0110251 A1.

The application's sequence listing, which the Patent Office published only in electronic form, follows.

SEQUENCE LISTING (1695 sequences)

SEQ ID NO: 1 - DNA, 149 bp, Escherichia coli
  Strain O55:H7
aaaagtgctcatcgtaaaatatcctctatactggtaagtccttcattatttagccagatcatggcgtcatccggcaacttgctgtctggtttggcgtttttgagagaggaactcagtcgcttaatccacattgtcacctcagtaatgcg

SEQ ID NO: 2 - DNA, 764 bp, Escherichia coli
  Strain O55:H7
cacaacttagcatcgaaggcctattgttttcgacaggaggccatcgaaatgacactatggtaccgtctttacccaccgccttctgctaagtttaggaatacaagatgttgctgccgttaaaaaatagtcgtaatttctattagaatttgggcaatataaccagcacatagataagggagtcgttttatgcacgaactatttgtgctggttttgagcacctgtgctagcctcagcaatatgtcaggttgttcagtggacgtagtgaatgtcaacaccacaaaagagccggtaaacgtcttttatagcaggaaagactgcgaagaaagcatgaaaaacattatgctaaatcatgctctataccatgaagtatcaggcagagagccatatatggcaaagtgcgaacaagtatttgtctcaaaaagtttaatgaaataattggccaaaaacgacatataacaaactcttataggagcttaacgtggaagattacttagtttttggtttaggttatgaaggcgatataaagaacgatgaagcagggcttgataagataagcgtggtaacgaaatcggtagtgcgttctaccaattccaatgaaccagtggtttaccaagtgactgagtttaaagaatttaatgttgtgagacatcaagcgtttgatagtgaatactacaacatagcattcgatgtcttaccatcccgcgtccgtattgatgctgcaatccgtaaatatcaccccaagaaatcctcctcagcttagtaag

SEQ ID NO: 3 - DNA, 60 bp, Escherichia coli
  Strain O55:H7
tgttgccctggccatccaggaaaaatatggtttcccaccgctatataatgatttccgcaa

SEQ ID NO: 4 - DNA, 61 bp, Escherichia coli
  Strain O55:H7
caagctacctgtcgactatcccgtaaaatacacggaccttttcactcacatacacgccaat

SEQ ID NO: 5 - DNA, 90 bp, Escherichia coli
  Strain O55:H7
tttatacacggatcctgtgtgccgtggaccgccggtttatccccgctggcgcggggaacaccacaaaccgcccatcttcccgattactgc

SEQ ID NO: 6 - DNA, 29 bp, Artificial Sequence
  Description of Artificial Sequence: Synthetic primer
ggtaagtccttcattatttagccagatca

SEQ ID NO: 7 - DNA, 22 bp, Artificial Sequence
  Description of Artificial Sequence: Synthetic primer
agcgactgagttcctctctcaa

SEQ ID NO: 8 - DNA, 18 bp, Artificial Sequence
  Description of Artificial Sequence: Synthetic primer
gatcctgtgtgccgtgga

SEQ ID NO: 9 - DNA, 18 bp, Artificial Sequence
  Description of Artificial Sequence: Synthetic primer
cgggaagatgggcggttt

SEQ ID NO: 10 - DNA, 25 bp, Artificial Sequence
  Description of Artificial Sequence: Synthetic primer
acgaactatttgtgctggttttgag

SEQ ID NO: 11 - DNA, 25 bp, Artificial Sequence
  Description of Artificial Sequence: Synthetic primer
ctcttttgtggtgttgacattcact

SEQ ID NO: 12 - DNA, 25 bp, Artificial Sequence
  Description of Artificial Sequence: Synthetic primer
agtggtttaccaagtgactgagttt

SEQ ID NO: 13 - DNA, 25 bp, Artificial Sequence
  Description of Artificial Sequence: Synthetic primer
gggatggtaagacatcgaatgctat

SEQ ID NO: 14 - DNA, 22 bp, Artificial Sequence
  Description of Artificial Sequence: Synthetic primer
gaaggcctattgttttcgacag

SEQ ID NO: 15 - DNA, 20 bp, Artificial Sequence
  Description of Artificial Sequence: Synthetic primer
agaaggcggtgggtaaagac

SEQ ID NO: 16 - DNA, 25 bp, Artificial Sequence
  Description of Artificial Sequence: Synthetic primer
gcaaagtgcgaacaagtatttgtct

SEQ ID NO: 17 - DNA, 29 bp, Artificial Sequence
  Description of Artificial Sequence: Synthetic primer
actaagtaatcttccacgttaagctccta

SEQ ID NO: 18 - DNA, 25 bp, Artificial Sequence
  Description of Artificial Sequence: Synthetic primer
gaatacaagatgttgctgccgttaa

SEQ ID NO: 19 - DNA, 25 bp, Artificial Sequence
  Description of Artificial Sequence: Synthetic primer
cgtgcataaaacgactcccttatct

SEQ ID NO: 20 - DNA, 29 bp, Artificial Sequence
  Description of Artificial Sequence: Synthetic primer
ggttatgaaggcgatataaagaacgatga

SEQ ID NO: 21 - DNA, 22 bp, Artificial Sequence
  Description of Artificial Sequence: Synthetic primer
cgcactaccgatttcgttacca

SEQ ID NO: 22 - DNA, 25 bp, Artificial Sequence
  Description of Artificial Sequence: Synthetic primer
gaaagactgcgaagaaagcatgaaa

SEQ ID NO: 23 - DNA, 26 bp, Artificial Sequence
  Description of Artificial Sequence: Synthetic primer
catatatggctctctgcctgatactt

SEQ ID NO: 24 - DNA, 17 bp, Artificial Sequence
  Description of Artificial Sequence: Synthetic probe
aagttgccggatgacgc

SEQ ID NO: 25 - DNA, 19 bp, Artificial Sequence
  Description of Artificial Sequence: Synthetic probe
ccggtttatccccgctggc

SEQ ID NO: 26 - DNA, 17 bp, Artificial Sequence
  Description of Artificial Sequence: Synthetic probe
acgtccactgaacaacc

SEQ ID NO: 27 - DNA, 21 bp, Artificial Sequence
  Description of Artificial Sequence: Synthetic probe
aacgcttgatgtctcacaaca

SEQ ID NO: 28 - DNA, 21 bp, Artificial Sequence
  Description of Artificial Sequence: Synthetic probe
tagtgtcatttcgatggcctc

SEQ ID NO: 29 - DNA, 22 bp, Artificial Sequence
  Description of Artificial Sequence: Synthetic probe
ccaaaaacgacatataacaaac

SEQ ID NO: 30 - DNA, 21 bp, Artificial Sequence
  Description of Artificial Sequence: Synthetic probe
tagaatttgggcaatataacc

SEQ ID NO: 31 - DNA, 19 bp, Artificial Sequence
  Description of Artificial Sequence: Synthetic probe
cagggcttgataagataag

SEQ ID NO: 32 - DNA, 22 bp, Artificial Sequence
  Description of Artificial Sequence: Synthetic probe
atggtatagagcatgatttagc

SEQ ID NO: 33 - DNA, 1606 bp, Escherichia coli
  Strain O55:H7
  modified_base (225)..(225): a, c, g or t
  modified_base (1111)..(1112): a, c, g or t
agcttttcattctgactgcaacgggcaatatgtctctgtgtggattaaaaaaagagtctctgacagctgcttctgaactggttacctgccgtgagtaaattaaaattttattgacttaggtcactaaatactttaaccaatataggcatagcgcacagacagataaaaattacagagtacacaacatccatgaaacgcattagcaccaccattaccaccaccatnaccaccaccatcaccattaccattaccacaggtaacggtgcgggctgacgcgtacaggaaacacagaaaaaagcccgcacctgacagtgcgggcttttttttcgaccaaaggtaacgaggtaacaaccatgcgagtgttgaagttcggcggtacatcagtggcaaatgcagaacgttttctgcgggttgccgatattctggaaagcaatgccaggcaggggcaggtggccaccgtcctctctgcccccgccaaaatcaccaaccacctggtggcgatgattgaaaaaaccattagcggccaggatgctttacccaatatcagcgatgccgaacgtatttttgccgaacttctgacgggactcgccgccgcccagccgggattcccgctggcgcaattgaaaactttcgtcgaccaggaatttgcccaaataaaacatgtcctgcatggcattagtttgttagggcagtgcccggatagcattaacgctgcgctgatttgccgtggcgagaaaatgtcgatcgccattatggccggcgtattagaagcgcgcggtcacaacgttaccgttatcgatccggtcgaaaaactgctggcagtggggcattacctcgaatctactgtcgatattgcagagtccacccgccgtattgcggcaagtcgtattccggctgatcacatggtgctgatggcaggtttcaccgccggtaatgaaaaaggcgaactggtggtacttggacgcaacggttccgactactccgcggcggtgctggctgcctgtttacgcgccgattgttgcgagatttggacggacgttgacggggtatatacctgcgacccgcgtcaggtgcccgatgcgaggttgttgaaatcgatgtcctaccaggnngcgatggagctttcctacttcggcgctaaagttcttcacccccgcaccattacccccatcgcccagttccagatcccttgcctgattaaaaataccggaaatcctcaagctccaggtacgctcattggtgccagtcgtgatgaagacgaattaccggtcaagggcatttccaatctgaataatatggcaatgttcagcgtttccggcccggggatgaaaggaatggtcggcatggcggcgcgcgtctttgctgcaatgtcacgcgcccgtatttccgtggtgctgattacgcaatcatcttccgaatacagtatcagtttctgcgttccgcaaagcgactgtgtgcgagctgaacgggcaatgcaggaagagttctacctggaactgaaagaaggcttactggagccgctggcggtgacggaacggctggccattatctcggtggtaggtgatggtatgcgcaccttgcgtgggatctcggcgaaattctttgc

SEQ ID NO: 34 - DNA, 5512 bp, Escherichia coli
  Strain O55:H7
  modified_base (2835)..(2838): a, c, g or t
  modified_base (5011)..(5011): a, c, g or t
aatatcaacattgtcgctattgctcagggatcttctgaacgctcaatctctgtcgtggtaaataacgatgatgcgaccactggcgtgcgcgttactcatcagatgctgttcaataccgatcaggttatcgaagtgtttgtgattggcgtcggtggcgttggcggtgcactgctggtgcaactgaagcgtcagcaaagctggttgaagaataaacatatcgacttacgtgtctgcggtgttgctaactcgaaggctctgctcaccaatgtgcatggcctaaatctggaaaactggcaggaagaactggcgcaagccaaagagccgtttaatctcgggcgcttaattcgcctcgtgaaagaatatcatctgctgaacccggtcattgttgactgcacctccagccaggcagtggcggatcaatatgccgacttcctgcgcgaaggtttccacgttgtcacgccgaacaaaaaggccaacacctcgtcgatggattactaccatctgttgcgtcatgcggctgaaaaatcgcggcgtaaattcctctatgacaccaacgttggggctggattaccggttattgagaacctgcaaaatctgctcaatgctggtgatgaattgatgaagttctccggcattctttcaggttcgctttcttatatcttcggcaagttagacgaaggcatgagtttctccgaggcgactacgctggcgcgggaaatgggttataccgaaccggatccgcgagatgatctttctggtatggatgtagcgcgtaaactattaattctcgctcgtgaaacgggacgtgaactggagctggcggatattgaaattgaacctgtgctgcccgcagagtttaacgctgagggtgatgttgccgcttttatggcgaatctgtcacagctcgacgatctctttgccgcgcgcgtggcgaaggcccgtgatgaaggaaaagttttgcgctatgttggcaatattgatgaagatggcgtctgccgcgtgaagattgccgaagtggatggtaatgatccgctgttcaaagtgaaaaatggcgaaaacgccctggccttttatagccactattatcagccgctgccgttggtgctgcgcggatatggtgcgggcaatgacgttaccgctgccggtgtctttgccgatctgctacgtaccctctcatggaagttaggagtctgacatggttaaagtttatgccccggcttccagtgccaatatgagcgtcgggtttgatgtgctcggggcggcggtgacacccgttgatggtgcattgctcggagatgtagtcacggttgagtcggcagagacattcagtctcaacaacctcggacgctttgccgataagctgccgtcagaaccacgggaaaatatcgtttatcagtgctgggagcgtttttgccaggagctgggcaagcaaattccagtggcgatgactctggaaaagaatatgccgatcggttcgggcttaggctccagcgcctgttcggtggtcgcggcgctgatggcgatgaatgaacactgcggcaagccgcttaatgacccccgtttgctggctttgatgggcgagctggaaggacgaatctccggcagcattcattacgacaacgtggcaccgtgttttcttggtggtatgcagttgatgatcgaagaaaacgacatcatcagccagcaagtgccagggtttgatgagtggctgtgggtgctggcgtatccggggattaaagtctcgacggcagaagcccgggctattttaccggcgcagtatcgccgccaggattgcattgcgcacgggcgacacttggcaggcttcattcacgcctgctattcccgtcagcctgagcttgccgcgaagctgatgaaagatgttatcgcagaaccctaccgtgaacggttactgcctggcttccggcaggcgcggcaggcggtcgcggaaatcggcgcggtagcgagcggtatctccggctccggcccgaccttgtttgctctgtgtgacaagccggataccgcccagcgcgttgccgactggttgggtaagaactacctgcaaaatcaggaaggttttgttcatatttgccggctggatacggcgggcgcacgagtactggaaaactaaatgaaactctacaatcttaaagatcacaatgagcaggtcagctttgcgcaagccgtaacccaggggttgggcaaaaatcaggggctgttttttccgcacgacctgccggaattcagcctgactgaaattgatgagatgctgaagctggattttgtcacccgcagtgcgaagatcctctcggcgtttattggtgatgaaatcccgcaggaaatcctggaagagcgcgtgcgcgcggcgtttgccttcccggctccggtcgccaatgttgaaagcgatgtcggttgtctggaattgttccacgggccaacgctggcatttaaagatttcggcggtcgctttatggcacaaatgctgacccatattgcgggcgataagccagtgaccattctgaccgcgacctccggtgataccggagcggcagtggctcatgctttctacggtttaccgaatgtgaaagtggttatcctttatccacgaggcaaaatcagtccactgcaagaaaaactgttctgtacattgggcggcaatatcgaaactgttgccatcgacggcgatttcgatgcctgtcaggcgctggtgaagcaggcgtttgatgatgaagagctgaaagtggcgctggggttaaactcagctaactcgattaacattagccggttgctggcgcagatttgctactactttgaagcagttgcgcagctgccgcaggnnnngcgcaaccagctggttgtctcggtgccaagcggaaacttcggcgatttgacggcgggtctgctggcgaagtcactcggtctgccggtgaaacgttttattgctgcgaccaacgtgaacgataccgtgccacgtttcctgcatgacggtcagtggtcacccaaagcgactcaggcgacgttatccaacgcgatggacgtgagtcagccgaacaactggccgcgtgtggaagagttgttccgccgcaaaatctggcaactgaaagagctgggttatgccgccgtggatgatgaaaccacgcaacagacaatgcgtgagttaaaagaactgggctacacttcggagccgcacgctgccgtagcgtatcgtgcgctgcgtgaccagttgaatccaggcgaatatggcttgttcctcggcaccgcgcatccggcgaaatttaaagagagcgtggaagcgattctcggtgaaacgttggatctgccaaaagagctggcagaacgtgccgatttacccttgctttcgcataatctgcccgccgattttgctgcgttgcgtaaattgatgatgaatcatcagtaacatctattcattatctcaatcaggccgggtttgcttttatgcagcccggcttttttgtgaagaaaatatggagagaaacgacagggaaaaaggagaaattctcaataaatgcggtaacttagagattaggattgcggagaataacaaccgccgctctcatcgcgtaatctccggatatcgacccataacgggcaatgataaaaggagtaacctgtgaaaaagatgcaatctatcgtactcgcactttccctggttctggtcgctcccatggcaacgcaggctgcggaaattacgttagtcccgtcagtaaaattacagataggcgatcgtgataatcgcggttattactgggatggcggtcactggcgcgaccacggctggtggaaacaacattatgaatggcgaggcaatcgctggcacccacacggaccgccgccaccgccgcgtcaccataagaaagctcatcatgatcatcacggcggtcatggtccaggcaaacatcaccgctaaatgacaaatgccgggtaacaatccggcattcagcgcctgatgcgacgctggcgcgtcttatcaggcctacgtgaattctgcaatatattgaatctgcatgcttttgtaggccggataaggcgttcacgccgcatccggcattgactacaaacttaacgctgctcgtagcgtttaaacaccagttcgccattgctggaggaagcttcatcaaagaagtaaccttcgctattaaaaccagtcagttgctctggtttggtcagccgattttcaataatgaaacgactcatcagaccgcgtgctttcttagcgtagaagctgattatcttaaatttgccgttcttctcatcgaggaacaccggcttgataatctcggcattcaatttcttcggcttcaccgatttaaaatactcatctgacgccagattaatcaccacattatcgccttgtgctgcgagcgcctcgttcagcttgttggtgatgatatctccccagaattgatacagatctttccctcgggcattctcaagacggatccccatttccagacgataaggctgcattaaatcgagcgggcggagtacgccatacaagccggaaagcattcgcaaatgctgttgggcaaaatcgaaatcgtcttcgctgaaggtttcggcctgcaagccggtgtagacatcacctttaaacgccagaatcgcctggcgggcattctccggcgtgaaatctggctgccagtcatgaaagcgagcggcgttgatacctgccagtttgtcgctgatacgcatcagcgtgctaatctgcggaggcgtcagtttccgcgcttcatggatcaactgctgggaattgtctaacagctccggcagtgtatatcgcgtggtggtcaacgggctttggtaatcaagcgttttcgcaggtgaaataagaatcagcatatccagtccttgcaggaaatttatgccgactttagcaaaaaaagagaatgagttgatcgatagttgtgattactcctgcgaaacatcatcccacgcgtcccgagaaagctggcgaccgatatccggataacgcaacggatcaaacaccgggcgcacnccgagtttacgctggcgtagataatcactggcaatggtatgaaccacaggcgagagcagtaatatggcagtcaaattggtaatagccatgcaggccattatgatatctgccagttgccacatcagcggaagacttagcaaggtgccgccgatgaccgttgcgaaggtgcagatccgcaaacaccagatcgctttagggttgttcaggcgtaaaaagaagagattgttttcggcataaatgtagttggcaacgatggagctgaaggcaaacagaataaccacgagggtaacaaattcagcaccccaggaacccattagcacccgcatcgccttctggataagctgaataccttccagcggcatgtaggttgtgccgttacccgccagtaatatcagcatggcgcttgccgtacagatgaccagggtgtcgataaaaatgccaatcatctggacaattccttgcgctgccggatgcggaggccaggacgccgctgccgctgcc

SEQ ID NO: 35 - DNA, 11640 bp, Escherichia coli
  Strain O55:H7
  modified_base (4575)..(4575): a, c, g or t
  modified_base (4868)..(4870): a, c, g or t
  modified_base (4873)..(4874): a, c, g or t
  modified_base (6445)..(6446): a, c, g or t
  modified_base (8391)..(8391): a, c, g or t
  modified_base (8679)..(8682): a, c, g or t
tggcgtcgaccccattcccgcctcattggaaaacatactgcgctgaaaaccgttagtaatcgcctggcttaaggtatatcccgccgcgccgcctgccgcttcctgccagccaaaagcactctcaaaaatagaccaaatgacgtggggaagttgcccgatatttattacgcaaatcaccaggctggtcagtacccagattatcgccatcaacgggacaaacccctgcatgagccgggcgacgccatgaagaccgcgaatgattgccagcagagcaaagacagcaagaataatgcctgtcaccagcgggggaaaatcaaaagaaaaactcagagctcgggcaacagcgtttgcctgaactccgctgaaaattatgccgtaggcgatgagcaaaaagacggcgaacagaacgcccatccagcgcatccccagcccgcgcgccatataccatgccggtccgccacgaaactgcccattgacgtcacgttctttataaagttgtgcaagggaacattcggcaaacgaggtcgccatgccgataaacgcggcaacccacatccaaaagacggctccaggtccaccggcggtaatagccagcgcaacgccggccaggttgccgctacccacgcgcgccgcaagactggtacacaatgactgaaatgaggttaaaccgcctggctgtggatgaatgctatttttaagacttttgccaaactggcggatgtagcgaaactgcacaaatccggtgcgaaaagtgaaccaacaacctgcgccgaagagcaggtaaatcattaccgatccccaaaggacgctgttaataaaggagaaaaaatctggcatgcatatccctcttattgccggtcgcgatgactttcctgtgtaaacgttaccaattgtttaagaagtatatacgctacgaggtacttgataacttctgcgtagcatacatgaggttttgtttaaaaatggcgggcgatatcaacgcagtgtcagaaatccgaaacagtctcgcctggcgataaccgtcttgtcggcggttgcgctgacgttgcgtcgtgatatcatcagggcagaccggttacatccccctaacaagctgtttaaagagaaatactatcatgacggacaaattgacctcccttcgtcagtacaccaccgtagtggccgacactggggacatcgcggcaatgaagctgtatcaaccgcaggatgccacaaccaacccttctctcattcttaacgcagcgcagattccggaataccgtaagttgattgatgatgctgtcgcctgggcgaaacagcagagcaacgatcgcgcgcagcagatcgtggacgcgactgacaaactggcagtaaatattggtctggaaatcctgaaactggttccgggccgtatctcaactgaagttgatgcgcgtctttcctatgacacagaagcgtcaattgcgaaagcaaaacgcctgatcaaactctacaacgatgcaggtattagcaacgatcgtattctgatcaaactggcttctacctggcagggtatccgtgctgcggaacagctggaaaaagaaggtatcaactgtaacctgaccctgctgttctccttcgctcaggctcgtgcttgtgcggaagcgggcgtgttcctgatctcgccgtttgttggccgtattcttgactggtacaaagcgaataccgataagaaagagtacgctccggcagaagatccgggcgtggtttctgtatctgaaatctaccagtactacaaagagcacggttatgaaaccgtggttatgggcgcaagcttccgtaacatcggcgaaattctggaactggcaggctgcgaccgtctgaccatcgcaccggcactgctgaaagagctggctgagagcgaaggggctatcgaacgtaaactgtcttacaccggcgaagtgaaagcgcgtccggcgcgtatcactgagtccgagttcctgtggcagcacaaccaggatccaatggcagtagataaactggcggaaggtatccgtaagtttgctattgaccaggaaaaactggaaaaaatgatcggcgatctgctgtaatcattcttagcgtgaccgggaagtcggtcacgctacctcttctgaagcctgtctgtcactcccttcgcagtgtatcattctgtttaacgagactgtttaaacggaaaaatcttgatgaatactttacgtattggcttagtttccatctctgatcgcgcatccagcggcgtttatcaggataaaggtatccctgcgctggaagaatggctgacatcggcgctaaccacgccgtttgaactggaaacccgcttaatccccgatgagcaggcgatcatcgagcaaacgttgtgtgagctggtggatgaaatgagttgccatctggtgctcaccacgggcggaactggcccggcgcgtcgtgacgtaacgcccgatgcgacgctggcagtagcggaccgcgagatgcctggctttggtgaacagatgcgccagatcagcctgcattttgtaccaactgcgatcctttcgcgtcaggtgggtgtgattcgcaaacaggcgctgatccttaacttacccggtcagccgaagtctattaaagagacgctggaaggtgtgaaggacgctgagggtaacgttgtggtacacggtatttttgccagcgtaccgtactgcattcagttgctggaagggccatacgttgaaacggcaccagaagtggttgctgcattcagaccgaagagtgcaagacgcgacgttagcgaataaaaaaatccccccgagcggggggatctcaagacaattagtgggattcaccaatcggcagaacggtgcgaccaaactgctcgttcagtacttcacccatcgccagatagattgcgctggcaccgcagatcagaccaatccagccggcaaagtggatgattgcggcgttaccggcaatgttaccgatcgccagcagggcaaacagcacggtcaggctaaagaaaacgaattgcagaacgcgtgcgcctttcagcgtgccgaagaacataaacagcgtaaatacgccccacagacccaggtagacaccaaggaactgtgcatttggcgcatcggtcagacccagtttcggcatcagcagaatcgcaaccagcgtcagccagaaagaaccgtaagaggtgaatgcggttaaaccgaaagtgttgccttttttgtactccagcagaccagcaaaaatttgcgcgatgccgccgtagaaaatgcccatggcaagaataataccgtccagagcgaaataacctacgttgtgcaggttaagcagaatggtggtcatgccgaagcccatcaggcccagcggtgccggattagccaacttagtgttgcccataattcctcaaaaatcatcatcgaatgaatggtgaaataatttccctgaataactgtagtgttttcagggcgcggcataataatcagccagtggggcagtgtctacgatcttttgaggggaaaatgaaaattttccccggtttccggtatcagacctgagtggcgctaaccatccggcgcaggcaggcgatttgcagtacggctggaatcgtcacgcgataggagctgccgctgaccgctttaaccccatttagtgccgcgcctacagggcctcccagccccgcgccgcgcagcaaaccatgcccaagtacgctcattgctgcgtgggtgcgtaaaatgcgggtcagttggctggaaagcagatgcgacacgccttttgccaataatttgtctttcatcagcagcggcagcagctcttccagctcattcaccctggcatcgaccgcgtgcagaaactcctgcttatgttcctcgtccattttcttccaggtattacgcagaaattgttccagtaactgttgctcaatttcaaacgtagacatctctttgtcggctttcagcttcaatcgttttgaaacatcgagcaaaatggcccgatacaatttaccgtgtccgcgcagtttgttggcgatactatcgccaccaaaatgctgtaattctccagcaatcagctgccagttgcggcgatgttgctcgggatgtccttccatcgatttaaacagttcgttgcgcatcagtacgctggagaggcgagttttgcctttttcattatgggtgagcagccgggcgaaatttgctaactgttcctcactacaatgctggagaaaatccagatctgaatcattcaggtaattaacattcattttttgtggcttctatattctggcgttagtcgtcgccgataattttcagcgtggccatatccgatgagttcaccgtatgaccggaaaaggtgatttttgagacgcagcgtttattgtcgttatcgctgttaatgttgatccagtcagtggtttgcccttcttttatttctgaaggaatattcaggctctgactggcgctacgggcggctttgaaataaaccgatgcaccgcttaactgtaaatcgccatggtcggcagagagttgtatgcgtttcacaatgcgacaaacaggaagtttcagcgccagatcgttggtttcgttacgcggcattgcaatgacnccgaggagtttatggtcgtttgcctgcgccgtgcagcacagcatcaggctaatcgccaggctggcggaaatcgtaaaaacggatttcataaggattctcttagtgggaagaggtagggggatgaatacccactagtttactgctgataaagagaagattcaggcacgtaatcttttctttttattacaattttttgatgaataccttgactgcgattcattctttatatgaataaaattgctgtcaattttacgtcttgtcctgccatatcgcgaaatttctgcgcaaaagcnnnaannatttttgcatctcccccttgatgacgtgggttacgaccccatttagtagtcaaccgcagtgagtgagtctgcaaaaaaatgaaattgggcagttgaaaccagacgtttcgcccctattacagactcacaaccacatgatgaccgaatatatagtggagacgtttagatgggtaaaataattggtatcgacctgggtactaccaactcttgtgtagcgattatggatggcaccactcctcgtgtgctggagaacgccgaaggcgatcgcaccacgccttctatcattgcctatacccaggatggtgaaactctggttggtcagccggctaaacgtcaggcagtgacgaacccgcaaaacaccctgtttgcgattaaacgcctgattggccgccgcttccaggacgaagaagtacagcgtgatgtttccatcatgccgttcaaaattattgctgctgataacggcgacgcatgggtcgaagttaaaggccagaaaatggcaccgccgcagatttctgctgaagtgctgaaaaaaatgaagaaaaccgctgaagattacctgggtgaaccggtaactgaagctgttatcaccgtaccggcatactttaacgatgctcagcgtcaggcaaccaaagacgcaggccgtatcgctggtctggaagtaaaacgtatcatcaacgaaccgaccgcagctgcgctggcttacggtctggacaaaggtactggcaaccgtactatcgcggtttatgacttgggtggtggtactttcgatatttctattatcgaaatcgacgaagttgacggcgaaaaaaccttcgaagttctggcaaccaacggtgatacccacctgggtggtgaagacttcgacagccgtctgatcaactatctggttgaagaattcaagaaagatcagggcattgacctgcgcaacgatccgctggcaatgcagcgcctgaaagaagcggcagaaaaagcgaaaatcgaactgtcttccgctcagcagaccgacgttaacctgccgtacatcactgcagacgcgaccggtccgaaacacatgaacatcaaagtgactcgtgcgaaactggaaagcttggttgaagatctggttaaccgttccatcgagccgctgaaagttgcgctgcaggacgctggcctgtccgtatctgatatcgacgacgttatcctcgttggtggtcagactcgtatgccaatggttcagaagaaagttgctgagttctttggtaaagagccgcgtaaagacgttaacccggacgaagctgtagcaatcggtgctgctgttcagggtggtgttctgactggtgacgtaaaagacgtactgctgctggatgttaccccgctgtctctgggtatcgaaaccatgggcggtgtgatgacgacgctgatcgcgaaaaacaccactatcccgaccaagcacagccaggtgttctctaccgctgaagacaaccagtctgcggtaaccatccatgtgctgcagggtgaacgtaaacgtgcggctgacaacaaatctctgggtcagttcaacctggatggtatcaacccggcaccgcgcggcnngccgcagatcgaagttaccttcgatatcgatgctgacggtatcctgcacgtttccgcgaaagataaaaacagcggtaaagagcagaagatcaccatcaaggcgtcttctggtctgaacgaagatgaaatccagaaaatggtacgcgacgccgaagctaacgccgaagctgaccgtaagtttgaagagctggtacagactcgcaaccagggcgaccatctgctgcacagcacccgtaagcaggttgaagaagcaggcgacaaactgccggctgacgacaaaactgctatcgagtctgcgctgactgcactggaaactgctctgaaaggtgaagacaaagccgctatcgaagcgaaaatgcaggaactggcacaggtttcccagaaactgatggaaatcgcccagcagcaacatgcccagcagcagactgccggtgctgatgcttctgcaaacaacgcgaaagatgacgatgttgtcgacgctgaatttgaagaagtcaaagacaaaaaataatcgccctataaacgggtaattatactgacacgggcgaaggggaatttcctctccgcccgtgcattcatctaggggcaatttaaaaaagatggctaagcaagattattacgagattttaggcgtttccaaaacagcggaagagcgtgaaatcaaaaaggcctacaaacgcctggccatgaaataccacccggaccgtaaccagggtgacaaagaggccgaggcgaaatttaaagagatcaaggaagcttatgaagttctgaccgactcgcaaaaacgtgcggcatacgatcagtatggtcatgctgcgtttgagcaaggtggcatgggcggcggcggttttggcggcggcgcagacttcagcgatatttttggtgacgttttcggcgatatttttggcggcggacgtggtcgtcaacgtgcggcgcgcggtgctgatttacgctataacatggagctcaccctcgaagaagctgtacgtggcgtgaccaaagagatccgcattccgactctggaagagtgtgacgtttgccacggtagcggtgcaaaaccaggtacacagccgcagacctgtccgacctgtcatggttctggtcaggtgcagatgcgccagggtttctttgccgtgcagcagacctgtccacactgtcagggccgcggtacgctgatcaaagatccgtgcaacaaatgtcatggtcatggtcgtgttgagcgcagcaaaacgctgtccgttaaaatcccggcaggggtggacactggagaccgcatccgtcttgcgggcgaaggtgaagcgggtgaacacggcgcaccggcaggcgatctgtacgttcaggttcaggttaaacagcacccgattttcgagcgtgaaggcaacaacctgtattgcgaagtcccgatcaacttcgctatggcggcgctgggtggtgaaatcgaagtaccgacccttgatggtcgcgtcaaactgaaagtgcctggcgaaacccagaccggtaagctattccgtatgcgcggtaaaggcgtcaagtctgtccgcggtggcgcacagggtgatttgctgtgccgcgttgtcgtcgaaacaccggtaggcctgaacgagaagcagaaacagctgctgcaagagctgcaagaaagcttcggtggtccaaccggcgagcacaacagcccgcgctcaaagagcttctttgatggtgtgaagaagttttttgacgacctgacccgctaacctccccaaaagcctgcccgtgggcaggcctgggtaaaaatagggtgcgttgaagatatgcgagcacctgtaaagtggcggggatcactccccgccgttgctcttactcggattcgtaagccgtgaaaacagcaacctccgtctggccagttcggatgtgaacctcacagaggtcttttctcgttaccagcgccgccactacggcggtgatacanatgacgatcagggcgacaatcatcaccttatgctgcttcattgctctcttctccttgaccttacggtcagtaagaggcactctacatgtgttcagcatatagggggcctcgggttgatggtaaaatatcactcggggcttttctctatctgccgttcagctaatgcctgagacagacagcctcaagcacccgccgctattatatcgctctctttaacccattctgttttatcgattctaatccggaagacgcctcgcatttttatggcgtaattttttaatgatttannnntttaactttaatttatctcttcatcgcaattattgacgacaagctggattatttttgaaatattggcctaacaaacatcgccgactgacaacaaattaattattacttttcctaattaatccctcagaaatcctcaccttaagctatgattatcagggcttagggtcacccgtcagcgcttacagccgtcaaaaacgcatctcaccgctgatggcgcaaattcttctatagatcgtaaaaaacgaattattcctacactataatctgattttaacgatgattcgtgcggggtaaaatagtaaaaacgatctattcacctgaaagagaaataaaaagtgaaacatctgcatcgattctttagcagtgatgcctcgggaggcattattcttatcattgccgctatcctggcgatgatgatggccaacagcggcgcaaccagtggatggtatcacgactttctggagacgccggttcagctccgggttggttcactcgaaatcaacaaaaacatgctgttatggataaatgacgcgctgatggcggtatttttcctgttagtcggtctggaagttaaacgtgaactgatgcaaggatcgctagccagcttacgccaggccgcatttccagttatcgctgctattggtgggatgattgtgccggcattactctatctggcctttaactatgccgatccgattacccgcgaagggtgggcgatcccggcggctactgacattgcctttgcacttggtgtgctgacgctattgggaagtcgtgttccgttagcgctgaagatctttttgatggctctggctattatcgacgatcttggggccatcattatcatcgcattgttctacactaatgacttatcgatggcctctcttggcgtcgcggctgtagcaattgctgtactcgcggtattgaatctgtgtggtgtacgccgcacgggcgtctatattctggttggcgtagtgttgtggactgcagtgttgaaatcgggggttcacgcaaccctggcgggggtaattgtcggcttctttattcctttgaaagagaagcatgggcgttctccagcgaagcgactggagcatgtgttgcacccgtgggtggcgtatctgattttaccactgtttgcatttgctaatgctggcgtttcactgcaaggcgtcacgctggatggcttgacctccattctgccattggggatcatcgctggcttgctgattggcaaaccgctggggattagtctgttctgctggttggcgctgcgtttgaaactggcgcatctgcctgagggaacgacttatcagcaaattatggcggtggggatcctgtgcggtatcggttttactatgtctatctttattgccagcctggcctttggtagcgtagatccagaactgattaactgggcgaaactcggtatcctggtcggttctatctcttcggcggtaattggatacagctggttacgcgttcgtttgcgtccatcagtttgacaggacggtttaccggggagccataaacggctcccttttcattgttatcagggagagaaatgagcatgtctcatatcaattacaaccacttgtattacttctggcatgtttataaagaaggttctgtggttggcgcagcggaggcgctttatttaacaccacaaaccattaccggacagattcgggcgctggaagagcgcctgcaaggcaaattatttaagcgcaagggacgtggtctcgagcccagcgagctgggggagctggtctatcgctatgccgataaaatgttcaccttgagccaggaaatgctggatatcgtgaactatcgcaaagaatccaatttattgtttgacgttggcgtggctgatgcactttccaaacgtctggtcagtagcgtgctgaatgctgcagtagtagaaggcgagccgattcatcttcgctgcttcgaatccacccacgaaatgctgctggagcaattaagccagcataaactggatatgatcatttccgactgtccgatagattctacgcagcaggaaggcctgttctccgtgagaattggcgaatgtggcgtgagtttctggtgtacaaatccaccgccggaaaaaccgttcccagcttgtcttgaagaacggcggcttttgattcctgggcgacgttcaatgttagggcgcaaattacttaactggtttaactcccagggattaaacgtagaaatccttggcgagtttgatgatgccgctttgatgaaagcttttggtgcgatgcacaatgcaatcttcgttgccccaacgctttatgcatatgacttttatgccgataaaactgtcgtagaaattggtcgcgtcgagaatgtgatggaagagtaccatgctatttttgctgagcggatgattcagcacccggcggtacagcgaatctgcaatacggattattctgcgctttttagtccagcggtgcgttaatcggcagctcccccaaagttaaggtgggggagatagattagttgtacattaccacgattttgactcggctcattatttgcccgcttgagacattgtttccatatgtacgcgggcgaataaatagaggaatctgattacttccttcatggggatgctgaaaagagtagtaattgcttttaccatactggatttcattcgtaccatcattggagagttgaaagcctatttgacccgcaccgtcctcactgttttctaactcattttttaatatgctggttcctgactcctgtatcgtcactggttcaaagtaatattcaacgtcactgggttcaaaaactaattcaccttgctcgccctggatgcagtcaaatcttatatgatgaaactgataattttcattattgatacgagacagtacaaatcgtccagtgtcgatggattgatcttcaaaaccacaggtcattaaatttacctgtaaaatagtatttaaa

SEQ ID NO: 36 - DNA, 514 bp, Escherichia coli
  Strain O55:H7
agcggacgctattacaattagtattattccctgtacatgaactcacttcaatttcgaacaacaaaggaaaaggagttcctggaaaaatatctgcggtgttggaactatctgatacagatgcgatagagtatggaatggtgaaatttatcgcagatagcatttcttctaaattataagatgacttccctggaagcgctattttttttaccgtcagattcaaaggggaaattaataatataatgacgacttccgactttaaaccttaaagcgttctgtgttaaaaaatgaactttaatggcgttggtcgtctcttgcaagtctgcacactcaatgatattcccagtattttcaattttttcggcggtgagattacctttcatactcagtggtttgagtatatatgttccacgttgttccccgacattggtcaatccacagggagcactttgcacaataaaagaatatagactcaatgtgattaataaaagccacttcatagtaaactccttttact

SEQ ID NO: 37 - DNA, 423 bp, Escherichia coli
  Strain O55:H7
atatatgttttgttttcatcgataacgtgttgaaaagtaatagtacagaataaattctgttcatcattgagagcaacttttatgccagttggaatttcatctacgcgaataaaaaggcgactaccctggccaacgactccaatattgttttcctggagatccagtacgtcatagccaaaagttaatggcgaaccatcgggacgcagtgcctgtatataccagggcttacgttggtcagttgtaaactgcacataagaaactgctccacggtaaggcgcaataatttgacgattgccctgcaattctgtttcactttcactgtttgctgtatcaagtaccagatggttttcacgatgaggtatcatcaggtcgtaaacaacctggcctttgctgtttgttcggttgtatttttgtccattaata

SEQ ID NO: 38 - DNA, 4623 bp, Escherichia coli
  Strain O55:H7
aacccaggcgcatccagaattgcaaatgtatcggatagctggttagtgatattaataccaccgggccagacaactaatccactactaatacttccaccactttgccaggcgtttttagaatggctatagctgccatctattgtggcgatgggagttctccagcttaaattcgtaccaagcgatgtatcattattttgttgttgctgattaacatatataccataatttaactgatcatgttcaccggctatgccagtaattccagtattgttggaggaatagccatctttggaaaatgaggtcgaattcgataagttaatttggtgacgtgttttggcaatatcatccccccagtagaaaggaatggagataaacagattaaaacgctcctcttctttgtcgttttcatcataggattggctggcagagaaagtataactgatgcgttgccagctattggaataactgaattggtaatctttagcatttccacttcgcccccagtaattccgccaaagcgcacttaatgatacatttcccagattattggataaaggttgcatgatattggcagaaaggctattttttctgccaatatcataaaaatcgtcatagtcactctgatgatttattttatcattttcgtaaagatggtcgctgaatgtcctgtaatcctgcgaagcataacgccaggcggccacgctaaatcgagtggccgtttgtactagatatttattataggcgacctgatagctcgtaccttcgtgtgttatatcattatttaacttactactcgatcgtgtagcgtcaaaagagatggcacccagcggtgtattccaaccatttcccagagttatagcattatagttatcggataaaatcgtaccgccataaagtgtcaaaagattgttgaggccatatatataatttgcctcgagaaagtcctcctgattctttacaccatatatcttactgcgtccggcgataaaatcgaaatttgaaataccaggttgcagcatgttaggcacggaagagtagggcaccaaaaaggaacgaacactgccatctgcttcctttatgctgacatcgagatcagagccgctgcccgagagttgcaaatctgcgatagtaaatggtcccgggggaacctctttttggtaaatgatgtagccattttgcgaaaccgttatcaaggcattactttgcgcaacaccttgtactaaaggtgtaaagctctgcatagaatcaggtagcatttgcatatcgcgaaataagcgtattccgctaaatctcagagagtcgaatatgagtgaggatgtgtaattttctcctatctgaactgtgcttaatatctgcgaccagccatgttccaggtaaagagtattactttgccatgtgcctttcatatcatcgggtttgctatagctggcatcagagtgtaactgccaactaaataaatttaatccactgttaaatcggccataactggctgtattactgttattattgctgtcataagagcgatactgacttaaattataggaggtataaaaagcatcaatgccgcgatcccaactttccgggggaacgtaacctctttcaagttcattgatatacgcctgtggtactgttaaatttagtcggtgttcactgatatcccactgatattgtccaccatgaaccgctttatccagtaaaatacaattatcttctgtattgaggttaccggtctttacccccagtttggttagtagcaccttaggcagacatggtttgactggtgactctgggatcgtgatatcttgttttccacgccactggttatttacataaaaatcaagttcgtagtttcctggaagcggttgtttattatcgaaatgatattcggaaactttttctcctttcatgccgccgatcataaagtgcgtatcaaaagtttcttcagcataacccggaaaagaatacaaaaaaataatagcagcgacccatcgtgtcgtccttaacatgactttttcctgttatctcgcggcgattttactatggatgttattcccgtaatcatcaactaccgttagttcatattctgatgcgtggttattttttaatgtaatgtcgttatgcgaaaagggaggcagtaagatactttcattattaactttcacgttttgtgctttgatagttgtaaccgttatccagttggctgtttcgttgtttattgagatggcgttatttttctttttgatatttaattgagaaaggctttttttatctaccggagctattccgcttggacgccaaagtaactttatccggttttgcaatgcaagtttaattttgtttttccctgcattttgtggattgtttggagggatatccagaacatttagataaaataaactttctttattgtgaggcaaattgtttggcatttttcttattttaagttgttggccagaaccacctgctacacgacttactggcggtgtgagaataaatgtgacctgaattttttctggcgcgatagtggtgttcccatcatcgatccatgcctgaatcaaagaggcatttttactttgattcattaactgtacgagaacttctctgtttttttccggataaataatgcgcgtaccatagatgaccacaccggcatgaacaggtaaaataaaaaatgacatcagtaatgctgttattattctcacgtaatcactccgtaaataataccggtagcagagctaccggcaaaaaacgttaatctgcactgattttaatcgttacggttgactctacggagccttttgtaacaggattgccacttgtgcgggcatattgtgcatttaaattgagaaaatattgaccagagccattatctttcagcggtgtttttaaccctggtctcattctggtcaaagtcccatcatcgaggaaaatggcaaagccaatgttctcagcagttcctttattcagcgtaaagttattagcatcaaactctgatgctagtacttcgatacttggggctgtatttccgtcacactgaatttctaagtcatgagaggttgaaccggtttttaaagtatagatttcattattgataagttgattcattgcactggttacaacatcttcgacaacgatatctgttgtcgaatcaccattaacaaagtaacacgttgtatcaacaacttctcctctaatggttagtgttccttgatcgacatccttggcgaaggttgttgcgctaaacatcaacgttgtcgcaacgaagggaataatatactttttcataaatcatccttaattaactggtatggaaggtcactcgttttcaaacccgattatgtgatcaggttgttattatttagattaatgtttaaattttttaatttcttgatgtgaagttgatgaaagtttgaaaatttaatattcttaattattcccttctttataagaagagcaaggtgccatcattagagtgacagagtaggatgtttcagagcatgcttcagattattttttatttctctgcagttaattaataattatcacaggtaatttcattctgaaattacttcttttttggggtgttttaatcttgatgagatatttttttcataaggaacatagactcgttgatgctctgaaggtattttctcatttctggggatgttttgtcgtaatcgtgcataaactttttcagttctttatacacatcattatttagctttacattgtcgcgaactaaagtttgtaccaatggtatcaaaatttcgaaacgggacggtttgtcatcaatacttgccagggttttgaatactcctgtgtatctgtaacctaagtgcttattgacaagttgagtggtccatcggccaggcataatatcttcacagcgcaaattttttatcatggtattagtgaacgatgttccaaatatgttgctttttttaatgaagaggttgtttatttctccatttgaaaagatggtgtttgataagtcgctttcaaaacatgatatattggataatacacaaccaaaataatacccatatgaaaggttgctcttttctattgttatatttgatagcaacagtttatgtatattaatattaagggcagtcaaatactggatgttttgctcgttaagttcatgcatctccagcgatttattatagggtaataaaagtataaattcctttacattatctccgcagtaagaaaagacaacatcaaatttatcggtgatcatgttttcatttgagcagtaagctgatttctctattaaccgactgggcgagttttttaataaagataatttttcacatagttgtgaatatgccgcattgctagttttaaaattctgccatgttattttctggttatcatctgtcgatgaggcggggattttattgcattgctcattgtatagctcaggataaatattcttttttattagatttctgatttccttattaaaataactttttttcttgactattgcactgtacttagcgttttgtgacgtctcctgatgatcataaaatgactggagatttctgcaggcctcataaaatatttcaggagtgtatagctctgggtatatttcctgattgaagtttgcctttaaaa

SEQ ID NO: 39 - DNA, 1205 bp, Escherichia coli
  Strain O55:H7
  modified_base (409)..(412): a, c, g or t
aaatttttcatggcattcttgatatatcttaatctcttcagaaagacattcgcttgttctgtcatcaaaaacatccaatctaagtaatgtgatgcctttgtgtttaaaaaaagaaaattgaactgtatgttctatgagtttacatctataaaaatgtgcatctctcagatgagtatattgaaaaaaatgatggaggactggagatggtttaggcaaatcctggcttctgaaaaagtcatcaaacaaaattaagaactctgttttatactcgcaaaacacttttactaactcattttgtcttgttttatttattattacatcatctactatatttgatttataaagacaatgtggcgaagttgagataccatctgtcattatcagtccttgaagttgatgaatttttatnnnnttaatttatgagtgaatgtgactactatcaaaaatcgctcattaattttaagaagtacaatataaataggtatttaacctgtgttgattgctgttaataatttacaaggtctaatgaggagatatttatgaatggttaaagtatataggaatttaattcaaaaatagagtggtcttaagtttaatacctcaatgtgtatcacaatatccacattctttgtaggggagtctggagattgagtagatattcttgttcagaatgtatcagccgatggttctacgattcttaagccacgaagagttcagatagtgcaacggcatgtctcttttgactatctggcaaccggcagtgtgttctctcacgcatcacaaaagcagcaggcataaaaaaacccgcttgcgcgggctttttcacaaagcttcagcaaattggcaattaagccagtttgttgatctgtgcagtcaggttagccttatgacgtgcagctttgtttttgtggatcagacctttagcagcctgacggtccacgatcggttgcatttcgttaaatgctttctgtgcagcagctttgtcgccagcttcgatagctgcgtatactttcttgatgaaagtacgcatcatagagcgacggcttgcgttgtgcttacgagccttttcagactgaatggcgcgcttcttagctgatttgatattagccaaggtccaactcccaaatgtgttctatatggacaattcaaaggccgaggaatatgcccttttagccttcttttgtcaatggatttgtgcaaataag

SEQ ID NO: 40 - DNA, 3695 bp, Escherichia coli
  Strain O55:H7
  modified_base (2885)..(2885): a, c, g or t
  modified_base (3688)..(3691): a, c, g or t
cactcgttacgtagtgatggcgcaggattctaccagcttgcggggtgtgaatacagcttttccgcgataaaaattgcagcaggcagtcagtttcttcccgtgatttgcgccatgaccatgacaatgaaaagccacttctttctgatttcggtactcaatcgccggttaaccttgaccgctgtacaaggtatactcggacgattttcactgttttgagccagacatgaagctgatacgcggcatacataatctcagccaggccccgcaagaagggtgtgtgctgactattggtaatttcgacggcgtgcatcgcggtcatcgcgcgctgttacagggcttgcaggaagaagggcgcaagcgcaacttaccggtgatggtgatgctttttgaacctcaaccactggaactgtttgctaccgataaagccccggcacggctgacccgactgcgggaaaaactacgttaccttgcagagtgtggcgttgattacgtgctgtgcgtacgtttcgacaggcgtttcgcggcgttaaccgcgcaaaatttcatcagcgatcttctggtgaagcatttgcgggtaaaattcctcgccgtgggggatgatttccgctttggcgctggtcgggaaggcgatttcttgttattacagaaagcgggcatggaatacggcttcgatatcaccagtacgcaaactttttgcgaaggtggcgtgcgtatcagcagcaccgccgtgcgtcaggcccttgcggatgacaatttggctctggcagaaagtttactggggcacccgtttgccatctccgggcgtgtagtccacggtgatgaattagggcgcactataggtttcccgacggcgaatgtaccgctacgccgtcaggtttccccggtgaaaggggtttatgcggtagaagtgctgggcctcggtgaaaagccgttacccggcgtggcaaacatcggaacacgcccaacggttgccggtattcgccagcagctggaagtgcatttgttagatgttgcaatggacctttacggtcgccatatacaagtagtgctgcgtaaaaaaatacgcaatgagcagcgatttgcttcgctggacgaactgaaagcgcagattgcgcgtgatgaattaaccgcccgcgaattttttgggctaacaaaaccggcttaagcctgttatgtaatcaaaccgaaacacggaaccgagaatctgatgagtgactataaatcaaccctgaatttgccggaaacagggttcccgatgcgtggcgatctcgccaagcgcgaaccgggaatgctggcgcgttggactgatgatgatctgtacggcatcattcgtgcggctaaaaaaggcaaaaaaaccttcattctgcatgatggccctccttatgcgaatggcagcattcatattggtcactcggttaacaagattctgaaagacattatcgtgaagtccaaagggctttccggttatgactcgccgtatgtgcctggctgggactgccacggtctgccgatcgagctgaaagtagagcaagaatacggtaagccgggtgagaaattcaccgccgccgagttccgcgccaagtgccgcgaatacgcggcgacccaggttgacggtcaacgcaaagactttatccgtctgggcgtgctgggcgactggtcgcacccgtacctgaccatggacttcaaaactgaagccaatatcatccgcgcgctgggcaaaatcatcggcaatggtcacctgcacaaaggcgcgaagccggtgcactggtgcgtagactgccgttctgcactggcagaagcggaagttgagtattacgacaaaacttctccgtccattgacgtcgctttccaggcggtcgatcaggatgcgctgaaagcgaaatttggcgtaagcaacgttaacggcccaatctcgctggtgatctggaccactacgccgtggactctgcctgcgaaccgcgcaatctctattgcacctgatttcgactatgcgctggtgcagatcgacggtcaggccgtgattctggcgaaagatctggttgaaagcgtaatgcagcgtatcggcgtgaccgattacaccattctcggcacggtaaaaggtgcggagcttgagctgctgcgctttgcccatccgtttatgggcttcgacgtcccggcaatcctcggcgatcacgttaccctggatgccggtaccggtgccgttcacaccgcgcctggccacggcccggacgactatgtgatcggtcagaaatacggcctggaaaccgctaacccggttggcccggacggcacttatctgccgggcacttatccgacgctggatggcgtgaacgtcttcaaagcgaacgacatcgtcgttgcgctgctgcaggaaaaaggcgcgctgctgcacgttgagaaaatgcagcacagctatccgtgctgctggcgtcacaaaacgccgatcatcttccgcgcaacgccgcagtggttcgtcagtatggatcagaaaggtctgcgcgcgcagtctctgaaagagatcaaaggtgtgcagtggatcccggactggggccaggcgcgtatcgagtcgatggtcgctaaccgtcctgactggtgtatctcccgtcagcgtacctggggcgtaccgatgtctctgttcgtgcacaaagacacggaagagctgcatccgcgtaccctcgaactgatggaagaagtggctaaacgcgttgaagttgatggcatccaggcgtggtgggatcttgatgcgaaagagatcctcggcgatgaagctgatcagtatgtgaaagtgccggatacgctggatgtatggtttgactccggctctactcactcttctgttgttgacgtgcgcccggaatttgccggtcacgctgcggacatgtatntggaaggttctgaccaacaccgtggctggttcatgtcttctctgatgatctccaccgcgatgaagggcaaagcgccgtatcgtcaggtgctgacccacggctttaccgtagatggtcagggccgcaagatgtctaaatccatcggcaacaccgtgtcgccgcaggatgtgatgaacaaactgggcgcggatattctgcgtctgtgggtggcatcaaccgactacaccggtgaaatggccgtttctgacgagatcctgaaacgtgctgccgacagctatcgtcgtatccgtaacaccgcgcgcttcctgctggcaaacctgaacggttttgatccggcaaaagatatggtgaaaccggaagagatggtagtactggatcgctgggccgtaggttgtgcgaaagcggcacaggaagacatcctcaaggcatacgaagcatacgatttccacgaagtggtacagcgtctgatgcgcttctgctccgttgagatgggttccttctacctcgacatcatcaaagaccgtcagtacaccgccaaagcggacagcgtggcgcgtcgtagctgccagactgcgctgtatcacatcgcagaagcgctggttcgctggatggcaccaatcctctccttcaccgctgatgaagtgtggggctacctgccgggcgaacgtgaaaaatacgtcttcaccggcgagtggtacgaaggtctgtttggtctggcagacagtgaagcaatgaacgatgcgttctgggacgagctgttgaaagtgcgtggcgaagtgaacaaagtcattgagcaggcgcgnnnngaca

SEQ ID NO: 41 - DNA, 16619 bp, Escherichia coli
  Strain O55:H7
  modified_base (2354)..(2357): a, c, g or t
  modified_base (5131)..(5131): a, c, g or t
  modified_base (7081)..(7084): a, c, g or t
  modified_base (7086)..(7089): a, c, g or t
  modified_base (7594)..(7594): a, c, g or t
  modified_base (10589)..(10589): a, c, g or t
  modified_base (15845)..(15845): a, c, g or t
  modified_base (16256)..(16256): a, c, g or t
gtgggtggctcgctggaagcggcagtaaccttgtatacagaaccggaactggcggcgaaactgaccgcattgggcgatgaattacgatttgtcctgttgacctccggcgctaccgttgcagactataacgacgcacctgctgatgctcagcagagtgaagtgctcaaagggctgaaagtcgcgttgagtaaagccgaaggtgagaagtgcccacgctgctggcactacacccaggatgtcggcaaggtggcggaacacgcagaaatctgcggccgctgtgtcagcaacgtcgccggtgacggtgaaaaacgtaagtttgcctgatgagtcaatcgatctgttcaacagggctacgctggctgtggctggtggtagtcgtgctgattatcgatctgggcagcaaatacctgatcctccagaactttgctctgggggatacggtcccgctgttcccgtcgcttaatctgcattatgcgcgtaactatggcgcggcgtttagtttccttgccgatagcggcggctggcagcgttggttctttgccggtattgcgattggtattagcgttaccctggttgtgatgatgtatcgctcgaaggccacgcagaagctaaacaatatcgcctacgcgctgattattggcggcgcgctgggcaacctgttcgaccgcctgtggcacggcttcgttgtcgatatgatcgacttctacgtcggcgactggcacttcgccaccttcaacctcgccgatactgccatctgtgttggtgcggcactgattgtgctggaaggttttttgccttctaaagcgaaaaaacaataataaaccctgccggataaggcctacagattgctgcgaaatcgtaggccgcatccggcaaaaatcctcaaaatataagagcaaacctgcatgtctgaatctgtacagagcaatagcgccgtcctggtgcacttcacgctaaaactcgacgatggcaccaccgccgagtctacccgcaacaacggtaaaccggcgctgttccgcctgggcgatgcttctctttccgaagggctggagcaacacctgctggggctgaaagtgggcgataaaaccactttctcgctggagccagatgcggcgtttggcgtgccgtcaccggacctgattcagtacttctcccgccgtgagtttatggatgcaggcgagccagaaattggcgcaataatgctttttaccgcaatggatggcagtgagatgcctggcgtgatccgcgaaattaacggcgactccattaccgtcgatttcaaccatccgctggccgggcagaccgttcattttgatattgaagtgctggaaatcgatccggcactggaggcgtaacatgcagatcctgttggccaacccacgtggtttttgtgccggggtagaccgcgctatcagcattgttgaaaacgcgcttgccatttacggcgcaccgatatatgtccgtcacgaagtggtgcataaccgctacgtggtcgatagcctgcgcgagcgtggagctatctttattgagcagatcagcgaagtgccggacggcgcgatcctgatcttctccgcacatggtgtttctcaggcggtacgtaacgaagcgaaaagccgtgatttgacggtattcgacgccacctgtccgctggtgaccaaagtgcatatggaagtcgcccgcgccagccgtcgtggcgaagagtctattctcatcggtcacgccgggcacccggaagtggaagggacgatggggcagtacagcaaccctgaagggggaatgtatctggtcgaatcgcctgacgatgtgtggaaactgacggtcaaaaacgaagagaagctctcctttatgacccaaaccacgctgtcggtagatgacacgtctgatgtgatcgacgcgctgcgtaaacgcttcccgaaaattgtcggtccgcgcaaagatgacatctgctacgccacgactaaccgtcaggaagcggtacgcgccctggcagaacaggcggaagttgtgttggtggtcggttcgaaaaactcctccaactccaaccgtctggcggagctggcccagcgtatgggcaaacgcgcgtttttgattgacgatgcgaaagatatccaggaagagtgggtgaaagaggttaaatgcgtcggcgtgactgcgggcgcatcggctccggatattctggtgcagaatgtggtggcacgtttgcagcagctgggtggtggtgaagccattccgctggaaggccgtgaagaaaatattgttttcgaagtgccgaaagagctgcgtgtcgatattcgtgaagtcgattaagtcattagcagcctaagttatgcgaaaatgccggtcttgttatcggnnnnttttatggagaaaacatgcgcttacctatcttcctcgatactgaccccggcattgacgatgccgtcgccattgccgccgcgatttttgcccccgaactcgacctgcaactgatgaccaccgtcgcgggtaatgtctcggttgagaaaactacccgtaacgccttgcaactgctgcatttctggaatgcggagattccgctcgcccagggagccgctgtgccgctggtacgcgcaccgcgtgatgcagcatctgtgcacggcgaatcgggaatggctggctacgactttgttgagcacaaccgaaagccactcgggataccggcgtttctggcgattcgggatgccctgatgcgtgcaccagagcccgttaccctggtggccatcggcccgttaaccaatattgcgctgttactttcacaatgcccggaatgtaaaccgtatattcgccgtctggtgatcatgggtggttctgccggacgcggcaactgtacgccaaacgccgagtttaatattgctgccgatccagaagctgctgcctgtgtcttccgcagtggtattgaaatcgtcatgtgcggtttggatgtcaccaatcaggcaatattaactcctgactatctctctacactgccgcagttaaaccgtaccgggaaaatgcttcacgccctgtttagccactaccgtagcggcagtatgcaaagcggcttgcgaatgcacgatctctgcgccatcgcctggctggtgcgcccggacctgttcactctcaaaccctgttttgtggcagtggaaactcaaggcgaatttacctcaggcacgacggtggttgatatcgacggttgcctgggcaaaccagccaatgtacaggtggcattggatctgaatgtaaaaggcttccaacagtgggtggctgaggtgctggctctggtgccgtaacctgtcacatgttatcggcatgcagtcattcatcgactcatgcctttcactgatatccctccctgtttatcattaatttctaattatcagcgtttttggctggcggcgtagcgatgcgctggttactctgaaaacggtctatgcaaattaacaaaagagaatagctatgcatgatgcaaacatccgcgttgccatcgcgggagccggggggcgtatgggccgccagttgattcaggcggcactggcattagaaggcgtgcagctgggcgcggcgctggagcgcgaaggatcttctttactgggcagcgacgccggtgagctggctggtgcagggaaaacaggcgttaccgtgcaaagcagtcttgatgcgataaaagatgattttgatgtgtttatcgattttacccgtccggaaggtacgctgaaccatctcgctttttgtcgccagcatggcaaagggatggtgatcggcactacggggtttgacgaagccggtaaacaggcaattcgtgacgccgccgccgatattgcgattgtctttgccgccaattttagcgttggcgttaacgtcatgcttaagctgctggagaaagcagccaaagtgatgggtgactacaccgatattgaaattattgaagcacatcatagacataaagttgatgcgccgtcaggcaccgcactggcaatgggagaggcgatcgcccacgcccttgataaagatctgaaagattgcgcggtctacagtcgtgaaggccataccggtgaacgtgtgcctggtaccattggttttgccaccgtgcgtgcaggtgacatcgttggcgaacataccgcgatgtttgccgatattggcgagcgtctggagatcacccataaggcgtccagccgcatgacatttgctaacggtgcggtaagatcggctttgtggttgagtggtaaggaaaatggtctttttgatatgcgagatgtgcttgatctcaataatttgtaaccacaaaatgtttatgatgatgcaaaagtaacatatttaatttattaattataaagggctttaatttttagcccttttatttttggtgttatgcttttaatttttctataactgccaaaaattacatgttttgtcttctatttttgttgtcttaatgtaaattttgaccatttggtccacttttgcctgctcgtttttatttcatgcaatcttcttgctgcgcaagcgttttccagaacaggttagatgatctttttgtcgcttaatgcctgtaaaacatgcatgagccacaaaataatataaaaaatcctgccattaagttgacttttagcgcccatatctccagaatgccgccgtttgccagaaattcgtcggtaagcagatttgcattgatttacgtcatcattgtgaattaatatgcaaataaagtgagtgaatattctctggagggtgttttgattaagtcagcgctattggttctggaagacggaacccagtttcacggtcgggccataggggcaacaggttcggcggttggggaagtcgttttcaatacttcaatgaccggttatcaagaaatcctcactgatccttcctattctcgtcaaatcgttactcttacttatccccatattggcaatgtcggcactaatgacgccgatgaagaatcttctcaggtacatgcacaaggtctggtgattcgcgacctgccgctgattgccagcaacttccgtaataccgaagacctctcttcttacctgaagcgccataacatcgtggcgattgccgatatcgatacccgtaagctgacgcgtttactgcgcgagaaaggcgcacagaatggctgcattatcgnaggcgataacccggatgcggcgctggcgttagaaaaagcccgcgcgttcccaggtctgaatggcatggatctggcaaaagaagtgaccaccgcagaagcctatagctggacacaagggagctggacgttgaccggcggcctgccagaagcgaaaaaagaagacgagctgccgttccacgtcgtggcttatgattttggtgccaaacgcaacatcctgcggatgctggtggatagaggctgtcgcctgaccatcgttccggcgcaaacttctgcggaagatgtgctgaaaatgaatccagacggcatcttcctctccaacggtcctggcgacccggccccgtgcgattacgccattaccgccatccagaaattcctcgaaaccgatattccggtcttcggcatctgcctcggtcatcagctgctggcgctggcgagcggtgcgaagactgtcaaaatgaaatttggtcaccacggcggcaaccatccggttaaagatgtggagaaaaacgtggtgatgatcaccgcccagaaccacggttttgcggtggatgaagcaacattacctgcaaacctgcgtgtcacgcataaatccctgttcgacggtacgttacagggcattcatcgcaccgataaaccggcgttcagcttccagggtcaccctgaagccagccctggtccacacgacgccgcgccgttgttcgaccactttatcgagttaattgagcagtaccgtaaaaccgctaagtaatcaggagtaaaagagccatgccaaaacgtacagatataaaaagtatcctgattctgggggcgggcccgattgttatcggtcaggcgtgtgagtttgactactctggcgcgcaagcatgtaaagccctgcgcgaagagggttaccgcgtcattctggtgaactccaacccggcgaccatcatgaccgacccggaaatggccgatgcgacctacatcgagccgattcactgggaagtggtacgtaagattattgaaaaagagcgcccggacgcggtgctgccaaccatgggcggtcagacggcgctgaactgcgcgctggagctggaacgtcagggcgtgttggaagagttcggcgtcaccatgattggtgccactgccgatgcgattgataaagcagaagaccgccgtcgtttcgacgtagcgatgaagaaaattggtctggaaaccgcgcgttccggtatcgcacatacgatggaagaagcgctggcggttgccgctgacgtgggcttcccgtgcattattcgcccatcctttaccatgggcggtagcggcggcggtatcgcttataaccgcgaagagtttgaagaaatttgcgcccgcggtctggatctctctccgaccaaagagttgctgattgatgagtcgctgatcggctggaaagagtacgagatggaagtggtgcgcgataaaaacgacaactgcatcatcgtctgctctatcgaaaactttgatgcgatgggcatccacaccggtgactccatcactgtcgcgccagcccaaacgctgaccgacaaagaatatcaaatcatgcgtaacgcctcgatggcggtgctgcgtgaaatcggcgttgaaaccggtggttccaatgtccagtttgcggtgaacccgaaaaacggtcgcctgattgttatcgaaatgaacccacgcgtgtcccgttcttcggcgctggcgtcgaaagcgaccggtttcccgattgctaaagtggcggcgaaactggcggtgggttacaccctcgatgaactgatgaacgacatcactggcggacgtactccggcctccttcgagccgtccatcgattacgtggttaccaaaattcctcgcttcaacttcgaaaaattcgccggtgctaacgaccgtctgaccactcagatgaaatcggttggcgaagtgatggcgattggtcgcacgcagcaggaatccctnnnnannnngctgcgcggcctggaagtcggtgcgactggattcgacccgaaagtgagcctggatgacccggaagcgttaaccaaaatccgtcgcgaactgaaagacgcaggcgcagagcgtatctggtacatcgccgatgctttccgcgcgggcctgtctgtggacggcgtcttcaacctgactaacattgaccgctggttcctggtacagattgaagaactggtgcgtttggaagagaaagtggcggaagtgggcatcactggcctgaacgctgaattcctgcgccagctgaaacgcaaaggctttgccgatgcgcgcttggcaaaactggcgggcgtacgcgaagcggaaatccgtaagctgcgtgaccaatatgacctgcacccggtctacaagcgcgtggatacctgtgcggcagagtttgccaccgacaccgcttacatgtactccacttatgaagaagagtgcgaagcgaatccgtctaccgaccgtgaaaaaatcatggtgcttggnggcggtccaaaccgtatcggtcagggtatcgaattcgactactgctgcgtacacgcctcgctggcgctgcgtgaagacggttacgaaaccattatggttaactgtaacccggaaaccgtctctaccgactacgacacttccgatcgcctctacttcgagccggtaactctggaagatgtgctggaaatcgtgcgtattgagaagccgaaaggcgttatcgttcagtacggcggtcagaccccgctgaaactggcgcgtgcactggaagccgctggcgtaccggttatcggcaccagcccggatgctatcgaccgtgcggaagaccgtgaacgcttccagcatgcggttgaccgtctgaaactgaaacaaccggcgaacgccaccgttactgctattgaaatggcagttgagaaggcaaaagagattggctacccgctggtggtgcgtccgtcttacgttctcggcggtcgggcgatggaaatcgtctatgacgaagctgacctgcgtcgctacttccagacggcggttagcgtgtctaacgatgcgccagtgttgctggatcatttccttgatgacgcagtagaagttgacgtggatgccatctgcgacggcgaaatggtgctgattggcggcatcatggagcacatcgagcaggcgggcgtgcactccggtgactccgcatgttcgctgccagcgtacaccttaagtcaggaaattcaggatgtaatgcgccagcaggtgcagaaactggccttcgaattgcaggtgcgcggcctgatgaacgtgcagtttgcggtgaaaaacaacgaagtctacctgattgaagttaacccgcgtgcggcgcgtaccgttccgttcgtctccaaagccaccggcgtaccgctggcaaaagtggcggcgcgtgtgatggctggcaaatcgctggctgagcagggcgtaaccaaagaagttatcccgccgtactactcggtgaaagaagtggtgctgccgttcaataaattcccaggcgttgacccgctgttagggccagaaatgcgttctaccggggaagtcatgggcgtgggccgcaccttcgctgaagcgtttgccaaagcgcagctgggcagcaactccaccatgaagaaacacggtcgtgcgctgctttccgtgcgcgaaggcgataaagaacgcgtggtggacctggcggcaaaactgctgaaacagggcttcgagctggatgcgacccacggcacggcgattgtgctgggcgaagcgggtatcaatccgcgtctggtaaacaaggtgcatgaaggccgtccgcacattcaggaccgtatcaagaatggcgaatatacctacatcatcaacaccacctcaggccgtcgtgcgattgaagactcccgcgtgatccgtcgcagtgcgctgcaatataaagtgcattatgacaccaccctgaacggtggtttcgctaccgcgatggcgctgaatgccgatgcgactgaaaaagtaatttcggtgcaggaaatgcacgcacagatcaaataatagcgtgtcatggcggatatttttcatccgctaatttgatcgaataactaatacggttctctgatgaggaccgttttttttgcccattaagtaaatcttttggggaatcgatatttttgatgacataagcaggatttagctcacacttatcgacggtgaagttgcatactatcgatatatccacaattttaatatggccttgtttaattgcttcaaaacgagtcatagccagacttttaatttgtgaaactggagttcgtatgtgtgaaggatatgttgaaaaaccactctacttgttaatcgccgaatggatgatggctgaaaatcggtgggtgatagcaagagagatctctattcatttcgatattgaacacagcaaggcggttaataccctgacttatattctgtcggaagtcacagaaataagctgcgaagttaagatgatccctaataagctggaagggcggggatgccagtgtcagcgactggttaaagtggtcgatatcgatgagcaaatttacgcgcgcctgcgcaataacagtcgggaaaaattagtcggcgtaagaaagacaccgcgtattcctgccgttccgctcacggaacttaaccgcgagcagaagtggcagatgatgttgtcaaagagtatgcgtcgttaatgtcatttcgatgataccgtgcgacctggtcgccggatgcgatgctggcgcatcttatccggcctacggttgctctccagcagagttggataaggcgtttacgccgcatccggcaagatcaccgtttaggcgtcacatccgtcgtcccctgcaaacgggggcgattttcctccatttgcctcagtggctgtgtttcatgtaacgatgcatgacagcgcccgacaagatcctgatactctttggtattcaaccgtttccagtgtaactcgtcgtcactaacactgcgtacagcgcgggctggcgtacccatcaacaactggcgtttctcgccgtgaaagcctgctttgacaaagctcatggcggcaacaatgctctcttcgccaatgaccgcgccatccataatcacgctgttcatcccgaccaatgcatcgcgaccaatcacacaaccatgcaggatcgctccgtgcccgatatggccgttttccccaacgatggtgtcagtgtcggtgtagccatgcataatgcagccatcctgaatattggctcccgcttgcacgatcaaccgcccgtagtcaccacgcagtgaggcgagtgggccgatgtagacaccggctcccacaatcacatcgccaatcaagacggcactgggatggacaaacgccgtcgggtgaaccaccggaattaacccctcaaaggcgtaatagctcacggttgttaacgtcctttccacaccggatcgcgcttctcggcaaacgccagcggcccttcaatggcatcttccgaatgcagaaccgatggatagtgtttcaacacgncgctgcgaatatagcgatacgattcttctaccggcatttcgctggtggtgcggtagatctctttcagcgccgcaatcgccagcggggcgctgttaaccagctgctgagccagttcgcgggcgttatccatcagttccgcctggctaaccacgcggttgactatcccccaacgcagcgcctcttctgcgcccattcgtctgccggtcatcaccatttcattgacgatggcaggcggcaggatcttcggcagacgcagcacaccgccgctgtcaggaacgatgcccagtttggcttccggcagggcgaagctggcgttatcggcacaaacaataaaatctgccgccagcgccagttcgaaaccgccgccaaaggcgtagccgttcacagctgcgataaccggtttgtcgagattgaaaatttcggttaatcccgcaaaaccacccgggccaaagtcagcatccggtgcttcgccttctgctgccgcttttaaatcccagcccgcggaaaagaatttctctccggcaccggtaataatggcgacacgtaattgcggatcgtcacggaaatttagaaatacttcgcccatttcaaagctggtttttgcatcaatagcattcgcttttgggcgatcaagagtaatttccagaattgatccattgcgggtcagatgtaatgattcactcattccttttctccatttttgctttttcagggacgacaacatccctgcaaaaaatgcatattgttttagagcgtgattattagctggcagggtagttccctgccgtttcatttatttcagattctttctaattattttccccgagcaattacgtggcagatcttttctgatctccagataagagggcactttaaatttcgccatattttgttcgcagaagcggaaaaattcctcttcgctcaatgtttcaccttcattcagcaccacaaatgctttgatggcttcatcgcgaatcgaatctttaatacccacaaccacgatatcctgaatttttggatgggtggcgatgatattttccagctccacgcaggagacattctcgccaccgcgtttgatcatattgcagcggcgatcgatgaaataaaaaaagccttcttcgtcgcggtatccggtatcgccggtatgcagccagccatcagcttccagcacttttgcagtggctttcgggttgagaaaatactctttgaagatggttttccctggtacgcctttaatacagatttcaccgatctcacctgccgggagcgggcgattgtgatcgtcgcggatctccgcttcgtagcaaaaccccgcccgaccaatcgacggccagcgtcgtttatcgccagggcgatcgccgataatgcccacaatggtttccgtcatcccataagacgtcagcaagcgaacaccgaagcgttcacaaaatgtgtctttttcctgctccgacaagttgagataaaacatcacttcccgcaggcggtgttgccgatcgttcgctgaaggcggctgcaccatcaacgtacgaatcatcatcggaatacattcggtaatggtggcgcggtacttctgtacctgtccccagaaggcgcgggcgctgtatttctcgaccagcacaaaggtggccccggcagaaaacgccgccatcgccgcagtacactggcaatcgatatgaaacgcaggcattaccgtcaggtagacgtcatcgtcacgcagtgcacactgccaggcggagtaatatccagcgaagcgcaggttgtaatgggtaatcaccacacctttcggtcgggaggtggtgccggaggtgaagagaatttccgccgtatcgtcagtcgatagcggcggtgcatagcacaaggtggcaggttgttgatttttcagttgagtaaacgaactcacgccatcatcagcgggaagtgccacatctgtcaggcaaatgtgccgcaattgagtggcatcttcttgctgaatctgttgatacataggatagaattgcgcactggtcaccagcaggcacgcctggctattttgcaggatccacgcactttcctcgcgtaacaggcgggcgttaatcggcaccataatcgcgccaatttttgccagcccgaaccagcaaaagataaattccgggcagttgtcgagatgtagtgcaaccttgtcgcctttgcgaatccccagcgtataaaacaggtttgccgtgcggttaatctcctgatttaactcaagataactataccggttaacgactccgccgctggattcacaaatcagcgccgttttatgaccgtaaacgtccgccagatcgtcccacatttgacgtagatgttgtccgccaatgatatccattgcacctctatccatttttgttcgtttgttattgggcgggcgctagtcaggcaagccgactgacgccacgcgtttagtcctcaactttggccagacctttgctgaccaactcctgaatgtcgttttcgctgtagccgatatttttcaaaatggcagccgtgtccatgccatgtgagggcattccgcgccagatttgtccggggttatttttgaatttcggcatgatgttcggccctttgcaggtgcgaccatccatcgtttgccactgagtgattgattcacgggcaacatactgtggattgctttccagttccggtacggtcagtactttggcacaggcgatattcagttcggcaaagcgttctttaacttctgcgatggtatgtgccgccagccaggcatcgagtttttcttctaccagtgggccgtaagggcattcgatacggtggataagctgagtgccttccgggatttccggcgtaccgagtagatgtgcgaggccaatatctttaaagcactcttcaatttgggtaatgcccaccagttccatcacgatgtagccgtcggcacatttatacagaccgcaaccggcatagtagggatctttacctttgctcatgcgcgggcacatttcgccgccgttgaagtaatccatcatgaagtactggcccatacgcagcatcacttcatacatggcgatgtcgatactttcgcctttaccggtttcacgcgctttatgcagtgctgccagcgccgccgtggtggcggtcaggccagaaaagtaatcggcggtatacgggaaggcaggcattggctggtcaacatcaccgttctgaatcaggtaaccactgaaggcctgggcgatggtgttataggccggaagattggtgtactcctcggtgccgtactgaccaaaaccggacaggtgagcgataaccagtttcgggttgtgttgccacagtacttcatcggtaatgccacgacgggcaaaggccggacctttactggcttcgatgaagatatcggtggtttccattaatttcagaaacgcttcgcggccttcatctttgaaaatatttaacgacagcgcgtgcaaattgcggcgggagagttgcgggtagttcggttgaacgcgaatggtgtcggcccaggcgacgttctcgatccagataacttccgcaccccattctgcgaacatttgcccggcgaacggcccggcaatttcgataccggagaagacaacgcgcaatccggccaacggcccgaatttcggcatgggtagatgatccattattagctcctgaaaaatttatgtagcgcatgactgccggatgcggcgtaaacgccttatccggcctacattcgtgctcccgtaggcctgataagacgcgtcagcgtcgcatcaggcagcgcacggacttagcggtattgcttcagcaccgcacgacccagcgtcaggatctgcatttcgtcagatcctccggaaacgcggtctacacgcaggtcacgccagaagcggctgatgcggtggttgcccgcaatcccgacaccgcccagcacctgcattgcgctatccaccacttcaaatgccgcattggcgcagaagtatttgcacatcgctgcatcgccagaggtgatggtgccgttgtctgctttccacgctgcttcatacagcatgtttttcatggagtttaatttgatcgccatgtgggcgaatttttcctgaatcaactggaaacgaccaatagcctcgccaaactgcacgcgctggttggcgtagcgcgccgcatcttcaaaggcgcacatcgccgtaccgtagttggtcagggctaccaggaaacgttcatggtcgaactcttctttgacgcggttaaagccgttaccttcccgaccgaacatgtctttctcgtccagttccacatcgtcaaaggtgatttcacagcagctatccatacgcagaccgagcttctcaagtttggtcactttgatgcccggtttgctcatatcaacaaaccattcggtgtagacaggtttgtccggagaagccccgtcgcgcgccatcaccacgatgtacggggtgtaggcgctactggtaataaaacacttactaccattaagataaatcttaccatttctacgggtataagtcgttttcaggctacccacgtcggagcccgcgcccggttcggtaatcgctgagttccacatctgcttaccggtgccgcggaaagccataatcttgtcgatctgctcttgtgtgccttcgcgcaggaaggtattgaacccgcccggcaactggtacagtacataggttggtgcccccagacgtcccagctccatccacacggcggcgagagtaacaaaccccgcgtccagaccaccgtgctcttcagggatcagcagactgtcgatacccatatccgccagtgctttgacaaaacgttccgggtagacgctgtcacggtcgcactcggcaaaataggcctcccagttttcgctggccatcagttcgcggataccggcgacaaacagttcctgctcatcatttaaattaaaatccatctttcaacctcttgatattttgggggttaattaatctttccagttctgtttcgcgtctttaataaaggagagcgtcaccataatgttgacgaagaacagcgggcatcctccggcgataatggcagtttgaatcggtttcaggccgccgagcgccagcaaaacaataccgataatgccaaccagaattgaccaaccgatacgcaccagcagcggtggttcttcaccatcgcgtacttcgcggcaagtggacatcgccagggtataagagcaggcgttaaccagcgtaacggtggcaataaagcagaggatgaagaagccccacatggtggcggtgctgagcggcagancggcccaggtttcgatgatggcgcgcgccacaccgtactgttcgatcagatttggaatgttgatgatgtttttatctatcaacagcagagtgttactaccgagtacagtccacaggatccaggtggatgctgtcagtcccatcaccatgccgaagcacagttcacgcacagtacgaccacgggagatgcgggcgaggaagatactcatctggatggcgtaaatcacccaccatgcccagtagaacacggtccagccctgcgggaagccgcctttagcgatgggatcggtatagaacaacatgcgcggcagatacatcagcaacatccccaccgaatcggtgaagtagttcatgatgaagctggcaccgctgacgatgaacacccaacccagcatcaggaagctcaggtaantacgcacgtcactggcgatacgtacccctttttgcagaccgcaggcgacgcaaatggcgttgaggataatccagcaggtaatgatgatagcgtccagttgcagggtatgcggaatgccaaacaaccattgcatacactcggtcaccagcggcgtggcaaggcccagactggtacccatcgcgaagatcaaggcgacgagatagaagttgtcgacgatagtgccgaacaaccctttggcgtgtttttcacctaccagcggcaccagggtggagctggggcgaatcacttccattttgcggacaaagaagaagtaagcgaaggcgactgaaaggaagctgtaagtggcccacggcagaggtcccc

SEQ ID NO: 42 - DNA, 482 bp, Escherichia coli
  Strain O55:H7
acaagctgtaagccagccccaactctttcgctcctgtcgagttcggttctaagccaaacggcggggtggagatgtagtagtagatctcaatcgatccccagaacagtacggcagcagacgtacaggaggcgaacatcataaagatccaactggcggtactaaattcaggtggttcgttacctaaacgctttttggcatacgggccaaacaccagccagaaccaaccgaaaagcatcaccaccatataccattcaaatgcccatccccatacattggtgacgtaactgaatacagcattaataacgacattcgccgcatccagatctctgactgtaagccaacaaagtatgccgacgattattaatggcggaaagaaaaccttcggttctattcccgtttttctcttttcattcttcatgagttaattccactgtgaaaacgaatatttattttgcgttcccgtttgttttatttttgttaac

SEQ ID NO: 43 - DNA, 21389 bp, Escherichia coli
  Strain O55:H7
  modified_base (2052)..(2052): a, c, g or t
  modified_base (3402)..(3402): a, c, g or t
  modified_base (3949)..(3949): a, c, g or t
  modified_base (6205)..(6205): a, c, g or t
  modified_base (9670)..(9670): a, c, g or t
  modified_base (12591)..(12591): a, c, g or t
  modified_base (15620)..(15620): a, c, g or t
  modified_base (17698)..(17701): a, c, g or t
  modified_base (17834)..(17834): a, c, g or t
  modified_base (21271)..(21271): a, c, g or t
atataattattattaacctcatggacgcgttaatggctaactcataatgggtattcaataagctgcattctgtgattgttatcacatttttgtttcgggtgaatagagggcgcttttctcgttaattttgattattaatcagtttgttatgttatgttatgttgcgagtaaaaaaatagcatctgactttcaatattggtgatccataaaacaatattgaaaatttctttttgctacgccgtgttttcaatattggtgaggaacttaacaatattgaaagttggatttatctgcgtgtgacattttcaatattggtgattaaagttttatttccaaattaaagggcatgatatctgtaattaacaccaccgatatgaacgacgtttccttcatgatttctggagatgcaatgaagattattacttgctataagtgcgtgcctgatgaacaggatattgcggtcaataatgctgatggttcgttagacttcagtaaagccgatgccaaaataagccaatacgatctcaacgctattgaagcggcttgccagctaaagcaacaggcagcagaggcgcaggtgacggccctaagtgtgggcggtaaagccctgaccaacgccaaagggcgtaaagatgtgctatcgcgcggtccggatgaactgattgtggtgattgatgaccagttcgagcaggcactgccgcaacaaacggcgagcgcactggctgcagccgcccagaaagcaggctttgatttgatcctctgtggcgatggttcttccgacctttatgcccagcaggttggtttgctggtaggcgaaatcctcaatattccggcagttaacggcgtcagcaaaattatctccctgacggcagataccctcaccgttgagcgcgaactggaagatgaaaccgaaaccttaagcattccactgcctgcggttgttgctgtttccactgatatcaactccccacaaattccttcgatgaaagccattctcggcgcggcgaaaaagccagtccaggtatggtcggcggcggatatcggttttaacgcagaggcagcatggtcagaacaacaggttgccgcgccgaaacagcgcgagcgtcagcgcatcgtgattgaaggcgacggcgaagaacagatcgccgcatttgctgaaaatcttcgcaaagtcatttaattacaggggatgctatgaacacgttttctcaagtctgggtattcagcgataccccttctcgtctgccggaactgatgaacggtgcgcaggctttagctaatcaaatcaatgcctttgtcctcaatgatgccgacggcgcacaggcaatccagctcggcgctaatcatgtctggaaattaaacggcaaaccggacgatcggatgatcgaagattacgctagtgtcatggctgacactattcgccagcacggtgcagacggcctggtgctgttgccaaacacccgtcgcggcaaattactggcggcaaaactgggttatcgccttaaagcggcagtgtctaacgatgccagcaccgtcagcgtacaggacggtaaagcaacagtgaaacatatggtttacggtggtctggcgattggcgaagaacgcattgccacgccgtatgcggtactgaccatcagcagcggcacgttcgatgcggctcagccagacgcgtcacgcactggcgaaacgcacaccgtggagtggcaggctccggctgtggcgattacccgcacggcaacccaggcgcgccagagcaacagcgtcgatctcgacaaagcccgcctggtggtcagcgtcggtcgcggtattggcagcaaagagaacattgcgctggcagaacagctttgcaaggcgataggtgcggagttggcctgttctcgtccggtggcagaaaacgaaaaatggatggagcacgaacgctatgtcggtatctccaacctgatgctgaaacctgaactgtacctggctgtggggatctccgggcagatccagcacatggttggcgctaacgcgtcgcaaaccattttcgccatcaataaagataaaaatgcnccgatcttccagtacgcggattacggcattgttggcgacgccgtgaagatccttccggcgctgaccgcagctttagcgcgttgatccactctggcagggctgcattttggtcctgccgctgacagggagctcttatgtccgaagatatctttgacgccatcatcgtcggtgcagggcttgccggttcggttgccgcactggtgctcgcccgcgaaggggcgcaagtgttagttatcgagcgtggcaattccgcaggtgccaagaacgtcaccggcgggcgtctctatgcccacagcctggaacacattattccaggtttcgccgaatccgccccggtagaacgcctgatcacccatgaaaaactcgcgtttatgacggaaaagtcagcgatgactatggactactgcaacggtgacgaaacctcgccatcccagcgttcttactccgttttgcgcagtaaatttgatgcctggctgatggagcaggccgaagaagcgggcgcgcagttaattaccgggatccgcgtcgataacctcgtacagcgcgatggcaaagtcgtcggtgtagaagccgatggcgatgtgattgaagcgaaaacggtgatccttgctgatggagtgaactccatccttgccgaaaagctggggatggcaaaacgcgttaaaccgacggatgtggcggttggcgtgaaggaactgatcgagttaccgaagtcggttattgaagaccgttttcagttgcagggtaatcagggggcggcttgcctatttgcgggatcacccaccgatggcctgatgggcggcggttttctttataccaatgaaaacaccctgtcgctggggctggtttgtggtctgcatcatctgcatgacgcgaaaaaatcggtgccgcaaatgctggaagatttcaaacaacatccggccgttgcaccgctgatcgcgggtggcaagctggtggaatattccgctcacgtagtgccggaagcaggcatcaacatgctgccggagctggtcggtgacggcgtattgattgccggtgatgccgccggaatgtgtatgaacctcggttttaccattcgcggtatggatctggcgattgccgccggggaagctgcagcaaaaaccgtgctttcagcgatgaaaagcgacgatttcagtaagcaaaaactcgcggaatatcgtcagcatcttgagagtggcccgctgcgcgatatgcgtatgtaccagaaactaccggccttccttgataacccacgcatgtttagcggctacccggaactggcggtaggcgtggcgcgtgacctgttcaccattgacggcagtgcgccggaactgatgcgcaagaaaatcntccgccacggcaagaaagtgggcttcatcaatctgatcaaggatggcatgaaaggagtgaccgttttatgacttctcccgtcaatgtggacgtcaaactgggcgtcaataaattcaatgtcgatgaagagcatccgcacattgttgtgaaagccgatgccgataaacaggcgctggagctgctggtgaaagcgtgccccgcaggtctgtacaagaagcaggatgacggcagtgtgcgcttcgattacgccggatgtctggagtgcggcacctgtcgcattctggggctggggtcggcgctggaacagtgggaatacccgcgcggcacctttggtgtggagttccgttacggctgatgttggtttgatacgtaacgccgcactgactctcattgcaaaaaacaggaataacccatgcaaccgtccagaaactttgacgatcttaaattttcctctattcaccgccgcattttgctgtggggaagcggtggtccgtttctggatggttatatactggtaatgattggcgtggcgctggagcaactgacnccggcgctaaaactggacgctgactggattggcttgctgggcgcgggaacgctcgccgggctgttcgttggcacatcgctgtttggttatatttccgataaagtcggacggcgcaaaatgttcctcattgatatcatcgccatcggcgtgatatcggtggcgacgatgtttgtttcatcccccgtcgaactgttggtgatgcgggtacttatcggcattgtcatcggtgcagactatcccatcgccacttcgatgatcactgagttctccagtacccgtcagcgggcgttttccatcagctttatcgccgccatgtggtatgtcggcgcgacctgtgccgatctggtcggctactggctttatgatgtggaaggcggctggcgctggatgctgggtagcgcggcgatcccctgtttgttgattttgattggtcgattcgaactgcctgaatctccccgctggttattacgcaaagggcgagtaaaagagtgcgaagagatgatgatcaaactgtttggcgaaccggtggctttcgatgaagagcagccgcagcaaacccgttttcgcgatctgtttaatcgccgccattttccttttgttctgtttgttgccgccatctggacctgccaggtgatcccaatgttcgccatttacacctttggcccgcaaatcgttggtttgttgggattgggtgttggcaaaaacgcggcactggggaacgtggtgattagcctgttctttatgctcggctgtattccgccgatgctgtggctaaacactgccggacggcgtccattgttgattggcagctttgccatgatgacgctggcgctggcggttttggggctgatcccggatatggggatctggctggtagtgatggcctttgcggtgtatgcctttttctctggcgggccgggtaatttgcagtggctctatcctaatgaactcttcccgacggatatccgcgcctctgccgtgggcgtgattatgtccttaagtcgtattggcaccattgtttcgacctgggcactaccgatctttatcaataattacggtatcagtaacacgatgctaatgggggcgggtatctcgctgtttggcttgttgatttccgtagcgtttgccccggagactcgagggatgtcactggcgcagaccagcaatatgacgatccgcgggcagagaatggggtaatttgttcagatttatctcttttctgaatcaatattattgactataagccgcgtgaatatatgactacactttgtgggaaaacaaaggcgtaaacacgcgggctacctatgattcttataatttatgcgcatccgtatccgcatcattcccatgcgaataaacggatgcttgaacaggcaaggacgctggaaggcgtcgaaattcgctctctttatcaactctatcctgacttcaatatcgatattgccgccgagcaggaggcgctgtctcgcgccgatctgatcgtctggcagcacccgatgcagtggtacagcattcctccgctccttaaactttggatcgataaagtcttctcgcacggctgggcttacggtcacggcggcacggcgctgcatggcaaacatttgctgtgggcggtgacgaccggcggcggggaaagccattttgaaattggtgcgcatccgggctttgatgtgctgtcgcagccgctacaggcgacggcaatctactgcgggctgaactggctgccaccgtttgccatgcactgcacctttatttgtgacgacgaaaccctcgaagggcaggcgcgtcactataagcaacgtctgctggaatggcaggaggcccatcatggatagccatacgctggttcaggcgctgatttatctcggttcggcggcgctgattgtacccattgcagtacgtcttggtctgggatcggtacttggctacctgatcgccggctgcattattggcccgtgggggctgcgactggtgaccgatgccgaatctattctgcactttgccgagattggcgtggtgctgatgctgtttattatcggcctcgaactcgatccacaaaggctgtggaagctgcgtgcggcagtgtttggcggtggcgcattgcagatggtgatttgcggcggcctgctggggctgttctgtatgttacttgggctgcgctggcaggtcgcggaattgatcggcatgacgctggcgctctcctctacggcgattgccatgcaggcgatgaatgaacgcaatctgatggtgacgcanatgggccgcagtgcctttgcggtgctgctgttccaggatatcgcggcaatcccgctggtggcgatgatcccgctactggcggcgagcagtgcctcgacgacgatgggcgcatttgctctctcggcgttaaaagtggcgggcgcgctggtgctggtggtactgctggggcgctatgtcacgcgtccggcgctgcgttttgttgcccgctctggcttgcgggaagtgtttagtgccgtggcgttattccttgtgtttggctttggtttgctgctggaagaggtcggcttgtcgatggcgatgggcgcgtttctggcgggcgtactgctggcaagctcggaataccgtcatgcgctggaaagcgatatcgaaccctttaaaggtttgctgttggggctgtttttcatcggtgttggcatgtcgatagactttggcacgctgattgaaaacccattgcgcattgtcattttgctgctcggtttcctcatcatcaaaatcgccatgctgtggctgattgcccgaccgttgcaggtgccaaataaacagcgtcgctggtttgcggtgttgttagggcagggcagtgagtttgcctttgtggtatttggcgcggcgcagatggcgaatgtgctggagccggagtgggcgaaatcgctgaccctggcggtggcgctgtcgatggcggcaacgccgattctgctggtgatcctcaatcgccttgagcaatcttctactgaagaggcgcgtgaagccgatgagatcgacgaagaacagccgcgggtaatcattgccggattcggtcgtttcgggcagatcaccggacgtttactgctctccagcggggtgaaaatggtggtgctcgatcacgatccggaccatatcgaaacgctgcgtaaatttggtatgaaagtgttttatggcgatgccacgcggatggatttactggaatctgcgggagcggcgaaagcggaagtgctgattaacgccattgacgatccgcaaaccaacctgcaactgacggagatggtgaaagaacatttcccgcatttgcagattattgcccgcgcccgcgatgtcgatcactacattcgtttgcgtcaggcaggcgttgaaaagccagagcgtgaaacctttgaaggtgcgctgaaaaccgggcgtctggcgctggaaagtttaggtctggggccgtatgaagcgcgagaacgtgccgatgtgttccgccgctttaatattcagatggtggaagagatggcaatggttgagaatgacaccaaagcccgcgcggcggtctataaacgcaccagcgcgatgttaagtgagatcatcaccgaggaccgcgaacatctgtcattaattcaacgacatggctggcagggaacagaagaaggtaaacataccggcaacatggcggatgaaccggaaacgaaaccctcatcctaataaagagtgacgtaaatcacactttacagctaactgtttgtttttgtttcattgtaatgcggcgagtccagggagagagcgtggactcgccagcagaatataaaattttcctcaacatcatcctcgcaccagtcgacgacggtttacgctttacgtatagtggcgacaattttttttatcgggaaatctcaatgatcagtctgattgcggcgttagcggtagatcgcgttatcggcatggaaaacgccatgccgtggaacctgcctgccgatctcgcctggtttaaacgcaacaccttaaataaacccgtaattatgggccgccatacctgggaatccatcggtcgtccgttgccaggacgcaaaaatattatcctcagcagtcaaccgggtacggacgatcgcgtaacgtgggtgaagtcggtggatgaagccatcgcggcgtgtggtgacgtaccagaaatcatggtgattggcggcggtcgcgtttatgagcagttcctgccgaaagcgcaaaaactgtacctgacgcatatcgacgcagaagtggaaggcgacacccattttccggattacgagccggatgactgggaatcggtattcagcgaattccacgacgctgatgcgcagaactctcacagctattgttttgagattctggagcggcggtaattttgtatattagaattccggcatcactgatacgtgcagatatccgtgtatactagacgtataaattgtacaggagcacgatatcatgactgcaaaacgtaccacacaaagtgtgaccgtcaccgtcgaccgtgagttagtcaatcgcgctcgtgatgcaggcttaaatatgagcgccacccttacggttgcgctcaatgctgaacttaaaaaacatgcagcaacacgttggcgtgaagagaacgctgaagctatcgctgcgttaaatcaattggctgatgaaaccggatgtttctctgatgagtaccggagcttctagcgatgcaatttacggtataccgcagtcgcagcaggaacgccgcgtttccctttgttatcgatgttaccagcgacattattggtgtgattaatcgccgtattgttattccattaacacctattgaacgatttagccgtattcgcccaccagaacggcttaacccaatccttttactggtagacggcaaagaatatgtgctcatgacgcatgagactgcaactgttccagttaacgcgctgggaacgaaattttgcgatgccagcgcgcaccgaacgttgattaaaggagcattagattttatgctcgacgggatttaagacgcgaccgcctctccctcacccaaatccttatgccggttcgacggctggacaaaatactgtttatcttcccagcgcaggcaggttaatgacccaccccagcagcagccggtatccagcgcgtaaataccttccggcgtacctttgccttccagcgatgcccagtgaccaaaggcgatgctgtattcttcagcgacaggtccaggaatcgcaaaccacggtttcagtggggcaggggcctcttccggcgattctttgctgtacatatccagttgaccgttcgggaagcaaaaacgcatacgggtaaaggcgttggtgataaaccgcagtcttcccagcccccgcaattccggtgaccagttatttggcatatcgccgtacatagcgtcgagaaagaagggataggagtcactcgacagcaccgcttctacatcgcgcgcgcactctttggcggtctgcagatcccactgcggcgtgatccctgcgtgggccatcaccagctttttctcttcgtcgatttgcagcagaggctggcgacgcagccagttaagcagctcgtcggcatccggcgcttccagcagcggtgtcaggcgatctttcggtttattgcggctgatcccggcaaatactgccagcagatgcagatcgtgattgcccagcaccagacgtacgctgtcgcctaaggatttcacatagcgcagaacatccagcgaacccgggccgngcgcgaccagatcgcccgtcagccagagggtatctttcccaggggtaaattctactttatgcagcaatgcgatcagttcatcgtaacaaccatgaacgtcgccaataaggtatgtcgccatattcttttaatgaatgagtgtgggaacggcgagtcggaatacgggaatgtcgatgctgaaagggacgccattttcatcgatcatttcgtagtgaccctgcatggtgcccagcggggtttcaatgattgcaccgctggtgtactggtactcttcgccaggcgcgataagtggctggacgccaaccactccttcgccctggacttcggtttcacggccattgccattggtgatcagccagtaacgccccaacaactgcactggcgctcgccccagattgcgtatggttacggtataagcaaaaacgtaacgttcattatcaggtgaagattgtgcctcaatgtagacgctttgaacctgaatacacactcggggcgaattgatcatcgttaactctcctgaaaaggcgcgttctccgccagatagttcgccatctggcaatattgcgcgacagagatattttccgctcgcatcgccgggtcgatccccattcccgttaacacctcgacgctaaacaggttgccgaggctgttacgaatggttttacgacgctggttaaaggcttcggtggtgatgcggctcaacacacgaacatctttaaccgggtgaggcatcgttgcatgaggaaccaggcgcacgacggcggaatccactttgggtggtggtgtaaaggctgacggcggaacttccagtaccgggatcacgttgcaatagtattgcgccatgacgcttaatcgaccatacgctttgctgttcggtcctgcaaccagacgattcaccacctctttttgcaacataaagtgcatgtcggcaatggcatcagtatagctaaacagatggaacatcaacggcgtggagatgttataaggcaggttgccgaaaacacgcagcggctgacccattttctcggccagttcgccaaagttaaaggtcatcgcatcctgctgataaatcgtcagtttcgggcctaagaatggatgcgtttgcagacgtgccgccagatcgcggtcaagttcgatgaccgtcagctggtccagacgttcgccgaccggctcggtcaatgccgccagaccggggccgatttcgaccattgcctggcccttttgcgggttaatggcagaaacaatgctgtcgatcacgaactgatcgttgagaaagttttgcccgaagcgtttacgggctaagtggccctggtggactcgattattcattgggtgttaacaatcattttgatggcgagattaagcgccgtaataaaactgccgacatcggcttcgccacgtcccgccagttcaagtgcggtgccgtggtccactgatgtgcgaataaagggcaggcccagcgtaatgttcacaccgcgcccgaagccctggtattttagcacgggaagaccctgatcgtggtacatcgccagcacggcgtcggcgttatcgagatatttcggctgaaacagggtatcggcaggcagcggcccgttgagtttcatcccctgcgcccgcagctcgtcgagcacaggaataatggtgtctatctcttccgtacccatatgaccgccttcgcccgcgtgcggattcagcccgcagaccagaatgcgcggttcggcaataccaaattttgtacgcaaatcgtgatgcaaaatagcaatcacttcgtgcaaaagtgcaggggtgatagcatctgcgatatcgcgcagcggtaaatgcgtcgttgccagcgccacgcgaagttcttcggtcgccagcatcatcaccacttttttcgcctgcgaacgctcttcgaaaaactcggtatgaccggtaaacggaatgcctgcgtcgttaatgacgcctttatgcacggggcctgtgatcagcgcagcaaattcaccgttcagacagccatcacacgctcgcgccagcgtctccaccacgtaatgcccattttcaatcgctaactgccccgcagtgacagattcacgtagcgcgacaggaagtagcgttaatgtgcccgtagtttgcggttgtgcaggggagttgggggaataagggcggagggtgagcggcaaaccgagcatcgctgcccggtcggtaaggagagtggcatcggcacaaacaaccagttcgaccggccactcacgctgtgcaagctggacaactaagtccgggccaatcccggcgggctcgccgggagtgatcacaacacgttgggttttaaccattagttgctcaggattttaacgtaggcgctggcacgttgttcctgcatccagcttgctgcttcttccgagaacttacggttcatcagcatgcggtatgcacgatctttctgcgcagcgtcggttttatcgacattacgggtatccagcagttcgattaaatgccagccgaatgaagagtgaaccggtgcactcatttgacctttgttcaggcgggtcagggcgtcacggaaggccggatcgaaaatatctggtgtagcccagccgagatcaccgccctggttagcagagcctggatcctgagagaactctttcgctgcggcagcaaaagtcgttttaccactcttgatatcagcagcaatctgttccagtttcacacgagcctgttcgtcagtcatgatcggcgacggtttcagcagaatatggcgagcatgaacttcggtcaccgagatatttttgctttcgccgcgcaggtcgttaactttcagtatatggaagccaacgccggaacgaatcgggccaacaatgtcgcctttcttcgcggtgcttaatgcctgggcgaagatcccgggcaactcctgaatacggccccagcccatctggccgccnttcagcgcctgctggtcggcagaatgagcaatcgccagcttaccgaaatcagcgccgttacgcgcctgatcgacaatggcgcgcgcctggctttccgcttcgttcacctgatcagaggtcgggttttccggcagcgggatcaggatgtggctcaggttcagctcagtgctggcgtcgttttggttacccacctgctgcgccagggattcgacttcctgcggcaggatggtgatgcgacgacgcacctcgttgttacgcacttcagagataatcatctctttgcggatctggttacgataggtgttgtagttcagaccatcgtaagccagacggctgcgcatctgatccagcgtcatgttgttctgtttcgcgatgttagcaatcgcctgatccagctgctcatcggagattttcactcccattttctgccccatctgcaggatgatttgatccatgatcaaacgttccatgatttggtggcgcagcgtcgcgtcatcaggaagttgctgccttgcctgagcagcgttcagttttaccgactgcattaatccatcaacgtcgctttccagcacgacgccgttattgacgacggctgcgactttatcgactacctggggggcagcgaaactggtattcgcgatcatggcgataccgagaagcagcgttttccagttcttcatactttttccatttcaattaaccgcactgcggattacgtggtaaatcaacaaatcacaaagtgttttgatacggcagaatgttcgaacgcagcatctcttgcgtacccagaccgtagttggagctcaggccgcgaagttcgatgttaaagccgattgcgttgtcatataccgcatgttgtttatcgttatcccaaccgttcagcttccgctcgtaaccgacgcgaattgcatagcagcaggagctgtattgcacacctaacatagagtcggcttgcttgttcgcattggtgtcgtagtagtaggccccaacaatggaccaacgatcggcaattggccagctggcgacagcacctacctgcgaaataccattcttatattgctcagcagtggaatagtacttaggcagcgtagcctgaatatattccgggctggcgtaacggtaattcagctgtaccagacggtcttcatcccgacggtattcaatgctggagttactggtcgctacgttatccagacgtgtatcgtactgaatcccgccacgcaatccccaacgctcggagatacgccagtaagtatcgcctgcccacaccagtgaacccgttttgtcgtcattctcccatgttatgttgtcatcgccagtgcgagactccgtgaaatagtagatttgaccaacggaaatattaaaacgttcaacggcagcatcatcatatatgcgagatgtgacaccggtcgtcacctggttagcggaggcaatacggtcaagaccgccgtaagtccggtcccggaacaggccagagtagtcagattgcagcagagacgagtcgtagttatagatgtcgctctgatcgcgatacggcacgtacaaatactgcgcgcgcggttccagcgtttgggtataacccggagccagcatttccatatcgcgttcaaagaccattttgccgtcaactttgaattgcggcattacgcggttaacggattcgtccagcttggtcgtgtttctggagttataccagtcaagattggtttgctgataatgggttgccagcaacttcgcttcggtattgatgctgccccagttattagagagcggcaaattgatggtcggttccaggtgaacacgggttgcttcaggcatgtcgtctctggtgttaacaaagtgcactgcctggccgtaaatacgcgtatcaaacggaccaacatcattctggtagtaattaacgtctaactgcggctctgccgagtagctactggtgttctgttcgctgaaaacctggaactgcttggttgaaacggtggcattgaagttttgcaccgcatagccaacgctgaatttttgcgttgcgtagccgtcagtactggaaccgtacttgttatcgaaatcattgaagtagctaggatcgctgaccttggtgtagtcgacgttgaaacgccacacctgatccatgaccccggagtggttccagtagaataaccaacgacgtgaactgtcatcgttcgggtgttcatcttcatagactttatctgaaggcagatagtccagttccatcaagccagcgcccgcctgggagaggtagcggaattcgttctcccacatgatgttgccacgacgatgcatataatgcggcgtgatggtggcatccatatttggcgcgatgttccagtaatatggcaggtagaactcaaagtagttggtggtggtgtacttggcgttcgggatcaagaaaccagagcgacgtttgtcacccaccggcaactgcaaataggggctataaaagatcggtaccggacccaccttaaagcgggcgttccagatctccgcaacttgttcttcgcggtcatgaataatttcgctacctaccacgctccaggtgtcagaacccggcagacaggaggtaaagctaccgttatccagaatggtatagcggttttcgccacgttgtttcatcaggtccgctttaccgcgaccctggcgacccaccatctggtaatcaccttcccagacgttggtatctttggtgttcagattcgcccagcctttcggccctttgaggatcacctggttatcgtcgtaatggacattaccgagcgcatcaacggtacgtaccggctccggttgtcctggtgcttgatggagctgcacttcgtcggcctgcagacggctgttaccctgcatgatatccacgctgccagtaaacacggcgtcatccgggtagtcccctttcgcgtggtcagcattgatagtcacgggtaagtcattggtatcgccctgtaccagaggacggtcatagcttggcacgcccaacatgcactgtgaggcgaggtcggctgccagtccctgttgactanaaagggcggtggcaatcatggtggccaggagagtggggatacgttttttcatacgttgattttattgttccatcatcggtaacgttgcgcgtgacaaacggtcagagactaacgtactcgtcatctctacgctagtgttaatcctgtccgaatagcgtcagtggtgttaggcacggcattgaatgacaggtatgataatgcaaattataggcgatgtcccacaattgaccgcagccggaaaacggtaaaagcacctttatattgtgggagatagccctgatatccgtgtgtcgatttggggaatatatgcagtattggggaaaaatcattggcgtggccgtggccttactgatgggcggcggcttttggggcgtagtgttaggcctgttaattggccatatgtttgataaagcccgtagccgtaaaatggagtggttcgccaaccagcgtgagcgtcaggcgctgttttttgccaccacttttgaagtgatggggcatttaaccaaatccaaaggtcgcgtcacggaggctgatattcatatcgccagccagttgatggaccgaatgaatcttcatggcgcttcccgtactgcggcgcaaaatgcgttccgggtgggaaaatcagacaattacccgctgcgcgaaaagatgcgccagtttcgcagtgtctgctttggtcgttttgacttaattcgtatgtttctggagatccagattcaggcggcgtttgctgatggttcactgcacccgaatgaacgggcggtgctgtatgtcattgctgaagaattagggatctcccgcgcccagtttgaccagtttttgcgcatgatgcagggcggtgcacagtttggcggcggttatcagcagcaatctggcggtggtaactggcagcaagcgcagcgtggcccaacgctggaagatgcctgtaatgtgctgggcgtgaagccgacggatgatgcgaccaccatcaaacgtgcctaccgtaagctgatgagtgaacaccatcccgataagctggtggcgaaaggtttgccgcctgagatgatggagatggcgaagcagaaagcgcaggaaattcagcaggcctatgagctgattaagcagcagaaagggtttaaatgaccctgtaaatgatgctgagtaactgcccacgataaaaggtggccgccctggcggtcacttctttgagaaaaggcgtttactcagaatggtggacaggctcaatatacggtttacgggagggtttctgttggttttatcgcgttgaccctgcttaaggttgagagctttacggcgagcggaattatatttttacgtcttaaaaataaaaaacacatatctgaatgagcgatttttgaaagtatatttattcagagcgcgcatcatgagtttttaactcaatgcgaggctattaccatgaaagtatcagttccaggcatgccggctacacttttaaatatgagcaataacgatatttataagatggtgagcggggacaagatggacatgaagatgaatatctttcaacgcttgtgggagacgttacgtcatctgttctggtcagataaacagactgaggcttataaacttctgttcaatttcgtgaataaaaaggctggcaacatcaacgcctcaaaatactttactggggctgtcaacgagaatgagaaagaaaagtttatccatagtctggaattattcaatgaactcaaaacatgcgcaaaaaatccggatgagatggtcgcaaagggcaatatgagctgggtcgcacagaccttcggtgatatcgagttaagtgtcactttttttattgaaaataaggagatatgtactcagacgttgcagctgcataaaggcccaggtaacttgggcgttgatcttagagaggcttaccttcccggcgttgacatgagggattgttaccttggtctcaaaacaatgaaaggtcacaataaagtcctttacttggaacctgggtggaatgctaacctggacggtgctaccctggacggtgctatcctggacggtgctaccgtggacggtgctacccacctatatgatgaggtaattattattannnnaatcacccccaaaaaaattgatactgaagaagttgctactaaacaaagtactgctgaacaaattactgacaacgcaattattgaatgagccagaataagctaaggttgaaggggctggaacgccccttcaacnttagcagtagcgtgggatgatttcacaattagaaagacctgcatgatgagctagagaagaggctagtgacgcaaggcgtcgtgtacgacgcggatcaccgagatgggcatcgccaaccagactgctaattagcccatgaataacaatcagaaaggaccataacagacccgataaaatgaaatataagagacggtcaacgggtgaagaaaaagttcaaaaattcgctgtggagcaggaagggaattaccgaatggaaagcgtagccacacgcaacaactgaaagcagtttggcagaaacaaaaaatccccggactcggggatttatgtacaagaggcagcccttaggatgagggtataaacgtacaggaaaggttaaaaatccgctggcgctttaaacgtcatactattgccatacgccggatgggtaatcgtcaacatctctgcatgtagcaacaaacgcggtgccatcgctctcgcttctggtgatgcataaaaacgatcgccgagaatcggatgccccagcgccagcatatgcacacgcaattgatgcgaacgcccggtaatcggttttaacaccactcttgccgtgttatccgccgcatactccaccacttcatattccgtctgcgcaggtttacccgtttcgtaacagactttctgtttcgggcggtttggccagtcgcaaatcagcggcagatccaccagaccttctgcgggggatggatgcccccagacgcgggtcacatactgctttttcggcacgcgctcgcggaactggcgttttaactcccgctccgcggctttggtcagcgccactacaatcacgccgctggtagccatatccagacgatgcaccgattctgcctgcggataatctcgctgaatgcgcgtcatcacgctgtctttgtgctcttccagacgacccggcacagacaacaaaccgctcggcttgttgaccaccataatatggtcatcctgatacaggataaccaaccagggttcctgcggtggattgtagttttccatccccattttcggctccgttactgatgcgttacaacgatcaaacgcagggcatccagacgccaacctgcctgatccaggctttccattacctgctgacggttgctctcaatggcggtcagttcgtcgtcacgaatgttcgggttcactgcacgcagagcttccagacgagacagctcggcagacagtttttcgtcggcttcgttacgtgctgcatcaatcaatgcacgggcagatttctcgatctgcgcttcacccagttgaaggatagcgtgaacatcctgctgcacggcgttaaccagtttgctgccggtgtgacggttaaccgcgttaagctggcggttaaaggtttcaaactctacctgcgccgccaggttgttgccgtttttatccagcagcatacgtaccggcgtcggtggcaggaagcggttgagctgcaactgcttcggagcctgggcttcaaccacataaatcagttccaccaacagcgtacctaccggcaacgctttgttttttaacagtgaaatcgtgctgctaccggtatcgccagaaagaatcagatccagaccgttgcggatcagcggatgttcccaggtaataaactgcgcatcttcacgcgccagcgccacttcacgatcaaaggtgatggtgatgccatcttccgacaggccagggaagtccggcaccagcatatgatcggacggcgtcagcacgatcatgttgtcgccgcgatcgtcctgattgataccgataatatcgaacaggttcatggcgaaggcgatcaggttggtatcgtcatcctgctcttcaatgctttctgccagtgcctgggctttttcgccaccgttggagtggatttccagcaggcggtcacgaccctgttccagctgtgctttcagcgcttcatgttgctcgcggcagtttttgatcagatcgtcaaagccttcggtttgatccggtgaagccagatagttaatcagatcgttgtatacgctatcgtaaatagtgcgtccggtcgggcaggtgtgctcaaatgcatccagaccttcgtgataccagcgcaccagcaccgactgagcggttttctccagataaggcacatggatctgaatatcgtgcgcttggccgatacgatccagacgaccaatacgctgctccagtagatccgggttgaatggcaggtcaaacatcaccatgtggctggcgaactggaagttacgtccttcagaaccgatttctgagcacagcagtacctgtgcgccggtgtcttcttcggcaaaccaggcggcagcgcggtcacgttcgataatcgacataccttcgtggaacaccgcagcgcgaataccttcacgttcgcgcagtacttgctccagttgcagcgcagtggcagctttagcgcagatcaccagcactttctgagagcgatggctggtcaggtagcccatcagccactcaacgcgcggatcgaagttccaccaggtggcgttatcaccttcaaattcctgataaatacgctccgggtagagcatatcgcgggcgcggtcttccgcacttttacgtgcgcccataatgccggagactttaatagccgtctgatactgcgtcggtagcggcagcttaatggtgtgcagctcgcgtttcgggaagcctttcacaccgttacgggtgttacggaacagcacgcggctggtgccgtggcgatccatcagcatcgaaaccagctcctgacgggcgctctgggcatcttcgctgtcgctgtttgctgcttgcaacagcggctcgatatcctgctcgccgatcatctcgccaagcatgttcagttcgtcattgctcagtttgttacctgccagcagcatggcaacggcgtccgctactggacgataatttttctgctcttcaacgaattgcgcgaaatcgtggaaacggttcgggtccagcagacgcagacgggcgaagtggctttccattcccagctgttccggggttgcggtcagcagcagaacgcccggcacgtgctctgccagttgttcaatagcctgatattcgcggctcggcgcgtcttcgctccacaccaggtgatgcgcttcatcgaccaccagcaggtcccactcggcttcacagagatgttccagacgctgtttgctacggcgggcaaaatccagcgagcaaatcaccagctgttcggtgtcgaacgggttgtaagcatcgtgctgagcttcggcataacgctcatcatcaaacagcgcaaagcgcaggttgaaacggcgcagcatttctaccagccactgatgctgtaaggtttccgggacgataatcagcacacgttcagcagcgccagagagcagttgctgatgaaggatcatcccggcttcaatggttttccctaaacccacttcgtcagccagcaggacgcncggcgcgtggcggcggccaacatcatgagcgatgttgagctggtgcgggatcaggctggtacgctgaccgcgcaggccgctgtacggcatacggaactgttcgctggaatacttacgc

SEQ ID NO: 44 - DNA, 29840 bp, Escherichia coli
  Strain O55:H7
  modified_base (3921)..(3921): a, c, g or t
  modified_base (5593)..(5596): a, c, g or t
  modified_base (5887)..(5887): a, c, g or t
  modified_base (6858)..(6858): a, c, g or t
  modified_base (19996)..(19996): a, c, g or t
ataacgcagcgcaaagcggtccatacggtcaatctgcccggcaaacaggcggtcctgcggtttgctgaacaccagtttgctatcaaggaaaacttcacgcagggctacgccggactcttcagtatccaggcgagtaccgatataggtcagcaagccattttcttcttttacttcttcgacttgcatctgccagccgtcatggctggtaatggtatcaccagggttgaacatcacgcgggtcacgggggaatcactgcgtgcgtacagacggttttcaccagtagatgggaaaagtaaagtgacagttcgcgcatccaccgcgacaacggttccaagtcccaattcgctttctgtatcgctgatccagcgttgaccaagtgtaaaaggcatatgtgttcggctctatatctttaattgcaggcaataaccacccgctaccgtgcttatgaggtagtggtgttattcaggtccaggaatggaaagggcgctatggtactggatggcaaagcattcgtcacgcatcaaaatggtatctggcgaactctttttttgctcaaaatagcccaagttgcccggtcataagtgtagcaaaattatcctcaataaaagggagtattccctccgccacgggttgtagctggcgggtcagatagtgttcgtaatccagtggtgaacgttggtagtccagcggctccgggccgttggtggtccatacgtacttaatggtgccgcggttctgatattgcaaggggcgaccgcgcttttggttttcttcatcggcaagacgagcggcgcgtacatgaggcggaacattacgctgatattcgctcagcggacggcgaaggcgtttacggtaaaccagccgcgcatccagttcacccgccatcagtttgtcgatggtttcgcggacgtactcctgatatggctcgttgcggaagatacgcaggtaaagctcctgctgaaactgctgggccagcggcgtccagtccgtacgcacggtttccagccctttaaacaccatccgctgtttgtcgccctcctgaatcagcccggcataacgctttttactgccggtatcggctccgcgaatggttggcatcagaaaacggcagaaatgggtttcatactccagttccagtgcgctggtcagctgttgtttttgcagcgtttccgcccaccagacgttaacgtgctgcaccagtgcacgaccgattttcgtcgcttcttcttccgaatgtgcgcctttcagccagacaaacgttgagtcggtatcgccgtagatcacgtcgtagccctgcgcttcaatcaacgctttggtttgccgcatgatctgatgaccacgcatggtgatcgacgataccagccgcggatcgaagaagcggcaggcggtggtgccgagcacgccataaaaggcattcatgatgattttcagcgcctgcgacagcggtttgttaccctggcgtttggcttcatcgcgtccgtgccagatgttagtcacaatctccggcaggcaatgtttttctcgcgagaaccaggcatcgagaaagccttcggtgctgtgctctggatcaggctgcgccatgccttccaccagcccgacgggatcaatcagaaaggtgcggatgatcgacgggtacaggcttttgtagtccagcaccagcaccgaatcataaagcccaggtcgcgaatccatcacgtagccgccagggctggcgtgcggcggcacttcgccgagattaggcgcgacataaccagcgcgatgcatacggggaaaatagagatgaccaaacgctgccaccgacccgccgtgtcgatccaccggcaggccgttcaccgttgctcgttcgagcaaaaacggcatgatttcagttttatggaagatctgcgtcaccagctcgcaatctttcaggttataagttgccagcgcaggtttatcttcggcgaaacggcggtcaatttcgtccattcgatcccacgggttatcgatagattttccttcgcctaatagctcctgagcgacagtttccagcgagaatgaagagaaattccagaacgcggatttcagcgcctcgataccgtcgataattagccgacctttagcctgggcaaaaaagacgccgtttttaaagccgtgctcgcgccactccagctcactgttatcgcgccccagccgcagcggaatacgataacgctcggcatgtttttgcagcattcgcagatcaaactgcaccacgttccaaccgatgatcacatcaggatcgtagtttgcaaaccaggcgttgagtttttccagtagctgcgggcggctggcgacgtactccagttcaaaatcgagcgcggaggcgtcgccattctctggtcccagcatataaacgatgcgctgcccgcagccctccaggccgatgcagtacagctctccgtggcgggtggtttcaatatcaatagaaacccacttgagcggcggacgatagtcgggatgcggtttcagacgggcattaacgatagcgccattgtgcatatcaccctcgacccacaccggtgaggtgataaaccgctccatcagatagcgttctggcgggcgcacattggcctcgtagacggtaacgccaccttcacgcaggcgcttttcgtaattcatcaactggcgatgggcgcgacagtaaaggccatacaccggctggcggtgaaaatcctttaacgccagcggcgtcaggcgaaagccttgttcaccccgcaaaatatgctgagcgcggggaacctgatcggcgggaataaacgccacggactcttgcggtgcaagcgtaacctgcaacggcccgttgtccgtcgccagccagaaggagacctctgttccttgcggggtatcccgccagtgtcgggttaagataaaacctgcctgcgccacgctgaaaatccatcaaaaaaccaggcttgattatagcctggtttcatttgattggctgtggttttatacagtcattactgcccgtaatatgccttcgcgccatgcttacgcagatagtgtttatccagcagcgtttgctgcatatccggtaactgcggcgctaactgacggcagaatatccccatataagcgacctcttccagcacgatggcgttatgcaccgcatcttcggcatttttgccccatgcaaatgggccgtgagaatggaccagaacgccgggcatttgcgctgcatcgataccctgtttttcgaaggtttctacgatgacgttaccggtttcccactcatattcgccgttgatttctgcgtcggtcattttgcgggtgcagggaatggtgccgtagaaatagtcggcgtgggtggtgccggttgctggaatcgactgacccgcctgcgcccagatggtggcgtggcgcgagtgcgtgtgcacaatgccgccaatggacgggaatgcctgatagagtagtcggtgagttggcgtatcggaggagggctttttcgcaccttcaaccacttcaccggtttcgatgctgaccacgaccatatcgtcagcggtcatgatgctgtaatcgacgccggaaggtttgatcacaaagacgccgcgctcgcgatcaacggcgctgacgttgccccatgtgagcgtgaccaggttgtgttttggcagcgccaggttggcttctaatacctgacgtttgagatcttctaacatgttgactccttcgtgccggatgcgcgttgcttatccggcctacaaaatcgcagcgtgtaggccagataagacgcgtcagcgtcgcatcaggcgctgaatgccggatgcgcgttgcttatccggcctacaaaattgcagcgtgtaggcctgataagacgcgccagcgtcgcatcaggcgttacataccggatgcggctacttagcggcgaaacccgtaatacacttcgttccagcgcagcgcgtctntaaacgctggcaggcgggtgtcgttatcaatcaccgtgatttcaatgtcgtgcatctcggcgaactggcgcatatcgttgaggttcagcgcatggctgaagacggtatggtgcgcgccaccagcgaggatccacgcttcggaagcagttggcagatccggttgcgctttccacagcgcattcgccaccggcagtttcggcagggagtgcggtgttttcaccgtgtcgatgcagttaaccagtagacggtaacgatcgccgagatcaatcaagctggcgacaatcgctggaccggtttgggtattgaagatcaggcgggcaggatcgtccttaccaccaataccgagatgctgaacgtcgaggatcggtttctcttctgcggcgatcgacgggcagacttccagcatatgggagccgagcaccaggtcattgcctttctcgaagtgataggtgtagtcctccataaaggaggtgccgccctgcagaccggttgacatcaccttcatgatgcgaagcagggcggcagttttccagtcgccttcgcccgcaaagccgtaaccctgctgcatcagacgctgtacggccagaccaggaagctgtttcagaccgtgcaaatcttcaaaggtggtggtgaacgcgtggaagccaccttgttccaggaaacgtttcatccccagctcaatacgcgccgcttccagcacgttctgtcgtttttcgccgtggatttgtgtggcaggcgtcatggtgtagcagctttcgtactcatcgaccagcgcgttaacatcgccgtcgctgatggagttcaccacctgcaccagatcgccaaccgcccaggtattgacggagaaaccgaacttgatctgtgcggcaactttatcgccatcggtgaccgccacttcacgcatgttatcgccaaatcggcagactttcagatgacgagtatcctgtttagataccgcctgacgcatccaggagccgatacgctcatgggcttgtttatcctgccagtgaccggtaaccacggcatgttgctgacgcatacgcgcgccaatgaagccgaactcgcgaccgccgtgcgcggtctggttcaggttcataaagtccatatcgatgctgtcccacggcagcgccgcgttgaactgggtgtggaattgcagcaacggtttgttgagcatggtcaggccgttgatccacattttggccggggagaaggtgtgtagccacaccaccagaccagcgcaacgatcgtcgtaattagcatcacggcaaatagcggtgatttcatccggcgtggtgcccagcggtttcagtaccagtttgcagggcagtttcgcttccgtattcagcgctttcacaacgtgctcggcatgttgggtgacctgacgcagggtttccgggccatacagatgctggctgccaattacaaaccacacttcataattatcaaaaatcgtcattatcgtgtccttatagagtcggaacggcctgggcagcctgtgccggggcggaagttggaagatagtgttgttcggcgctcatcgcccattgctgatagcggcgataaagctgttcaaagcgttgtgcctgttcgctgcgcggttgcagggttttctctaccgcactggccattttttgctgggctgatgggatgtctgcgtgcactttcgcggcgnnnncagcaaaaatcgccgcaccgagcgcacagcattggtcagaggcaacaatttgcagcgggcgattcagcacgtcgcagcaggcctgcataatgacctggtttttccgcgcgatgccgcccagcgccatcacgttattgacggcgatcccctgatcggtaaagcactccatgattgcgcgtgcgccaaaggcggtggcagcaatcaaaccgccgaacagcagcggagcgtcggtagcgaggttaagatcggtaatcacccctttcaggcgttggttagcgttcggtgtgcggnggccgttaaaccagtcgagcaccaccggcaggtgatccagagacggatttttggcccatgcttcggtcagcgccggaagcagttgtttctggctggcgtcgatttgctcttttagttccggatgctgggcggcaagctgttccagcggccagccgagtacgcgaccgaaccaggcgtagatatcaccaaacgccgattggcctgcttccagaccgataaatccaggcaccacgctgccatcaacctgaccgcaaatacctttcactgcccgctcgccaacgctctgtttgtcggcaatcagaatgtcgcaggtggaagtaccgataacttttaccagtgcgttaggctgtgcgcctgcaccaactgcgcccatatggcagtcaaacgcgccgccggaaatcaccacgctttcaggcaggccgagacgctgcgcccattccgggcataaggtgcccaccggaatatcggcagtccaggtatcagtgaacagcggggaaggcaaatggcgattgaggatcggatccagctcatcaaagaaactggctggcggcaggccgccccagctttcgtgccatagcgacttatgcccggcgctgcaacgtccgcgacgaatatcctgcgggcgcgtggtaccggaaagcagagctggcacccagtcgcacagctcaatccacgatgcggcagattgcgccacggcgctgtcctggcgagtcacatgcaggatttttgcccagaaccattcgctggaataaataccgccaatatagcgggagtagtcaacattgcccggcgcgtggcacaaacgggtaatctcttccgcttcttcaaccgcagtgtggtctttccacaatacgaacatcgcgttcgggttttcggcaaactccgggcgcagcgccagcacgttaccgtcggcatcaatcggtgcgggcgtcgagccggtactgtcaacgccaatcccgaccacagctgcncgctgttcgacgctaagttctgcaagcacggttttcagtgccgcttccattgactcaatgtagtcacgcggatgatgacggaactggttattcggggcatcacaaaattgccctttttgccaacggggataccactctacgctggtggcgatttcttcaccggtggtgcagtccaccgccaaagctcgcacagaatcactgccaaaatcgaggccaattgcaatcgccatcgtttcactccatccaaaaaaacgggtatggagaaacagtagagagttgcgataaaaagcgtcaggtaggatccgctaatcttatggataaaaatgctatggcatagcaaagtgtgacgccgtgcaaattatcaatgtggacttttctgccgtgattatagacacttttgttacgcgtttttgtcatggctttggtcccgctttgttacagaatgcttttaataagcggggttaccggttgggttagcgagaagagccagtaaaagacgcagtgacggcaatatctgatgcaatatggacaattggtttcttctctgaatggcgggagtatgaaaagtatggctgaagcgcaaaatgatcccctgctgccgggatactcgtttaacgcccatctggtggcgggtttaacgccgattgaggccaatggttatctcgatttttttatcgaccgaccgctgggaatgaaaggttatattctcaatctcaccattcgcggtcagggggtggtgaaaaatcagggacgagaatttgtctgccgaccgggtgatattttgctgttcccgccaggagagattcatcactacggtcgtcatccggaggctcgcgaatggtatcaccagtgggtttactttcgtccgcgcgcctactggcatgaatggcttaactggccgtcaatatttgccaatacgggtttctttcgcccggatgaagcgcaccagccgcatttcagcgacctgtttgggcaaatcattaacgccgggcaaggggaagggcgctattcggagctgctggcgataaatctgcttgagcaattgttactgcggcgcatggaagcgattaacgagtcgctccatccaccgatggataatcgggtacgcgaggcttgtcagtacatcagcgatcacctggcagacagcaattttgatatcgccagcgtcgcacagcatgtttgcctgtcgccgtcgcgtctgtcacatcttttccgccagcagttagggattagcgtcttaagctggcgcgaggaccaacgcatcagccaggcgaagctgcttttgagcactacccggatgcctatcgccaccgtcggtcgcaatgttggttttgacgatcaactctatttctcgcgagtatttaaaaaatgcaccggggccagcccgagcgagttccgtgccggttgtgaagaaaaagtgaatgatgtagccgtcaagttgtcataattggtaacgaatcagacaattgacggcttgacggagtagcatagggtttgcagaatccctgcttcgtccatttgacaggcacattatgcaagcattgctggaacactttattacccaatccaccgtgtattcattgatggcggtggtgttggtggcctttctggagtcgctggcgctggtcggtttgattctacccggtacggtgctgatggcggggctgggagcgctgattggcagcggcgagttaagtttctggcacgcctggctggcagggatcgtcggttgtctgctgggcgactggatctccttctggctgggctggcgttttaaaaagccattgcatcgttggtcatttctgaagaagaacaaagcattactcgataaaactgaacatgcgttgcatcaacacagcatgttcaccattctggtcggtcgttttgttggcccgacgcgtccgctggtgccaatggtggcgggaatgctggatctcccggtggcaaaatttatcacgccgaatattatcggctgcctgctgtggccaccgttttacttcctgccggggattctggcgggtgcggcgatcgatattccagccggaatgcagagcggtgagtttaaatggttgctgctggcgacggcggtatttttgtgggttggtggctggctgtgctggcggttatggcgcagcggcaaagcaaccgatcgtttgagtcattatttgtcccgcggtcgtttgttgtggctgacgccgttgatttctgccatcggcgtggtggcgctggtggtgttagttcgccatccgttaatgccggtgtatatcgatattttgcgtaaagtggttggagtttagggcatagtcttgtgtggggcgcttgatgcggacaaaacgcacccgtaggtcggataaggcgttcacgccgcatccgacagtgcatattaacctgtaattcccaacagcgccgaagcactcgccttaccgctcaacaactcattggtcataccctgccaggcgattcgcccgtcggcgactactaccgagcgcgtggcaatccgcgccgcatcttccacactgtgcgacaccatcaatagcgtcattttttgctgctggcagctagtgctcaccagcgtcaacatctcctgacgtagcgccggatcgagcgcagagaacggttcatcgagcaataaaatcggctgttcgcgtaccagacaacgcgctaacgccacgcgctgtcgctgaccgccggaaagctcgcccggtaaccgcgccattaaattatcaatccccatctgacgggcaatcgcgtgcattttctcctgctgtaccgcgttcagcttcaatcctggattaagccccagcccgatgttctgcgcgaccgtcaggtggctgaacaggttgttctcctgaaacagcatcgacaccggacggcgtgacggcggcgtcgtggtgtgatcaacgccgtcgatagtcagcgcaccgctggctggtgtcagaaaaccggcgatcaagttcagcagggtacttttacccgcgccgcttggcccgaggatcgccacctgctcgccgcgttctaccgttaagctaaaacgcatcggcaaatggtgataaagccaggtgatatcagtcagttttaacatttcgccccggtattttttcaatcacggtaaacagcagaaaacagagcagcagcagaattaacgcggtgaccgcgccgtcctggctgcgataggagccaatttgctggtagagataaaacggcagggtgcggaaatcatcgttaccgaacaacgccaccacgccaaaatcaccaatcgacagcacgcaggcaaaggccagcgcctgcgccagcgggcgtttcagggcgcgcagctccactacttttaagcgtgaccagccttcaatccccagcgactgacataacatgctgtagcgggcggtgatatcgcgcatcgggttttccagcactttcagggcgtaggggatcgccattaacgcattggtgaaaatcacaatgccgtcagcagattgtggcaggccgatagtgttgttgagcagtaaaaagaagcccgttgccagcacaatccccggcatagcgaggatcaacatgccgctcatctccagcgcctggcccgccagcattttttgccgcgcccgcagttcgcgactgctccatagcagcatcatggtcagcactacgcacaatacacctgccgccagcgcaatacgcaacgaggtccacagcgcctgccacagcaccggttgtgccagcacttccggcaactggcgatttaccccatcgacgatcaccgccagcaacggtggcagcaacagcagcagcgccagcacaattaacatcgtgtcgcaaatgcggctatgcagacgatcgtccgggtcgcgccagccttgcagcagcgtggtgccgggcgcaatggccttactcagtcgctgactcaacagcaccagcccaaggcaacacaccatctggatcagcgccagcatcgccgcgcgggcaggatcgtagtcgtaactcagcgcctgatagattgccagctcgatagtggttgcctgcggaccgccgcccagcgataacacggtggcgaagctggcgaaacagagcataaagataagcgcggtaaccggcgggatttgtcgccgtaaccacggccattcgacgaagcggaaaaaatgccagccgcgcatcccaagctgggcggcaagctgacgttgttcgccgggaatgttttccagtgcctggagtaataagcggctcgccatcggcagattaaaaaacacatgggccagcaaaatgccttgcaggccgtagggcgaaaaggtccactccagaccgagcgattggcagagcgatgccagccagccctggcgaccatagacgctaagaatgccgaaaacagcaaccagcaccgggaggatcaaggtcattgcgcacagacgcaacagcgccagccgacccggaaagcgcctgcgatagagcgcgcgggcgaggaatatcgcgggtacgacagagagtagcgccgagagaaacgcctgccagaaggagaagcgcaccacatgccacaggtagctgtcctgccagactgccgaccagtcaccctgcggcgcgttccaccacagggcgagaaacgccgccagcgcaaccgctaccaccagcgtggcggcgcttacacctggaattaaccagccgggaattaacggctgacggcgcgttgccattcgctaatccatgcctgacgttgtgccgccacttcggctggcgtgaactccagcgtggttgcgggtttggtcaatttttcaaaaccggcaggcagcgtgacgtttgccaccggatacatccagttgccggttgggatcgcattctggaaagccggagaaaccataaactggaggaatttttgcgccagctccggctgcttgctggcagcggtgcgagcggcgacttccacttgcagatagtgaccttcgctgaagttcgcggcggcgtagttatctttcttctcttcgagaatgtgataagccggagaggtggtgtaactcagtaccagatcgctttcaccttttaaaaacaggccgtaggcttcgctccagcctttggtgaccgtgaccgttttcttcgccagtttctgccaggcttgtggggcgtcatcgccatagactttttgcatccatagcaacagacccagccccggtgtactggtgcgcggatcctgataaatcacccgccagttttgatcgctctcaaccagttctttcaggctttgtggcgggtttttcagtttgttcttgtcataaacgaaggcgaagtagccataatcaaacggtacgaaaatgtcattattccagccgccgggaacgttaacggcatccgctgccacaccgcttttggcaaacagtccggttttactggcggcgtctaacagattgttatccagccccagcaccacatcggctttactgtttttgccttccatccgtagacggttgagaagcgaaacgccatcttccagcgccaccagtttcagttcgcaattacagtcggcttcaaaggcttttttaaccaccggaccaggcccccagtcggcggcgaaggaatcgtaggtataaacagtcagaacgggtttagcgaaaacgggcgctgtgcacagcaacagcaggggaagacatttttttaacactttgcacctcaaaaaagagtggcaaaggacttgagaaggagcctcaaatcccttcgccggcgttatccggatcaggttcgacgggtattttctcagcgcacgcgtccgcgtggcaccccgttgagaacggcgttagtgtagtgattttgttatcaaccagcaatccatagagaaggcgtattaaaaaagccaatattcgttcagctatcaagagcgtatttgcatagctggagagcgttgatccgaaagaatcccttcgctacagtcaaaataggtaacgtaaccgtttattgcgtgaatgagcgatttttgacagtattcttattcaggacgcttattctgagttttttactcagagtggagctatcagcatgaaagtaagaaacccagaacagattagtatccctgctagtaataccactaaagatccaggccttactaattctcagattatcaggatggctaacttggtcaaaaagaccgagaatatgaatatctttgaagagctatgggagacgttacgcaatctcttccagtcagataaacattcccagactgcggcaaggcaaattctgaaggatgcattttatttccagaatagtgatgactactcaaaatactttaccggggctgtcgacgggaaggcgcgtgataagttaactcactggctgataaaatttaatgaactcaaagaatacgcaaaagatccggaaaatatggccgcgaaggcctcactctcgccagaaggtacgttatgcgtcagtttttttattggcgatgaggcgatatttactctggagttgcagctgaaaaagagcaccaggaccggggggattgatctgagtaatgcttactttaacggggttgtcatttgtggtattgactgtctcgaggttgacctgagcaatgctgaaacgaacaatagccgttggtatgactgacctgcgcgaggttaacctgaaaaagctgacctttccggccagaacaaggctagactgcgccgttattgattaactcagaatatgaaagaggggctggaatgccccttctttaatcttatttgcgacgctaatcagacgatgcataaaacagagaaaatataaaagtaatgtattttatcattccgtctgaatataaaaaatgcgctcatgaccgccaaaaggcgcaagctactctggatccggcggcgcaaaccacgctgatttaaaatcaaaccagccgagggtgttcatgcgcaggccgcgcatactgcgttgtccctgaatgatcagccagtggtggataagtggcaccattgctttgctggcgaccagttgttggcaccagttcgccaggttcatttcgccattgcgccagcgggcggcgtcggcttgccagtcgattggaatacagtgttggagcagcggtacctcgcacaggtgcgcgaacagcgaaaaatccagcggcagcgtaaagttggcgctgttaagccagatatcgctctcgatctctccttcatgccactgatcgtagctgatctctttgatttccagtgtgacctggtggcttgccagaatctgctgcatgatcccggcaatcacccgatgctcactgtgatcctgataaaaggtcagggtgaggctttccagaccagccggtttttcgctcgttatggtgcgggcatgatgccaacgggggagcagtccataagccgggaaccacagttgctggtactgttcctcagcgaaatagaccagattagttggagaaagcacatagcttacccagtccctgacttgctgattcgccccgcgatgggtgcggctatcgaacagtaaatagtagcaaccttcctccaggcggctttcaatctctttttcctcgccctgtggaccttttagcatcagccctccggctggctcgtcggcaatttccggcagaacccagacgttaacttcatcgattaatgcccggtaaccgaagaagtcatcgaatgcctgaattttcagttgattggtgctgttgcgaatcaccgcatacggaccggtgccgatgggatggctggcaaagttactgagggtttcccattcgcgcggcaggatcatcgccggaacttgtcccagcagtaacggcaaccagcgatccggctgcgtgaggtggatatccagcgtccagggcgtcggcgacacaatgtcagcaatatgcgaatagagcggcagcgtattgattcgttttaaagaggcgatcacgtcgtccatttccagttcacgaccatgatgaaaatggactcctggacgcaaaaagaaacgccagtgaagcggtgatatttgctgccagtggtgggcgatgtctgcttccagttccccattttcctcatttatgcgcgttagcgaactgaagatttgccgggcgatatgggtttcggaacggcgcaatgcgctgccaggtagcagattacgcaacggacgatagtagagcacgcgcaggatgtgccgcccctggcggaagctgcggcccagatgagaaaccagcatttgcctcacagtcgctttgtcgccaactaactgcactagttggtcgatacggtcctgctccagcaggtcttccgcccgctgttgctgaagcgccagcccggtatagaggaatgtcagacgcgagcgtttaccacgcccgacttccgcttcccacgtcagccagccgcgatcctgcatggtgttgagcagggtacgcatatgacgacgcgagcagctcaataacgctgccagttcgttgagcgttgtgtcctgcgatttaccctcgcagcattgccacaggcggatgaactgttgttgcagacgagcagatggcataaaaggggaactcctgcgcaaaagacagcaattttattttccctatattaagtcaataattcctaacgatgaagcaaggaggtgccccattcgtcagttttatcagcactattttaccgcgacagcgaagttgtgctggttgcgttggttaagcgtcccacaacgattaaccatgcttgaagaactgatgcagtgggaggggagtcattctgactactgatttgcggacatcatgtgtgactgagtattggtgttaatcgccacgccagcagtgattatctgctggcttttttctttttggcgattgagtatcggacggtgtacaaactaacgcataaacgcgggttgcttcgcttcataagccgcaatggcgtcgtcgtgctgcaaggtaagcccaatgctgtccagaccgttcatcatgcagtggcggcggaaggcatcaatggtaaagcgataggttttctcacccgctttcacctcttgcgcttccaggtctacatcaaaatgaatccccggattggctttcaccagcgcaaacagctcatccacttctgcgtcgcttaatttcaccggcagcagctggttgttaaagctattgccgtagaagatgtcagcaaaactcggcgcaatcaccaccttaaaaccgtagtcggtcaatgcccagggcgcgtgctcacgcgaggagccacagccgaagttttctcgtgccagcaaaatggaagcgccctgatactgcgagaagttcagcacgaagtccgggtttggctgttggcctttttcatccagaaaacgccagtcgttaaacagatgcgcgccaaaaccagtacgggtcactttctgcaaaaactgtttcgggatgattgcatcggtatcgacattggcggcatccagcggaaccaccaggcctgtgtgtttgataaatttctctgccatggtgtgctccttatttaatgttgcgaatgtcggcgaaatggccggtcacagccgcggcggcagccattgccgggctgaccagatgcgtgcgcccgccgcgcccctgacggccttcaaagttacggttgctggtggaggcacaacgttcgcccggattcagacggtcgttgttcatcgccagacacattgagcagccaggtaagcgccattcaaaaccggcttcaataaagattttatccagaccttccgcttccgcctgcgcttttaccggaccagagccgggaaccaccagcgcctgtacgcctggcgcgactttccgccctttggcgatttccgccgccgcgcgtaaatcttcaatacgtgagttggtgcaggaaccgataaacactttgtcgatagccacttcggtcagcagaatacccggtttcagccccatataggccaacgctttttctgccgacgcgcgttcaaccggatcggcaaacgaagccggatcgggaatattgtcgttcacggaaatcacctggcctgggttagttccccaggtgacctgcggtgaaatctcttctgcctgcaaagtgacaacggtatcgaaagttgcgccttcgtcggtttgcagggttttccagtaggcaacggcgtcgtcgaaatctttgcctttcggcgcatgcagacggcctttgacatagttaaaggtggtttcgtcaggtgcaaccagaccggctttcgcgcccatttcgattgccatattgcacagggtcatccgaccttccatgcttaaatcacggattgcttcgccgcaaaactccaccacatgcccggtgccgcctgcgctaccggttttaccgataattgccaacacgatatcttttgcggtaatgcccggcgcggctttgccctggacttcaattttcatggtcttcgcacggccctgtttcagggtttgcgttgccagtacgtgttcaacttcggaagtgccgataccaaaggccagtgcgccaaacgcgccgtgggtggcggtatgcgagtcgccgcagacaatggtcatccccggcaaggtcacgccctgttccggccccattacgtggacgatcccttgataggggtgattcaggtcatacagttcgacgccaaattctttgcagtttttgatcagctcctgcatctggatgcgcgccatttcaccgcaggcattaatgtctttagtctgggtagagacgttgtgatccatggtggcgaaggttttgcccggctgacgtaccgggcgaccgtgggcgcgcagaccatcgaacgcctgcggtgaggtcacttcatgcaccaggtggcggtcgatatataacagcggggtttcgttttcggcttcgtacactacgtgagcgtcgaataatttttcgtataacgtcttagccatgattacaccccttctgccacatagcgggcaatgatatcgcccatttcatcggtactaacggcggcagcgccacgggctaaatccccggtgcgaatgccttcttctaatgcgcggttaatggcgcgttcaatggcggaagccgcatcatcggcatccaggctgtaacgcagcagcagtgccagcgacagaatttgcgcaatcgggttggcgatgtttttacctgcgatatctggtgccgagccgcccgccggttcatacagtccaaaaccttgctcgttcaggctggcggaaggcaacatccccatcgagccagtgatcattgcgcactcgtcagacagaatgtcgccaaacaggttggagcacagcagaacgtcaaactgtgatggatctttaatcagctgcatggtggcgttgtcgatgtacatatgcgccagttcgatatccgggtattccgtggcgatctcgttgacgatttcacgccataaaatagaggattgcagcacgttggctttatcgatcgacgtcactttatggcgacgtttacgagcagattcaaacgcgatgcgggcaatacgctcgatctcaaaacggtgatacacctcggtatcaaacgctttttcatattgtccgctaccttcgcggccttttggctgaccgaaatagatgccgccggtcagttcgcgcacgcacaggatgtcgaagccgtttgcggcaatgtctgcacgcagcggacagaatgcttccagcccctgatacagttttgccggacgcaggttgctgaataatttgaagtgcttacgcaaaggcaacagcgcgccgcgttctggttgctggtccggtggtaaatgttcccatttcgggccgcctaccgagccaaacagcacggcatcggcttgctcacaaccttcaaccgtcgcaggcggcagtggttgcccgtggttatcaatggctgcgccgcctacatcgtaatggctggtagtgatgcgcatcgcaaagcggttgcgcacggcatccagcactttcagcgcctgggtcatcacttccggaccaatgccatcccccggcaatacggcaatatggtaattcttcgacatcacacggtttccttgttgttttcgttgtgttgagctttgcgttgcaactctttttcgacttctgtggcacgccagatattgttaagtacgtgcaccatggctttggcggaggactcgacaatatcggtggccaggccgacgccgtggaagcggcgaccgttgtagttggcgacaatatccacctgacccagcgcatctttaccgtgacctttggcggtcaggctgtatttcaccagttcgacgttatagtcagtgatgcggttaatcgcctgatagacggcatcgaccggaccgttaccgttggcggcttctgctttgacttcttcgccgcaggccagtttgacggcggcggtggcgatatcgttagagccagactgcacgctgaagtaatccagacggaaatgctccggctcttcttgctgcttaccgatgaaggccagcgcctccagatcgtaatcaaacacctgaccttttttgtccgccagcttgaggaaggcgtcgtacaaattgtctaaattatattcactttctttataccccatctcatccatgcgatgtttcaccgccgcacgccccgaacgagaggtcagattcagctggatttggttcagaccaatagattctggtgtcatgatttcgtagttttcgcggtttttcagcacgccatcctggtggataccggaggagtgtgcgaatgcgccgctgccaacaatggctttgtttgccgggatcggcatattacaaatctggctaactaactggctggtgcgccatatctcctggtgattaatggcggtgtggacgttgagaatatccttacgaactttaatcgccatgatgacttcttccagggaacagttaccggcacgctcgccgatcccgttcattgcaccttccacctggcgtgcaccggcatgtaccgccgccagtgagttgccgaccgccaggcccaaatcgtcgtgggtatgtacggaaataatggctttgtcgatgttaggcacgcgttcatacaggccgctaatgattccggcgaactcaaacggcatggtgtagcccacggtgtccggaatgttgatggtggtggcaccggcattaatcgccgcttcgaccactcgcgccagatcggcaatgggtgtacgcccggcatcttcgcaagaaaattcaacatcatcggtgtaattacgggcgcgtttcaccatatagatagcgcgttcgatcacctcgtccagcgtgctgngcagcttggtggcgatgtgcattggcgaagtggcaataaaggtatgaatacggaaggcttcggcgactttcagggattcggccgccacgtcgatatctttctccacgcagcgagctaacgcgcatacacggctgtttttaacctggcgagcgatggtttgcactgattcaaaatcacccggcgaagagacggggaacccgacttccatcacgtcaacacccatacgctcaagggccagcgcaatttgcagtttttctttcacactcaagcttgcctgtaacgcctgttcaccgtcgcgcaatgtggtatcgaaaataatgacttgctggctcatggtttgggtccttgtctcttttagagcgcctcgcttcgggcataaaaaaacccgcgcaatggcgcgggttttttgtttgactgcgtgctggcttaatgctggatgccgctcactcgtctaccgcgcaaagaagatgcgtttagtagtagtagaccgataaagcgaacgatgtgagtcattaaatcagctccagatgaatgcgatatgcttttagagttactggatacaaaaacggatgtcaaccctgacgcaataaaaacgtcccgccagcatgagttctgcatccgtaagattagctaattgtgctgctgtggttaaaacaagcgatattaatttctgcttaactaccgatgcttttcatcggttgacatatttcagaataaatttttgcatctaatccacgaggaaaaaggggacaaaatgcacgcgttgcaaaacctatcctgatgatttgtattgaattatatgttttgcggattttttgatattgatttggtgaatattattgatcaattaatgttaagaattaatgcattaaacatataaataaattattaaaaagcacatttaatccattttgtggatgattgagtattcgcggtagttatgattagattgtttacgcaacaagaacattatggattattatgctgtggtaaatgacgctttccacggcaatggattctgtttttataagaacccgtatctttatgttttcctaattttactcattttcctttttcttattttatatgcatgataaatcatattctcgaggattatttctctgcattccaataagggaaagggagttaagtgtgacagtggagttaagtatgccagaggtacaaacagatcatccagagacggcggagttcagcaagccacagctacgcatggtcgatctcaacttattaaccgttttcgatgccgtgatgcaggagcaaaacattacccgtgctgctcatgttctgggaatgtcgcaacctgcggtcagtaacgctgttgcacgcctgaaggtgatgtttaatgacgagctttttgttcgttatggccgtggtattcaaccgactgctcgcgcatttcaactttttggttcagttcgtcaggcattgcaactagtacaaaatgaattgcctggttcaggttttgaacccgcgagcagtgaacgtgtatttcatctttgtgtttgcagcccgttagacagtattctgacctcgcagatttataatcacattgagcagattgcgccaaatatacatgttatgttcaagtcttcattaaatcagaacactgaacatcagctgcgttatcaggaaacggagtttgtgattagttatgaagacttccatcgtcctgaatttaccagcgtgccattatttaaagatgaaatggtgctggtagccagcaaaaatcacccaacaattaagggcccgttactgaaacatgatgtttataacgaacaacatgcggcggtttcgctcgatcgtttcgcgtcatttagtcaaccttggtatgacacggtagataagcaagccagtatcgcgtatcagggcatggcaatgatgagcgtacttagcgtggtgtcgcaaacgcatttggtcgctattgcgccgcgttggctggctgaagagttcgctgaatccttagaattacaggtattaccgctgccgttaaaactaaatagcagaacctgttatctctcctggcatgaagctgccgggcgtgataaaggccatcagtggatggaagagcaattagtctcaatttgcaaacgctaactgaatgcagaataggtcagacatgaatgtctggtttattctgcattttttattgagtgtagaattttattctgaatgtgtgggctctctattttaggattaattaaaaaaatagagaaattgctgtaagtggtgggatttagccgatttattatcatttttatccttcgtaatggaggattttatcgtttcttttcacctttcctcctgtttattcttattacccggcgtttatgtctctggctgccaattgcttaagcaagatcggacggttaatgtgttttacacattttttccgtcaaacagtgaggcaggccatggagatgttgtctggagccgagatggtcgtccgatcgcttatcgatcagggcgttaaacaagtattcggttatcccggaggcgcagtccttgatatttacgatgcattgcataccgtgggtggtatcggtcatgttttagttcgtcatgagcaggcggcagtgcatatggccgatggtctggcgcgcgcgaccggggaagtcggcgtcgtgctggtaacgtcgggtccaggggcgaccaatgcgattaccggcatcgccaccgcttatatggattccattccattagttgtcctttccgggcaggtagcgacctcgttgataggttacgatgcctttcaggagtgcgacatggtggggatttcgcgaccggtggttaaacacagttttctggttaagcaaacggaagacattccgcaggtgctgaaaaaggctttctggctggcggcaagtggtcgcccaggaccagtggtcgttgatttaccgaaagatattcttaatccggcgaacaaattaccctatgtctggccggagtcggtcagtatgcgttcttacaatcccactactaccggacataaagggcaaattaagcgcgctctgcaaacgctggtggcggcaaaaaaaccggttgtctacgtaggcggtggggcaatcacggcgggctgccatcaacagctgaaagaaacggtggaggcgttaaatctgcccgttgtttcctcattgatggggctgggagcgtttccggcaacgcatcgtcaggcactgggcatgctgggaatgcacggtacctacgaagccaatatgacgatgcataacgcggatgtgatttttgctgtcggtgtccgctttgacgatcgcaccactaacaatctggcaaagtactgcccaaatgccactgttctgcatatcgatattgatcctacttccatttctaaaaccgtgactgcggatattccgattgtgggggatgctcgccaggtcctcgaacaaatgcttgaactcttgtcgcaagaatccgcccatcaaccgctggatgagatccgcgactggtggcagcagattgaacagtggcgcgctcgtcagtgcctgaaatatgacactcacagtgaaaagattaaaccgcaggcggtgatcgagactctttggcggttgacgaaggggggcgcttacgttacgtccgatgtcgggcagcaccagatgtttgctgcgctttattatccattcgacaaaccccgtcgttggatcaactccggtggcctcggcactatgggctttggtttacctgcggcactgggcgtcaaaatggcgctgccagaagaaaccgtggtttgcgtcactggcgacggcagtattcagatgaacattcaggaactgtctacagcgttgcaatatgaactgccggtgctggtggttaatcttaataaccgctatttggggatggtgaagcagtggcaggacatgatctattccggtcgtcattcacaatcttatatgcagtctttaccagacttcgtccgtctggcggaagcctatggtcacgtcgggatccagatctctcatccgcaagagctggaaagcaaacttagcgaggcgcttgaacaggtgcgtaataatcgcctggtatttgttgatgtcaccgtcgatggcagtgagcacgtctacccgatgcagattcgcgggggcggaatggatgaaatgtggttaagcaaaacggagagaacctgattatgcgccggatattatcagtcttactcgaaaatgaatcaggcgcgttatcccgcgtgattggccttttttcccagcgtggctacaacattgaaagcctgaccgttgcgccaaccgacgatccgacattatcgcgtatgaccatccagaccgtgggcgatgaaaaagtgcttgagcagatcgaaaagcaattacacaagctggtcgatgtcttgcgcgtgagtgagttggggcagggcgcgcatgttgagagggaaatcatgctggtgaaaattcaggccagcggttacgggcgtgacgaagttaaacgtaatacggaaatattccgtgggcaaattattgatgtcacaccctcgctttataccgttcaattagcaggcaccagcgataagcttgatgcatttttagcatcgattcgcgatgtggcgaaaattgtggaagttgctcgctctggtgtggtcggactttcgcgcggcgataaaataatgcgttgagaatgatctcaatgcgcaatttacagcccaacatgtcacgttgggctttttttgcgaaatcagtgggaacctggaataaaagcagttgccgcagttaattttctgcgcttagatgttaatgaatttaacccataccagtacaatggctatggtttttacattttacgcaaggggcaattgtgaaactggatgaaatcgctcggctggcgggagtgtcgcggaccactgcaagctatgttattaacggcaaagcgaagcaataccgtgtgagtgacaaaaccgttgaaaaagtcatggctgtggtgcgtgagcacaattaccacccgaacgccgtggcagctgggcttcgtgctggacgcacacgttctattggtcttgtgatccccgatctggagaacaccagctatacccgcatcgctaactatcttgaacgccaggcgcggcaacggggttatcaactgctgattgcctgctcagaagatcagccagacaacgaaatgcgctgcattgagcaccttttacagcgtcaggtcgatgccattattgtttcgacgtcgttgcctcctgagcatcctttttatcaacgctgggctaacgacccgttcccgattgtcgcgctggaccgcgccctcgatcgtgaacactttaccagcgtggttggtgccgatcaggatgatgccgaaatgctggcggaagagttacgtaagtttcccgccgagacggtgctttatcttggcgcgctgccggagctttctgtcagcttcctgcgtgaacaaggtttccgtactgcctggaaagatgatccgcgcgaagtgcatttcctgtatgccaacagctatgagcgggaggcggctgcccagttattcgaaaaatggctggaaacgcatccgatgccgcaggcgctgttcacaacgtcgtttgcgttgttgcaaggggtgatggatgtcacgctacgtcgcgatggtaaactgccttctgacctggcaattgccacctttggcgataacgaactgctcgacttcttacagtgcccggtgctggcagtggctcaacgtcaccgcgatgtcgcagagcgtgtgctggagattgtcctggcaagcctggacgaaccgcgtaagccaaaacctggtttaacgcgcattaaacgtaatctctatcgccgcggtgtgctcagccgtagctaagctgcgaacaaaaatacgcgccaggtgaatttcactctggcgcgtagagtacgggactggacatcaatatccttaaagtaaataagactattcctgactattattgataaatgcttttaaacccgccagttaattaactcaccagctgaaattcacaataattaagtgatatcgacagcgcgtttttgcattattttgttacatgcagagatgaattgccgatttaacaagcacttttctttgcttttgcgcaaacccgctggcatcaagcgctacacagacgcaacagggactgttaaccggggaagatatgtcctaaaatgccgctcgcgtcgcaaactgacactttatatttgctgtggaaaatagtgagtcattttaaaacggtgatgacgatgagggtttttttcttacagctattcataacgttaatttgcttcgcacgttggacgtaaaataaacaacgctgatattagccgtaaacatcgggttttttacctcggtatgccttgtgactggcttgacaagcttttcctccgctccgtaaactcctttcagtgggaaattgtggggcaaagtgggaataaggggtgaggctggcatgttccggggagcaacgttagtcaatctcgacagcaaagggcgcttatcagtgcctacccgttatcgggaacagctgcttgagaacgctgccggtcaaatggtttgcaccattgacattcatcacccgtgcctgctgctttaccccctgcctgaatgggaaattatcgagcaaaaattatcgcgtctgtcgagcatgaacccggttgagcgccgtgtgcagcgcctactgttaggtcatgccagcgaatgtcagatggatggcgcaggtcgattgttaatcgcgccagtactgcggcaacatgccgggctgacaaaagaagtgatgctggttggacagttcaacaagtttgagctgtgggatgaaacaacctggcatcaacaggtcaaggaagatatcgacgcagagcagttggctaccggagacttatcggagcgactgcaggacttgtctctataaaatgatggaaaactataaacatactacggtgctgctggatgaagccgttaatggcctcaatatccgtcctgatggcatctacattgatgggacttttggtcgcggtggtcactcacgtctgatcctctcgcagcttggcgaagaggggcgtttgctggcgatcgatcgcgacccgcaggctatcgccgttgcgaagactattgatgatccgcgcttctccatcatccacggacctttttccgcgctgggcgaatacgttgccgagcgcgatcttatcggcaagatcgacggcattctcctcgatcttggtgtctcttcaccgcaacttgatgatgctgaacgcggcttttcctttatgcgcgatggtccgctggacatgcgtatggacccaacccgtgggcagtcagccgctgaatggctacaaaccgcagaagaagccgatatcgcctgggtattgaaaacctatggtgaagagcgttttgccaaacgcattgcccgagccattgtcgagcgtaaccgcgaacagccgatgacccgcaccaaagaactggcggaagtcgtggctgctgcaacgccggtgaaagataagtttaaacatcccgcgacccgtaccttccaggcggtgcgcatttgggtaaacagtgaactggaggagatagagcaggcgctaaaaagctcgctcaacgtgctggccccgggtgggcggctttcgatcatcagcttccactcgctggaagaccgtattgtgaaacgttttatgcgtgaaaacagccgcggtccgcaagttccggcagggttaccgatgactgaagagcagctcaaaaaactgggtggccgtcagctgcgagcactaggcaaattaatgccgggcgaagaagaggtggctgagaatcctcgtgcccgtagttcagttctgcgtattgcagagaggacgaacgcatgatcagcagagtgacagaagctctaagcaaagttaaaggatcgatgggaagccacgagcgccatgcattgcctggtgttatcggtgacgatcttttgcgatttgggaagctgccactctgcctgttcatttgcattattttgacggcggtgaccgtggtaaccacggcgcaccatacccgtttactgaccgctcagcgcgaacaactggtgctggagcgagatgctttagacattgaatggcgcaacctgatccttgaagagaatgcgctcggcgaccatagccgggtggaaaggatcgccacggaaaagctgcaaatgcagcatgttgatccgtcacaagaaaatatcgtagtgcaaaaataaggataaacgcgacgcatgaaagcagcggcgaaaacgcagaaaccaaaacgtcaggaagaacatgccaactttatcagttggcgttttgcgttgttatgcggctgtattctcctggcgctggcttttctgctcggacgcgtagcgtggttacaagttatctccccggatatgctggtgaaagagggcgacatgcgttctcttcgcgttcagcaagtttccacctcccgcggcatgattactgaccgttctggtcgcccgttagcggtgagcgtgccggtaaaagcgatttgggctgacccgaaagaagtgcatgacgctggcggtatcagcgtcggtgaccgctggaaggcgctggctaacgcgctcaatattccgctggatcagctttctgcccgcattaacgccaacccgaaagggcgctttatttatctggcgcgtcaggtaaaccctgacatggcggactacatcaaaaaactgaaactgccgggaattcatctgcgtgaagaatctcgccgttattatccatccggcgaagtgactgctcacctcatcggctttactaacgtcgatagtcaaggtattgagggcgttgagaagagtttcgataaatggcttaccgggcagccgggtgagcgcattgtgcgtaaagaccgctatggtcgcgtaattgaagatatttcttctactgacagccaggctgcgcacaacctggcgctgagtattgatgaacgcctgcaggcgctggtttatcgcgaactgaacaacgcggtggcctttaacaaggctgagtccggtagcgccgtgctggtggatgtcaacaccggtgaagtgctggcgatggctaacagcccgtcatacaaccctaacaatctgagcggcacgccgaaagaggcgatgcgtaaccgtaccatcaccgacgtgtttgaaccgggttcaacggttaaaccgatggtggtgatgaccgcgttgcaacgtggcgtggtgcgggaaaactcggtactcaataccattccttatcgaattaacggccacgaaatcaaagacgtggcacgctacagcgaattaaccctgaccggagtattacagaagtcgagtaacgtcggtgtttccaagctggcgttagcgatgccgtcctcagcgttagtagatacttactcacgttttggactgggaaaagcgaccaatttggggttggtcggagaacgcagtggcttatatcctcaaaaacaacggtggtctgacatagagagggccaccttctctttcggctacgggctaatggtaactccgttacagttagcgcgagtctacgcaactatcggcagctacggcatttatcgcccactgtcgattaccaaagttgaccccccggttcccggtgaacgtatcttcccggaatctattgtccgcactgtggtgcatatgatggaaagcgtggcgctaccgggtggtggcggcgtgaaggcggcgattaaaggctatcgtattgccattaaaaccggtaccgcgaaaaaggtcgggccggacggtcgctacatcaataaatatattgcttacaccgcaggtgttgcgcctgcgagtcagccgcgcttcgcgctggttgttgttatcaacgatccgcaggcgggtaaatactacggcggc

SEQ ID NO: 45 - DNA, 28642 bp, Escherichia coli
  Strain O55:H7
  modified_base (447)..(447): a, c, g or t
  modified_base (450)..(450): a, c, g or t
  modified_base (4641)..(4641): a, c, g or t
  modified_base (7833)..(7833): a, c, g or t
  modified_base (8807)..(8809): a, c, g or t
  modified_base (8812)..(8813): a, c, g or t
  modified_base (12010)..(12011): a, c, g or t
  modified_base (25602)..(25604): a, c, g or t
ttccgcgccggtctttggtgccatcatgggcggcgtattgcgaaccatgaacatcgagccggatgcgctgacaacgggcgataaaaatgaatttgtgattaatcaaggcgaggggacaggtggcagatcgtaatttgcgcgaccttcttgctccgtgggtgccagacgcaccttcgcgagcactgcgagagatgacactcgacagccgtgtggctgcggcgggcgatctctttgtagctgtagtaggtcatcaggcggacgggcgtcgatatatcccgcaggcgatagcgcaaggtgtggctgccattattgcagaggcgaaaggtgaggcgaccgacggtgaaatccgtgaaatgcacggcgtaccggtcatctatctcagccagctcaacgagcgtttatctgcactggcgggccgcttttaccatgaaccctctgacaatttangtntcgtgggcgtaacgggcaccaacggcaaaaccacgacgacccagctgctggcgcagtggagccaactgcttggcgaaaccagcgcggtaatgggcaccgttggtaacggtctgctggggaaagtgatcccgacagaaaataccaccggttcggcagttgatgttcagcatgagctggcggggctggtggatcaggacgcgactttttgcgcaatggaagtttcctcccacgggctggtacagcaccgtgtggcggcattgaaatttgcggcgtcggtctttactaacttaagccgcgatcaccttgattatcatggtgatatggaacactacgaagctgcgaaatggctgctttattctgaacatcattgcggtcaggcgattattaatgccgacgatgaagtaggccgccgctggctggcaaaactgccggatgcagttgcggtatcaatggaagatcatatcaatccgaactgtcacggacgctggttgaaagcgaccgaagtgaactatcacgacagcggtgcgactattcgctttagctcaagttggggcgatggcgaaattgaaagccatctgatgggcgcttttaacgtcagcaacctgctgctcgcgctggcgacgctgctggcgctgggctatccactggctgatctgctgaaaaccgctgctcgtctgcaaccggtttgcggacgtatggaagtgttcactgcgccaggcaaaccgacggtggtagtggattacgcgcatacgccggatgcactggaaaaagccttacaggcggcgcgtctgcactgtgcgggcaagctgtggtgtgtctttggctgtggtggcgatcgcgataaaggtaagcgtccactgatgggcgcaattgccgaagagtttgctgatgtggcggtggtgacggacgataatccgcgtaccgaagagccgcgtgccatcatcaacgatattctggcgggaatgttagatgccggacatgccaaagtgatggaaggccgtgctgaagcggtgacttgcgccgttatgcaggctaaagagaacgatgtggtgctggtcgcgggcaaaggccatgaagattaccagattgttggcaatcagcgtctggactactccgatcgcgtcacggtggcgcgtctgctgggggtgattgcatgattagcgtaacccttagccaacttaccgacattctcaacggtgaactgcaaggtgcagatatcacccttgatgctgtaaccactgatacccgaaaactgacgccgggctgcctgtttgttgccctgaaaggcgaacgtttcgatgctcatgattttgccgaccaggcgaaagctggcggcgcaggcgcactactggttagccgtccgctggatatcgacctgccgcagttaatcgtcaaggatacgcgtctggcgtttggtgaactggctgcatgggttcgccagcaagttccggcgcgcgtggttgctctgacaggttcctccggcaaaacctccgttaaagagatgacggcggcgattttaagccagtgcggcaacacgctttatacggcaggcaatctcaacaacgacatcggtgtaccgatgacgctgttgcgcttaacgccggaatacgattacgcagttattgaacttggcgcgaaccatcagggcgaaattgtctggactgtgagtctgactcgcccggaagctgcgctggtcaacaacctggcagcggcgcatctggaaggttttggctcgcttgcgggtgtcgcgaaagcgaaaggtgaaatctttagcggcctgccggaaaacggtatcgccattatgaacgccgacaacaacgactggctgaactggcagagcgtaattggctcacgcaaagtgtggcgtttctcacctaatgccgccaacagcgatttcaccgccaccaatatccatgtgacttcgcacggtacggaatttaccctgcaaaccccaaccggtagcgtggatgttctgctgccgttgccggggcgtcacaatattgcgaatgcgctggcagccgctgcgctctccatgtccgtgggcgcaacgcttgatgctatcaaagcggggctggcaaatctgaaagctgttccaggccgtttgttccccattcaactggcagaaaaccagttgctgctcgacgactcctacaacgccaatgtcggttcaatgaccgccgctgttcaggtactggctgaaatgccgggctaccgcgtgctggtggtgggcgatatggcggaactgggcgctgaaagcgaagcctgccatgtacaggtgggcgaggcggcaaaagctgctggtattgaccgcgtgttaagcgtgggtaaacaaagccatgctatcagcaccgccagcggcgttggcgaacattttgctgagaaaactgcgttaattacgcgtcttaaatcactgattgctgagcaacaggtaattacgattttagttaagggttcacgtagtgccgccatggaagaggtagtacgcgctttacaggagaatgggacatgttagtttggctggccgaacatttggtcaaatattattccggctttaacgtcttttcctatctgacgtttcgcgccatcgtcagcctgctgaccgcgctgttcatctcattgtggatgggcccgcgtatgattgctcatttgcaaaaactttcctttggtcaggtggtgcgtaacgacggtcctgaatcacacttcagcaagcgcggtacgccgaccatgggcgggattatgatcctgacggcgattgtgatctccgtactgctgtgggcttacccgtccaatccgtacgtctggtgcgtgttggtggtgctggtaggttacggtgttattggctttgttgatgattatcgcaaagtagtgcgtaaagacaccaaagggttgatcgctcgttggaagtatttctggatgtcggtcattgcgctgggtgtcgccttcgcgctgtaccttgttggcaaagacacgcccgcaacgcagctggtggtcccattctttaaagatgtgatgccgcaactggggctgttctacattctgctggcttacttcgtcattgtgggtactggcaacgcggtaaacctgaccgatggtcttgacggtctggcaattatgccgaccgtatttgtcgccggtggttttgcgctggtggcgtgggcgaccggcaacatgaactttgccagctatttacacataccatatctgcgacacgccggggaactggttattgtctgtaccgcgatagtcggggcagggctgggcttcctgtggtttaacacctatccggcgcaggtctttatgggcgatgtaggttcgctggcgttaggtggtgcgttaggcattatcgccgtactgctgcgtcaggaattcctgctggtgattatggggggcgtgttcgtggtagaaacgctttccgtcatcctgcaggtcggctcctttaaactgcgcggacaacgtattttccgcatggcaccgattcatcaccactatgaactgaaaggctggccggaaccgcgcgtcattgtgcgtttctggattatttcgctgatgctggtcctgattggtctggcaacgctgaaggtacgttaatcatggctgattaccagggtaaaaatgttgtcattatcggcctgggcctcaccgggctttcctgcgtggactttttcctcgctcgcggtgtgacgccgcgcgttatggatacgcgtatgacaccgcctggcctggataaattacccgaagccgtagaacgccacacgggcagtctgaatgatgaatggctgatggcggcagatctgattgtcgccagtcccggtattgcactggcgcatccatccttaagcgctgccgctgatgccggaatcgaaatcgttggcgatatcgagctgttctgtcgcgaagcacaagcaccgattgtggcgattaccggttctaacggcaaaagcacggtcaccacgctagtgggtgaaatggcgaaagcggcgggggttaacgttggtgtgggtggcaatattggcctgcccgcgttgatgctgctggatgatgagtgcgaactgtacgtactggaactgtcgagcttccagctggaaaccacctccagcttacaggcggtagcagcgaccattctgaacgtgactgaagatcatatggatcgctatccgtttggtttacagcaataccgtgcggcaaaattgngtatttacgaaaatgcgaaagtttgtgtcgtcaatgctgatgatgccttaacaatgccgattcgcggtgcggatgaacgctgcgtcagctttggcgtcaacatgggtgactatcacctgaatcatcagcagggcgaaacctggctgcgggtgaaaggcgagaaagtgctgaacgtgaaagaaatgaaactttccgggcagcataactacaccaatgcgctggcggcgctggcgctggcagatgccgcagggttaccgcgtgccagcagcctgaaagcgttaaccacattcactggtctgccgcatcgctttgaagttgtgctggagcataacggcgtacgttggattaacgattcgaaagcgaccaacgtcggcagtacggaagcggcgctgaatggcctgcacgtagacggcacgctgcatttgttgctgggcggcgatggtaaatcggcggactttagcccactggcgcgttacctgaatggcgataacgtacgtctgtattgtttcggtcgtgacggcgtgcagctggcggcgctacgcccggaagtggcagaacaaaccgaaactatggaacaggcgatgcgcttgctggctccgcgtgttcagccgggcgatatggttctactctccccggcctgtgccagccttgatcagttcaagaactttgaacaacgaggcaatgagtttgcccgtctggcgaaggagttaggttgatgcgtttatctctccctcgcctgaaaatgccgcgcctgccaggattcagtatcctggtctggatctccacggcgctaaagggctgggtgatgggctcgcgggaaaaagataccgacagcctgatcatgtacgatcgcaccttactgtggctgaccttcggcctcgcggcgattggctttatcatggtgacctcggcgtcaatgcccatagggcaacgcttaaccaacgatccgttcttcttcgcgaagcgtgatggtgtctatctgattttggcgtttattctggcgatcattacgctgcgtctgccgatggagttctggcaacgctacagtgccacgatgctgctcggatctatcatcctgctgatgatcgtgctggtagtggggagctcggttaaaggggcatcgcgttggatcgatctcggtttgctgcgtatccagcctgctgagctgacaaaactgtcgctgttttgctatatcgccaactatctggtgcgtaaaggtgacgaagtacgtaataacctgcgcggcttcctgaaaccgatgggcgtgattctggtgttggcagtgttactgctggcacagccagaccttggtacggtggtggtgttgtttgtgactacgctggcgatgttgttcctggcgggagcgaaattgtggcagttcattgccattatcggtatgggcatttcagcggttgtgttgctgatactcgccgaaccgtaccgtatccgccgtgttaccgcattctggaacccgtgggaagatccctttggcagcggctatcagttaacgcaatcgctgatggcgtttggtcgcggcgaactgtggggacaaggtttaggtaactctgtacaaaaactggagtatctgccggaagcgcacactgactttattttcgccattatcggcgaagaactggggtatgtcggtgtggtgctggcacttttaatggtattcttcgtcgcttttcgcgcgatgtcgattggccgtaaagcattagaaattgaccaccgtttttccggttttctcgcctgttctattggcatctggtttagcttccaggcgctggttaacgtaggcgcggcggcggggatgttaccgaccaaaggtctgacattgccgctgatcagttacggtggttcgagcttactgattatgtcgacagccatcatgatgctgttgcgtattgattatgaaacgcgtctggagaaagcgcaggcgtttgtacgaggttcacgatgagtggtcaaggaaagcgattaatggtgatggcaggcggaaccggtggacatgtattcccgggactggcggttgcgcaccatctaatggctcagggttggcaagttcgctggctggggactgccgaccgtatggaagcggacttagtgccaaaacatggcatcgaaattgatttcattcgtatctctggtctgcgtggaaaaggtataaaagcactgatagctgcgccgctgcgtatcttcaatgcctggcgtcaggcgcgggcgattatgaaagcgtacaaacctgacgtggtgctcggtatgggcggctacgtatcaggtcctggtggtctggccgcgtggtcgttaggcattccggttgtacttcatgaacaaaacggtattgcgggcttaaccaataaatggctggcgaagattgccaccaaagtgatgcaggcgtttccaggtgctttccccaatgcggaagtggtgggtaacccggtgcgtaccgatgtgttggcgctaccgttgccgcagcaacgtttggctggacgtgaaggtccggttcgtgtgctggtagtgggtggttcccagggcgcacgcattcttaaccagacaatgccgcaggttgctgcgaaactgggtgattcagtcactatctggcatcagagcggcaaaggttcgcaacaatccgttgaacaggcgtatgccgaagcggggcaaccgcagcataaagtgactgaatttattgatgatatggcggcggcgtatgcgtgggcggatgtcgtcgtttgccgctccggtgctttaacggtgagtgaaatcgccgcggcaggactaccggcgttgtttgtgccgtttcaacataaagaccgccagcaatactggaatgcgctaccgctggaaaaagcgggcgcagccaaaattatcgagcagccacagcttagcgtggatgctgtcgccaacaccctggccgggtggtcgcgagaaaccttattaaccatggcagaacgcgcccgcgctgcatccattccggatgccaccgagcgagtggcaaatgaagtgagtcgggctgcccgggcgtaattgtagcgatgccttttgcatcgtatgaatttaagaagttaatggcgtaaagaatgaatacacaacaattggcaaaactgcgttccatcgtgcccgaaatgcgtcgcgttcggcacatacattttgtcggcatcggtggtgccggtatgggcggtattgccgaagttntggccaatgaaggttatcagatcagtggttccgatttagcgccaaatccggtcacgcagcagttaatgaatctgggagcgacgatttatttcaaccatcgcccggaaaacgtacgtgatgccagcgtggtcgttgtttccagcgccatttctgccgataacccggaaattgtcgcagctcatgaagcgcgtattccggtgatccgtcgtgccgaaatgctggctgagttaatgcgttttcgtcatggcatcgccattgcaggaacgcacggcaaaacgacaactaccgcgatggtctccagcatctacgcagaagcggggctcgacccaaccttcgttaacggcgggctggtaaaagcggcgggggttcatgcgcgtttggggcatggtcggtacctgattgccgaagcagatgagagtgatgcatcgttcctgcatctgcaaccgatggtggcgattgtcaccaatatcgaagccgaccacatggatacctaccagggcgactttgagaatttaaaacagacttttattaattttctgcacaacctgccgttttacggtcgtgcggtgatgtgtgttgatgatccggtgatccgcgaattgttaccgcgagtgggacgtcagaccacaacttacggcttcagcgaagatgccgacgtgcgtgtagaagattatcagcagattggcccgcaggggcactttacgctgctgcgccaggacaaagagccgatgcgcgtcaccctgaatgcgccaggccgtcataacgcgctgaacgccgcagctgcggttgcggttgctacggaagagggcattgacgacgaggctattttgcgtgcgctggagagcttccaggggactggtcgccgttttgatttcctcggtgaattcccgctggagccagtgaatggtaaaagcggtacggcaatgctggtcgatgactacggccaccacccgacggaagtggacgccaccatnnnagnngcgcgcgcaggctggccggataaaaacctggtaatgctgtttcagccgcaccgttttacccgtacacgcgacctgtatgatgatttcgccaatgtgctgacgcaggttgataccctgttgatgctggaagtgtatccggctggcgaagcgccaattccgggtgcggacagccgttcgctgtgtcgcacaattcgtggacgtgggaaaatagatcccattctggtgccggaccctgcgcaggtagccgagatgctggcaccggtattaaccggtaacgacctgattctcgttcagggggctggtaatatcggaaaaattgcccgttctttagctgaaatcaaactgaagccgcaaactccggaggaagaacaacatgactgataaaatcgcggtcctgttgggcgggacttccgctgagcgggaagtttctctgaattctggcgcagcggtgttagccgggctgcgtgaaggcggtattgacgcatatcctgtcgacccgaaagaagttgacgtgacgcaactgaagtcgatgggctttcagaaagtgtttatcgcgctacacggccgcggcggtgaagatggtacgctgcaggggatgctcgagctgatgggcttgccttataccggcagcggagtgatggcatctgcgctttcaatggataaactacgcagcaaacttctgtggcaaggtgccggtttaccggtcgcgccgtgggtagcgttaacccgcgtagagtttgaaaaaggcctgagtgataagcagttagcagaaatttctgctctgggtttgccggttatcgttaagccgagccgcgaaggttccagtgtgggaatgtcaaaagtagtagcagaaaatgctctacaagatgcattaagattggcatttcagcacgatgaagaagtattgattgaaaaatggctaagtgggccggagttcacggttgcgatactcggtgaagaaattttaccgtcaatacgtattcaaccgtccggaaccttctatgattatgaggcgaagtatctctctgatgagacacagtatttctgccccgcaggtctggaagcgtcacaagaggccaatttgcaggcattagtgctgaaagcatggacgacgttaggttgcaaaggatggggacgtattgacgttatgctggacagcgatggacagttttatctgctggaagccaatacctcaccgggtatgaccagccacagcctggtgccgatggcggcacgtcaggcaggtatgagcttctcgcagttggtagtacgaattctggaactggcggactaatatgtcgcaggctgctctgaacacgcgaaacagcgaagaagaggtttcttctcgccgcaataatggaacgcgtctggcggggatccttttcctgctgaccgttttaacgacagtgttggtgagcggctgggtcgtgttgggctggatggaagatgcgcaacgcctgccgctctcaaagctggtgttgaccggtgaacgccattacacgcgtaatgacgatatccggcagtcgatcctggcattgggtgagccgggtacctttatgacccaggatgtcaacatcatccagacgcaaatagaacaacgtctgccgtggattaagcaggtgagcgtcagaaagcagtggcctgatgaattgaagattcatctggttgaatatgtgccgattgcgcggtggaatgatcaacacatggtagacgcggaaggaaataccttcagcgtgccgccagatcgcaccagcaagcaggtgcttccaatgctgtatggcccggaaggcagcgccaatgaagtgttgcagggctatcgcgaaatggggcagatgctggcaaaggacagatttactctgaaggaagcggcgatgaccgcgcggcgttcctggcagttgacgctgaataacgatattaagctcaatcttggccggggcgatacgatgaaacgtttggctcgctttgtagaactttatccggttctacagcagcaggcgcaaaccgatggcaaacggattagctacgttgatttgcgttatgactctggagcggcagtaggctgggcgcccttgccgccagaggaatctactcagcaacaaaatcaggcacaggcagaacaacaatgatcaaggcgacggacagaaaactggtagtaggactggagattggtaccgcgaaggttgccgctttagtaggggaagttctgcccgacggtatggtcaatatcattggcgtgggcagctgcccgtcgcgtggtatggataaaggcggggtgaacgacctcgaatccgtggtcaagtgcgtacaacgtgccattgaccaggcagaattgatggcagattgtcagatctcttcggtatatctggcgctttctggtaagcacatcagctgccagaatgaaattggtatggtgcctatttctgaagaagaagtaacgcaagaagatgtggaaaacgtcgtccataccgcgaaatcggtgcgtgtacgcgatgagcatcgtgtgctgcatgtgatcccgcaagagtatgcgattgactatcaggaagggatcaagaatccggtagggctttcgggcgtgcggatgcaggcaaaagtgcacctgatcacatgccacaacgatatggcgaaaaacatcgtcaaagcggttgaacgttgtgggctgaaagttgaccaactgatatttgccggtctggcatcaagttattcggtattgacggaagatgaacgtgaactgggtgtctgcgtcgtcgatatcggtggtggtacaatggatatcgccgtttataccggtggggcattgcgccacactaaggtaattccttatgctggcaatgtcgtgaccagtgatatcgcttacgcctttggcacgccgccaagcgacgccgaagcgattaaagttcgccacggttgtgcgctgggttccatcgttggaaaagatgagagcgtggaagtgccgagcgtaggcggtcgtccgccgcggagtctgcaacgtcagaccctggcagaggtgatcgagccgcgctataccgagctgctcaacctggtcaacgaagagatattgcagttgcaggaaaagcttcgccaacaaggggttaaacatcacctggcggcaggcattgtattaaccggtggcgcagcgcagatcgaaggtcttgcagcctgtgctcagcgcgtgtttcatacgcaagtgcgtatcnncgcgccgctgaacattaccggtttaacggattatgctcaggagccgtattattcgacggcggtgggattgcttcactatgggaaagagtcacatcttaacggtgaagctgaagtagaaaaacgtgttacagcatcagttggctcgtggatcaagcgactcaatagttggctgcgaaaagagttttaatttttatgaggccgacgatgattacggcctcaggcgacaggcacaaatcggagagaaactatgtttgaaccaatggaacttaccaatgacgcggtgattaaagtcatcggcgtcggcggcggcggcggtaatgctgttgaacacatggtgcgcgagcgcattgaaggtgttgaattcttcgcggtaaataccgatgcacaagcgctgcgtaaaacagcggttggacagacgattcaaatcggtagcggtatcaccaaaggactgggcgctggcgctaatccagaagttggccgcaatgcggcagatgaggatcgcgatgcactgcgtgcggcgctggaaggtgcagacatggtctttattgctgcgggtatgggtggtggtaccggtacaggtgcagcaccagtcgtcgctgaagtggcaaaagatttgggtatcctgaccgttgctgtcgtcactaagcccttcaactttgaaggcaagaagcgtatggcattcgcggagcaggggatcactgaactgtccaagcatgtggactctctgatcactatcccgaacgacaaactgctgaaagttctgggccgcggtatctccctgctggatgcgtttggcgcagcgaacgatgtactcaaaggcgctgtgcaaggcatcgccgaactgattactcgtccgggtttgatgaacgtggactttgcagacgtacgcaccgtaatgtctgaaatgggctacgcaatgatgggttctggcgtggcgagcggtgaagaccgtgcggaagaagctgctgaaatggctatctcttctccgctgctggaagatatcgacctgtctggcgcacgcggcgtgctggttaacatcacagcgggcttcgacctgcgtctggatgagttcgaaacggtaggtaacaccatccgtgcatttgcttccgacaacgcgactgtggttatcggtacttctcttgacccggatatgaatgacgagctgcgcgtaaccgttgttgcgacaggtatcggcatggacaaacgtcctgaaatcactctggtgaccaataagcaggttcagcagccagtgatggatcgctaccagcagcatgggatggctccgctgacccaggagcagaagccggttgctaaagtcgtgaatgacaatgcgccgcaaactgcgaaagagccggattatctggatatcccagcattcctgcgtaagcaagctgattaagaattgactggaatttgggtttcgaggctctttgtgctaaactggcccgccgaatgtatagtacacttcggttggataggtaatttggcgagataatacgatgatcaaacaaaggacacttaaacgtatcgttcaggcgacgggtgtcggtttacataccggcaagaaagtcaccctgacgttacgccctgcgccggccaacaccggggtcatctatcgtcgcaccgacttgaatccaccggtagatttcccggccgatgccaaatctgtgcgtgataccatgctctgtacgtgtctggtcaacgagcatgatgtacggatttcaaccgtagagcacctcaatgctgctctcgcgggcttgggcatcgataacattgttatcgaagttaacgcgccggaaatcccgatcatggacggcagcgccgctccgtttgtatacctgctgcttgacgccggtatcgacgagttgaactgcgccaaaaaatttgttcgcatcaaagagactattcgtgtcgaagatggcgataagtgggctgaatttaagccgtacaatggtttttcgctggatttcaccatcgattttaaccatccggctattgattccagcaaccagcgctatgcgatgaacttctccgctgatgcgtttatgcgccagatcagccgtgcgcgtacgttcggtttcatgcgtgatatcgaatatctgcagtcccgtggtttgtgcctgggcggcagcttcgattgtgccatcgttgttgacgattatcgcgtactgaacgaagacggcctgcgttttgaagacgaatttgtgcgtcacaaaatgctcgatgcgatcggtgacttgttcatgtgtggtcacaatattattggtgcatttaccgcttataaatccggtcatgcactgaataacaaactgctgcaggctgtcctggcgaaacaggaagcctgggaatatgtgaccttccaggacgacgcagaactgccgttggccttcaaagcgccttcagccgtactggcataacgacatttatactgtcgtataaaattcgactggcaaatctggcactctctccggccaggtgaaccagtcgttttttttgaattttataagagctataaaaaacggtgcgaacgctgttttcttaagcacttttacggacaacttatcttcattcgtgctgtggacttcaggctttaatgataagatttgtgcgctaaatacgtttgaatacgatcgggatggcaataacgtgagtggaatactgacgcgctggcgacagtttggtaaacgctacttctggccgcatctcttattagggatggttgcggcgagtttaggtttgcctgcgctcagcaacgccgccgaaccaaacgcgcccgcaaaagcgacaacccgcaaccacgagccttcagccaaagttaactttggtcaattggccttgctggaagcgaacacgcgccgcccgaattcgaactattccgtagattactggcatcaacatgccattcgcacggtaatccgtcatctttccttcgcaatggcaccgcaaacgctgcccgttgctgaagaatctttgcctcttcaggcgcaacatcttgcattactggatacgctcagcgcgctgctgacccaggaaggcacgccgtctgaaaagggttatcgcattgattatgcgcattttaccccacaagcaaaattcagcacgcccgtctggataagccaggcgcaaggcatccgtgctggccctcaacgcctcagctaacaacaataaacctttacttcattttattaactccgcaacgcggggcgtttgagattttattatgctaatcaaattattaactaaagttttcggtagtcgtaacgatcgcaccctgcgccggatgcgcaaagtggtcaacatcatcaatgccatggaaccggagatggaaaaactctccgacgaagaactgaaagggaaaaccgcagagtttcgtgcacgtctggaaaaaggcgaagtgctggaaaatctgatcccggaagctttcgccgtggtacgtgaggcaagtaagcgcgtctttggtatgcgtcacttcgacgttcagttactcggcggtatggttcttaacgaacgctgcatcgccgaaatgcgtaccggtgaaggtaaaaccctgaccgcaacgctgcctgcttatctgaacgcactaaccggtaaaggcgtgcatgtagttaccgtcaacgactacctggcgcaacgtgacgccgaaaacaaccgtccgctgtttgaattccttggcctgactgtcggtatcaacctgccgggcatgccagcaccggcaaagcgcgaagcttacgcagctgacatcacttacggtacgaacaacgaatacggctttgactacctgcgcgacaatatggcgttcagccctgaagaacgtgtacagcgtaaactgcattatgcgctggtggacgaagtggactccatcctgatcgatgaagcgcgtacaccgctgatcatttccggcccggcagaagacagctcggaaatgtataaacgcgtgaataaaattattccgcacctgatccgtcaggaaaaagaagactccgaaaccttccagggcgaaggccacttctcggtggacgaaaaatctcgccaggtgaacctgaccgaacgtggtctggtgctgattgaagagctgctggtgaaagagggcatcatggatgaaggggagtctctgtactctccggccaacatcatgctgatgcaccacgtaacggcggcgctgcgcgctcatgcgctgtttacccgtgacgtcgactacatcgttaaagatggtgaagttatcatcgttgacgaacacaccggtcgtaccatgcagggccgtcgctggtccgatggtctgcaccaggctgtggaagcgaaagaaggtgtgcagatccagaacgaaaaccaaacgctggcttcgatcaccttccagaactacttccgtctgtatgaaaaactggcggggatgaccggtactgctgataccgaagctttcgaatttagctccatctacaaactggataccgtcgttgttccgaccaaccgtccaatgattcgtaaagatctgccggacctggtctacatgactgaagcggaaaaaattcaggcgatcattgaagatatcaaagaacgtactgcgaaaggccagccggtgctggtgggtactatctccatcgaaaaatcggagctggtgtcaaacgaactgaccaaagccggtattaagcacaatgtcctgaacgccaaattccacgccaacgaagcggcgattgttgctcaggcaggttatccggctgcggtgactatcgcgaccaacatggcgggtcgtggtacagatattgtgctcggtggtagctggcaggcagaagttgccgcgctggaaaatccgaccgcagagcaaattgaaaaaattaaagctgactggcaggtacgtcacgatgcggtactggcagcaggtggcctgcatatcatcggtaccgagcgtcacgaatcccgtcgtatcgataaccagttgcgcggtcgttctggtcgtcagggggatgctggttcttcccgtttctacctgtcgatggaagatgcgctgatgcgtatttttgcttccgaccgagtatccggcatgatgcgtaaactgggtatgaagccaggcgaagccattgaacacccgtgggtgactaaagcgattgccaacgcccagcgtaaagttgaaagtcgtaacttcgacattcgtaagcaactgctggaatatgatgacgtggctaacgatcagcgtcgcgccatttactcccagcgtaacgaattgctggatgtcagcgatgtgagcgaaaccattaacagcattcgtgaagatgtgttcaaagcgaccattgatgcctacattccgccacagtcgctggaagaaatgtgggatattccggggctgcaggaacgtctgaagaacgatttcgacctcgatttaccaattgctgagtggctggataaagaaccagaactgcatgaagagacgctgcgtgagcgcattctggcgcagtccatcgaagtgtatcagcgtaaagaagaagtggttggtgctgagatgatgcgtcacttcgagaaaggcgtcatgctgcaaacgcttgactccctgtggaaagagcacctggcagcgatggactatctgcgtcagggtatccacctgcgtggctatgcacagaaagatccgaagcaggaatacaaacgtgaatcgttctccatgtttgcagcgatgctggagtcgttgaaatatgaagttatcagtacgctgagcaaagttcaggtacgtatgcctgaagaggttgaggagctggaacaacagcgtcgtatggaagccgagcgtttagcgcaaatgcagcagcttagccatcaggatgacgactctgcagccgcagctgcactggcggcgcaaaccggtgagcgcaaagtaggacgtaacgatccttgcccgtgcggttctggtaaaaaatacaagcagtgccatggccgcctgcaataaaagctaactgttgaagtaaaaggcgcaggattctgcgccttttttataggtttaagacaatgaaaaagctgcaaattgcggtaggtattattcgcaacgagaacaatgaaatctttataacgcgtcgcgcagcagatgcgcacatggcgaataaactggagtttcccggcggtaaaattgaaatgggtgaaacgccggaacaggcggtggtgcgtgaacttcaggaagaagtcgggattaccccacaacatttttcgctatttgaaaaactggaatatgaattcccggacaggcatataactctgtggttctggctggtcgaaagctgggaaggggagccgtggggtaaagaagggcaacccggtaagtggatgtcgctagtcggtcttaatgccgatgattttccgccagccaatgaaccggtaattgcgaagcttaagcgtgtgtatgtcggataaggcgttcacgccgcatccgacatttgcacaagatgcctgatgcgacgctgtccgcgtcttatcaggcctacgtgcggcatcagacaaatgtcactgctttggctcttcgctccagtcatcgctttcggaaagatcgccactgctggggattcgtttttcttcagcagcccattctccgaggtcgatcagctgacaacgtttggagcaaaatggccgaaacgggctgatttcaccccacaccaccgttttcccgcaggttgggcaattcaccgtaatagtttctgacatttttactccttagcaacaggccagttcgaaatccagacgttccggtacctgtccgttttcagtgtccagcggcataaaacgaatggcaaaacggctcttatgtccggaaatttgcggataaagctgtgaatcgagcgacagattcaggcgcagcaagtcggcatcgccaccgttatcctgataaaaaccattcaggctggtttgtttacggaagggggccgactggcgaattaaatccagcaccatggtaagtgcctgggtgagcgggttcaggctggcaatccaggtttctacctggcagtcgcgctgcgcctggggtagatgcagccaaatgtgcaatgtaggtaaatcaaagctgcaacagccgcctgggatgctcagtcgctgacgcaccagagcaatcaaacgatcttcacgcagaaattgcccgatacgcggcgcggaaattaatacgctccccgccgcttttaactgctgaattaatgcttcaatacggctctggtccacgccaggcacgccaatccaggtctggagtttacgttgctgccggtcaagttctttcaacagctcagtgcggacttcgccgcgctcgaaaacatccagtaattcactaacattacggaagaaatgcagcgcgccagcgtggtcaacgatgggtaaattaacggtgagttgctgaatcaaaaactcaatgcgcagccatgtacgcattttttcatttagtggatgttcaaaaaggacctgggtctgcattacggtttttcctgtgagacaaactgcgacgcaagctgcaaatagtgtgcgtgcaggcgggcaacatccgatgcgatagcatccggtgcgccgttattatcaatgacgtcatctgccacggcaaggcgggcttcgcgcgttgcctgagcagcaaggatttgttcgacatgctcgcgagttacatcatcgcgctgcatggtgcgcttaagttgcgtttctgggctgacatccaccaccagcactcgattcgcttttttatacagtgagttttctaccagcaatggcacaacccacagtacatagggggaagtagcttgctggatctggtgttgcgtctcttgctgaatcagcggatgcagcagggcgttaagccagtttttctcttccgggttggcgaagatccgctcgcgcaaggcccggcgctgcaatgttccatcagcagcaatcatattagcgccaaagtgatcagcaatggcatgtagcgcaggtgcacctggttcaaccacctgacgcgcaataatatcggcatcaatgacgttaattccgagatcagcaaacgcattggcaacggtactcttgccactgccaatgcctcccgttaaggcaactatatacctcataatttatattcccgggaattcatcatgattatcaaaacgttaaaaatgagcgcacgaaagcgaaattgatgaaacgttcgctcactatttaccaggtaaatttatgggattgtagcgtaaaaaaagacaatttcgcagtcttgcgccgcattgattagtgcgtatgatagcgtcactggagttgcgctcttacccttatagccattaaccccaggaatccgcacatgcgtattgaagaagatctgaagttaggttttaaagacgttctcatccgccctaaacgctccactcttaaaagccgttccgatgttgaactggaacgtcaattcaccttcaaacattcaggtcagagctggtccggcgtgccgattatcgccgcaaatatggacaccgtaggcacattttctatggcctctgcgctggcttcttttgatattttgactgctgtgcataaacactattctgtcgaagagtggcaagcgtttatcaacaattcttccgctgatgtgctgaaacatgtgatggtttctaccggtacgtctgatgcggatttcgaaaaaactaaacagattctcgacctgaacccggcattaaacttcgtttgtattgacgtggcgaatggttattccgaacacttcgtgcagttcgttgcgaaagcgcgtgaagcgtggccgaccaaaaccatttgtgctggtaacgtagtgactggtgaaatgtgtgaggagcttatcctctcaggtgccgatatcgttaaagttggcattggcccaggttctgtttgtacaactcgcgtcaaaacaggcgtcggttatccgcaactttctgcggtaatcgaatgtgccgatgctgcgcacggtctgggcggaatgatcatcagcgatggtggctgcaccacgccgggcgatgtggcgaaagcctttggtggcggtgccgatttcgtcatgcttggcggcatgctggcgggccacgaagagagcggcggtcgcatcgttgaggagaacggcgagaaatttatgctgttctacggcatgagctccgagtctgcgatgaaacgtcacgttggcggcgttgctgaatatcgcgcagcagaaggtaaaaccgttaagctgccgctgcgaggcccggttgaaaataccgcgcgtgatattttgggcggcctgcgttcagcttgtacatacgttggggcttcacgcctgaaagaactgaccaagcgcaccacatttatccgtgtgcaggaacaagaaaaccgcatcttcaacaacctgtaatcttccaacgctggtgtggagcaacacgccagcgttatcccatcccactcatcgcatcgcctaaatggaaaattggcagatacatcgccaccaccagcgtaccgataattcctcccgttatgatcagcaacgccggttccagtaaggctgctaggttatccgccagcgccattgtgttatcccgatgatgatgggcgatgttgtctaacatgagatccagcgagccggaggcctctcccgttctcactaattgcaaacagagcgggctaaactcaccggcattttttaacgccagccagatgggatgaccgttactgatatcgtgctggatttgtgtcagaagttgcacccagtacgggcagcgcattgtttctctgacgctctctacgccctgtaaaaaagtaatgcctgcactttgagtcagcgccagaatcgtaaagatctgcgtgagtttttgtccccgcatcagtgaccccataatcgggatgcgtaacagcaatttctgccgcgcgataagccaggtcgggcggcgcatcagcaacttattggctatcgtcagcataatgccgaacaacaccagcagccagccccattcgccactaaagtctgccagcgtcatgatcccctgcgttagtgccggtagtggggtgttgaaggtcttatagatagcggcaaactccggcagaacaaaatgcagcattgccacaaccaccatgattgccatcgctaaaatgatgatgggataacgtaacgctgattttactttgtcggtcaactgacgctgggctctttgctgacgcgccagttcaaagcagcattcatccagcttaccggtcagttcacccgtgcggatcatcgcctgatagagcggcggaaatacctctgaccagggtaataaggcattggaaaaggcaatgccctgttcgagatcgtgtgccagagattgcagcaacgcttgccattgcttactgggatgctgttccgccagcagtgccagcccttcagaaagcgttaacccggctttaagtagcgtcgccagttgatgaatgacttccgcgcttttatctcctcgccactgcgcagaattgatagcaattcgcttcaggcttagtggggtaaccatctgttgctgtagtgccataagcagtaaagtacggctctctgcccatagcatcccatcttgcgcattgccgtcgccggttatgccatgccagcgccagagttgcttactcgccatgcggcatccccaatacgcggattaactcttcaaaggtggttaagccttgctccacggccaggcagccgttttcaaaaagcgttcgcatacccgcctgtcgggcgtgcgtttccagcgattcaacgtcggtattagcggaaataagctgacgtatgaccggtgttatgggcagaacttcaaataaggcagtgcgaccataaaaaccgtggtagcaatgtacacaaccgggtgcttgccagtggggcagcggcgacggccatacattgactggaatgtggatgggctccccttgctgccggcgacaatgtgggcaaagtttgcgtaccagacgctgggctattaccagcgtaagcgccgatgatagcattcagcgggcgacccccatttgctgtaaacgtaccagcgtttcgcaggtggaattagtgtgtagggtagacaacaccaggtgaccggtttgcgcggctttaatggcaatttctgccgtttcgccatcgcggatctctccgatcatgatgacgtcaggatcctggcgcaataacgcacgcaaaacgccctgaaaggtgagtccggcacgcggatggatttgcgtctggtttagtccggctatggggatctcaaccggatcttcgacgctacaaatattaatgtcagcggtattcagcttttgcagagcactataaagcgtgaccgttttgccgctgccggtagggccagttaccagcaccagtccctgtggttgttgcaaggcatgagcaaagcccgccagttgtaacggctgcattcccagcgtgttaacatccagtgcctggctcacctgctgtaacaaccttaataccaccttttcaccaccccgacatggtaaggtcgcaatacgaaatgagacggcgtttcctgccagttcgacagtgaattgcccgtcctgcggcaggcgatgttccgcaatatccaggtttcccagcacttttaatctggcggttaatgcgactccggcatccggtgaaacatccggtaaaggatgcaatacgccgtcgatacgcaagcggatgcggtaggcattgtccgctggttcgatatgaatatcagacgcgcgttgttccagcgcagattgtaacgttcgagtcagcaactctgctttgggctgatgcttctcctgaacagctacgggcaatgtctgttgtgtgcgactggcgtgaccttccatttgttggcgcgtccagcaggtgatctcaatacgtttggtggtagcgaaatgcaatgcgtccagcaactcatgtgagggggcatcgaccaccgcaacatgaaccacttcttcgctggcatccagcaagactccctgataacgcaggcacagggccgtgagctgtggaatattcattgccgctccttagttggcgtcatcaaagcggaagacatcttcgcaggcttgctgcaatgcgctgtcactttgaatattgcagttgcgcgcccagccggtgacgccgtttgcgttatcccaacctggcgtcatgacgacgcttagcccattgagactttcttgcccggtcagcgacaccacgccctttgccacactcatggctgaaacatagcgggtggtggtaggcgagggaatgccattgctgccaccgtcgcaggtatctaatccaccatgttccagcgcgcacaactctacggcggtacggtaaggcacaaaggtttgtagcatgtcggtgagtgcggctttgcgcaggtagttttgataagcgggaataccaatggcgcttaaaatggcaatgatgccaataaccaccatcagttcgataagtgtaaaaccgcgttgcttgtccatctgtttcgctccttgatttggttggtgctactttggcaaacgccatcagcacaggcgaggggcaaaaaacgaaacgggaaagctgcttccgaggttttttatttcgttgcagcgaaagacaagaaatttgcgaggcgttacgaagaaggttggggaaggggagattatccgcccactatggagcggataaatctgtcagcaactagcgaaaacgcattgaaaggtcgagtgcctgtacgtgcttagttagcgcaccgacggagataaagtccacgcccgtttcggcaaattcgcgcagtgttttgtcagtgacgttgccagacacttccagtagcgccttgccgttggtgcgtttgacggcttcgcgcatctgttctgtttcgaagttatccagcatgatgatatcggctcctgctttcagggcttcatcaagttcttccagattctctacttcgacttctactggcgcatccgggtgcagccaggacgctttttcgaccgcctggcgcactgagccggaggcaataatatggttttctttgatcaggaaggcatcagaaagccccagacggtgattcgctccgccgccgcaaagtaccgcgtatttcagcgctgaacgcagaccgggtaaggttttacgcgtatccaacaactgcgtgttggtgccttccagtaattcgacatagtggcgtaccttactggcaactcctgaaagggtttgcacaaaattaagcgcagtgcgttcgcccgttaacagcacgcgggatgggccttcaagttcgaacaagggttgattggcgttgatgacatcgccgtcatccacatgccagattatggtgacatcgtcgcctgccagttgaataaacacctcttcaacccagcgtttgccgcaaaatacgccattctcgcgggtgatcaccgtggcatgagagcgagaattttccggtaaaagttttgccgtaatgtcattgttggcatcgactgttccgcctaaatcttcccgcagcgcctgggccaccgcgccggggatatcgagattaatgcgttccagcagctcgtcacgtcgggtgtcagggttatagcggcgaggcggcatgttaaaactccagatagctaacgaatcataaggtagaaacatgctactctgaaccgggtattagcaccacatataaggagatcctgcatgttgttagaacaggggtggctggttggcgcnnnccgcgttccctcaccacattacgattgccgcccggatgacgaaacacccaccctgctggtggtgcacaatattagcctgccgccaggcgagtttggcggtccgtggatcgacgcattattcactggaactattgatccgcaggcacatcctttctttgctgagatcgcccatttgcgcgtctccgctcactgtttgattcgccgtgatggtgaaatagtccagtatgttcctttcgataaacgtgcatggcatgcgggagtctctcagtatcaggggcgcgaacgctgcaatgatttttctattgggattgagcttgaaggcaccgatacgctggcgtataccgatgcgcagtatcaacagcttgcggcggttacgcgggcactgattgattgctatccggatatcgctaataacatgacgggccattgtgatattgcgccggatcggaaaaccgatcccggtcctgcatttgattgggcacggtttcgtgcgctggtcagcaaggagacaacatgacgctatttacaaccttactggtgttaattttcgagcgcctgtttaagttgggcgagcactggcagcttgatcatcgtcttgaagcgttctttcggcgggtgaaacatttttctctcgggcgcacgttaggcatgaccattattgcgatgggcgtgacttttttactgttacgcgcattgcagggagtattgttcaacgttcccacgctgctggtgtggctgctgattggtttgctgtgtattggcgcaggtaaagttcgtcttcattatcatgcttatctgacagctgcttcacgtaatgatagccatgcccgtgccacgatggctggcgaactcaccatgattcacggcgtcccggcaggctgcgacgaacgtgagtatttgcgtgagctgcaaaatgcattgctgtggattaactttcgttttcatcttgcaccgctgttctggctgattgtggggggaacctggggacccgttacgctgatggggtatgcgttcttgcgtgcatggcaatactggctggcgcgataccagacgccgcatcatcgtttacagtccggcattgatgcagtgcttcatgtactggattgggtgccggttcgtcttgcaggtgtggtatatgccttgatcggtcatggtgagaaagcgttaccggcctggtttgcttcgctgggtgatttccgtacttcgcaatatcaggtattaacgcgtctggcgcagttctctctggcgcgtgaaccgcatgtcgataaggtggagacgccgaaggcagcggtttcaatggcgaagaaaacctcgttcgtggtcgtggtggtgattgcgctactgacgatttacggggcgttggtgtaaagattattgccctcaccctgtacgggtgagggcgtagagagattaatgtgcttttacggcttttgcggttttctctttaaacagatagccgatacctaacaccaccagccataccgggatcaggtataccgaaatcgccattcctggggtcatcagcataatcaccagtaccaccgccataaacagcaggcagatccagttacccagcggataaagcagagcagggaagcgagttaccacgccttgttcctgcttggcgcgacggaacttcatatgcgccagactgatcatcgcccagttgatcaccagtgcggataccaccagtgccattaacaggccaaatgcggattccggagcaagatagttaatcaatacgcacaatgctgtaaccagcgcagacaccagaatggtgttaaccggtacgccgcgtttatcgacagacgccagcgcttttggcgcgttaccctgttgtgccagaccaaacagcatacggctgttgcaatatacgcagctgttgtacacggagagcgccgcagtcagtaccacgatgttcagcgcattcgccacaaaggtatcgcctaactcgtggaagatcagcacaaacggactggtatcggcggtaacgcgggtccacggcatcagtgagagcagaacggctaacgaaccaatatagaaaatcaggatgcggtagataacctggttagttgctttcgggatactttgctccgggttatcagcttctgctgcggtgatccccaccagttccagaccaccgaacgagaacatgataatcgccatcatcatcaccagcccggtgaagccgtgcggcaggaaaccgccctgatcccacaggttgctaacgcttgcctgcggaccgccgttaccactgaacagcagccagccgccgaagatgatcatcgctactaccgcaataactttgataatggcaaaccagaactccatctcaccaaacacttttacgttggtcaggttgatggcgttaatcaccacaaagaacacggcggcagaaacccaggttgggatttccggataccagaactgaatgtatttacccacagcagtcagctctgccatggcaactaaaacgtacagtacccagtagttccagccagaagcgaagccagcaaagctgccccagtatttataagcaaagtggctaaaggagcctgcgacaggttcttcgaccaccatttcacccagctgacgcatgatcagaaaggcgataaaaccagcaatggcgtaacccaggataatccctggccctgcggactgtattacggaggcgctacccaggaataaccctgtccctatcgcgccacccagcgcgataagctgaatatggcggtttttaaggccgcgctttagctgctcgccgtgctgttgaccttccatcatgaaacctcgtgcggtgattgtttttttgatctacgcagtgatgcgtgtgtaagtttgcaattccgtttgttgtattaatttgtttacatcaaagaagtttgaattgttacaaaaagacttccgtcagatcaagaataatggtatgcggcagcgaatgcacccgctttatgcatggttgaagatgagttgcttaaaaagaaaccgtttgtaaagctcagcctcaacccctctcaatatgcagaatgaatttaaat

SEQ ID NO: 46 - DNA, 53557 bp, Escherichia coli
  Strain O55:H7
  modified_base (2922)..(2922): a, c, g or t
  modified_base (4191)..(4194): a, c, g or t
  modified_base (4624)..(4627): a, c, g or t
  modified_base (9452)..(9452): a, c, g or t
  modified_base (11417)..(11417): a, c, g or t
  modified_base (14566)..(14566): a, c, g or t
  modified_base (17475)..(17478): a, c, g or t
  modified_base (21244)..(21247): a, c, g or t
  modified_base (22826)..(22826): a, c, g or t
  modified_base (24798)..(24799): a, c, g or t
  modified_base (30423)..(30423): a, c, g or t
  modified_base (31628)..(31628): a, c, g or t
  modified_base (32709)..(32709): a, c, g or t
  modified_base (36234)..(36234): a, c, g or t
  modified_base (36960)..(36960): a, c, g or t
  modified_base (37099)..(37099): a, c, g or t
  modified_base (38854)..(38854): a, c, g or t
  modified_base (41089)..(41089): a, c, g or t
  modified_base (49381)..(49382): a, c, g or t
  modified_base (49385)..(49385): a, c, g or t
  modified_base (49666)..(49666): a, c, g or t
  modified_base (51394)..(51394): a, c, g or t
  modified_base (51420)..(51423): a, c, g or t
  modified_base (51425)..(51426): a, c, g or t
gaattaaaaatcacaaaattggtaagtgaatcggttcaattcggatttttatagtttaataatcgttaaaaaatccctttcctacgtaaagtctacatttgtgcatagttacaactttgaaacgttatatatgtcaagttgttaaaatgtgcacagtttcatgatttcaatcaaaacctgtatggacataaggtgaatactttgttactttagcgtcacagacatgaaattggtaagaccaattgacttcggcaagtggcttaagacaggaactcatggcctacagcaaaatccgccaaccaaaactctccgatgtgattgagcagcaactggagtttttgatcctcgaaggcactctccgcccgggcgaaaaactcccaccggaacgcgaactggcaaaacagtttgacgtctcccgtccctcattgcgtgaggcgattcaacgtctcgaagcgaagggcttgttgcttcgtcgccagggtggcggcacttttgtccagagcagcctatggcaaagcttcagcgatccgctggtggagctgctctccgaccatcctgaatcacagtatgacttgctcgaaacacgacacgccctggaaggtatcgccgcttattacgccgcgctgcgtagtaccgatgaagacaaggaacgcatccgtgaactccaccacgccatagaactggcgcagcagtctggcgatctggacgcggaatcaaacgccgtactccagtatcagattgccgtcaccgaagcggcccacaatgtggttctgcttcatctgctaaggtgtatggagccgatgttggcccagaatgtccgccagaacttcgaattgctctattcgcgtcgcgagatgctgccgctggtgagtagtcaccgcacccgcatatttgaagcgattatggccggtaagccggaagaagcgcgcgaagcatcgcatcgccatctggcctttatcgaagaaattttgctcgacagaagccgtgaagaaagccgccgtgagcgttctctgcgtcgtctggagcaacgaaagaattagtgatttttctggtaaaaattatccagaagatgttgtaaatcaagcgcatataaaagcgcggcaactaaacgtagaacctgtcttattgagctttccggcgagagttcaatgggacaggttccagaaaactcaacgttattagatagataaggaataacccatgtcagaacgtttcccaaatgacgtggatccgatcgaaactcgcgactggctccaggcgatcgaatcggtcatccgtgaagaaggtgttgagcgtgctcagtatctgatcgaccaactgcttgctgaagcccgcaaaggcggtgtcaacgtagccgcaggcaccggtatcagcaactacatcaacaccatccccgttgaagaacaaccggagtatccgggtaatctggaactggaacgccgtattcgttcagctatccgctggaacgccatcatgacggttctgcgtgcgtcgaaaaaagacctcgaactgggcggccacatggcgtccttccagtcttccgcaaccatttatgatgtgtgctttaaccacttcttccgtgcacgcaacgagcaggatggcggcgacctggtttacttccagggccacatctccccgggcgtgtacgctcgtgctttcctggaaggtcgtctgactcaagagcagctggataacttccgtcaggaagttcacggcaatggcctctcttcctatccgcacccgaaattgatgccggaattctggcagttcccgaccgtatctatgggtctgggtccgattggtgctatttaccaggctaaattcctgaaatatctggaacaccgtggcctgaaagatacctctaaacagaccgtttacgcgttcctcggcgacggtgaaatggacgaaccggaatccaaaggtgcgatcaccatcgctacccgtgaaaaactggataacctggtcttcgttatcaactgtaacctgcagcgtcttgacggcccggtcaccggtaacggcaagatcatcaacgaactggaaggtatcttcgaaggtgctggctggaacgtgatcaaagtgatgtggggtagccgttgggatgaactgctgcgtaaagataccagcggtaaactgatccagctgatgaacgaaaccgttgacggcgactaccagaccttcaaatcgaaagatggtgcgtacgttcgtgaacacttcttcggtaaatatcctgaaaccgcagcactggttgcagactggactgacgagcagatctgggcactgaaccgtggtggtcacgatccgaagaaaatctacgctgcattcaagaaagcgcaggaaaccaaaggcaaagcgacggtaatccttgctcataccattaaaggttacggcatgggcgacgcggctgaaggtaaaaacatcgcgcaccaggttaagaaaatgaacatggacggtgtgcgtcacatccgcgaccgtttcaatgtgccggtgtctgatgcagatatcgaaaaactgccgtacatcaccttcccggaaggttctgaagagcatacctatctgcacgcacagcgtcagaaactgcacggttatctgccaagccgtcagccgaacttcaccgagaagcttgagctgccaagcctgcaagacttcggcgcgctgctggaagagcagagcaaagagatctctaccactatcgctttcgttcgtgccctgaacgtgatgctgaagaacaagtcgatcaaagatcgtctggtaccgatcatcgccgacgaagcgcgtactttcggtatggaaggtctgttccgtcagattggtatttacagcccgaacggtcagcagtacaccccgcaggaccgcgagcaggttgcttactataaagaagacgagaaaggtcagattctgcaggaagggatcaacgagctgggngcaggttgttcctggctggcagcggcgacctcttacagcaccaacaatctgccgatgattccgttctacatctattactcgatgttcggcttccagcgtatcggcgatctgtgctgggcggctggcgaccagcaagcgcgtggcttcctgatcggcggtacttccggtcgtaccaccctgaacggtgaaggtctgcagcacgaagatggtcacagccacattcagtcgctgactattccgaactgtatctcttacgacccggcttacgcttacgaagttgctgtcattatgcatgacggtctggagcgtatgtacggtgaaaaacaagagaacgtttactactacatcaccacgctgaacgaaaactaccacatgccggcaatgccggaaggtgctgaggaaggtatccgtaaaggtatctacaaactcgaaaccattgaaggtagcaaaggtaaagttcagctgctgggctccggttctatcctgcgtcacgtccgtgaagcggcagagatcctggcgaaagattacggcgtaggttctgacgtttatagcgtgacctccttcaccgaactggcgcgtgatggtcaggattgtgaacgctggaacatgctgcatccgctggaaactccgcgcgttccgtatatcgctcaggtgatgaacgacgctccggctgtggcatctaccgactatatgaaactgttcgctgagcaggtccgtacttacgtaccggctgacgactaccgcgtactgggtactgatggcttcggtcgttccgacagccgtgagaacctgcgtcaccacttcgaagttgatgcttcttatgtcgtggttgcggcgctgggcgaactggctaaacgtggcgaaatcgataagaaagtggttgctgacgcaatcgccaaattcaacatcgatgcagataaagttaacccgcgtctggcgtaagaggtaaaagaataatggctatcgaaatcaaagtaccggacatcggggctgatgaagttgaaatcaccgagatcctggtcaaagtgggcgacaaagttgaagccgaacagtcgctgatcaccgtagaaggcgacaaagcttctatggaagttccgtctccgcaggcgggtatcgttaaagagatcaaagtctctgttggcgataaaacccagaccggcgcactgattatgattttcgattccgccgacggtgcagcagacgctgcacctgctcaggcagaagagaagaaagaagcagctccggcagcagcccccgcggctgccgcgnnnnaagacgttaacgttccggatatcggcagcgacgaagttgaagtgaccgaaatcctggtgaaagttggcgacaaagttgaagctgagcagtcgctgatcaccgtagaaggcgataaagcttctatggaagttccggctccgtttgcaggcaccgtgaaagaaatcaaagtgaacaccggcgacaaagtgtctaccggctcgctgattatggtcttcgaagtggcgggtgaagcaggcgcggcagctccggcggctaaacaggaagcggctccggcagcggcccctgcaccagcggctggcgtgaaagaagttaacgttccggatatcggcggtgacgaagttgaagtgaccgaagtgatggtgaaagtgggcgacaaagttgccgctgaacagtcactgattaccgtagaaggcgataaagcttctatggnnnntccggctccgtttgcaggcgtcgtgaaggaactgaaagtcaacgttggcgataaagtgaaaactggctcgctgattatgatcttcgaagttgaaggcgcagcgcctgcggcagctcctgcgaaacaggaagcagcagcgccggctccggcagcaaaagctgaagccccggcagcagcaccggctgcgaaagcggaaggcaaatctgaatttgctgaaaatgacgcttacgttcacgcgaccccgctgatccgccgtctggcacgcgagtttggcgttaaccttgcgaaagtgaagggcactggccgtaaaggtcgtatcctgcgcgaagacgttcaggcttacgtgaaagaagctatcaaacgtgcagaagcagctccggcagcgactggcggtggtatccctggcatgctgccgtggccgaaggtggacttcagcaagtttggtgaaatcgaagaagtggaactgggccgtatccagaaaatttctggtgcgaacctgagccgtaactgggtgatgatcccgcatgttactcacttcgacaaaaccgatatcaccgagctggaagcgttccgtaaacagcagaacgaagaagcggcgaaacgtaagctggatgtgaagatcaccccggttgtcttcatcatgaaagccgttgctgcagcgcttgagcagatgcctcgcttcaacagttcgctgtcggaagacggtcagcgtctgaccctgaagaaatacatcaacatcggtgtggcggtggataccccgaacggtctggttgttccggtattcaaagacgtcaacaagaaaggcatcatcgaactgtctcgcgagctgatgactatttctaagaaagcgcgtgacggtaagctgactgcgggcgaaatgcagggcggttgcttcaccatctccagcatcggcggcctgggtactacccacttcgcgccgattgtgaacgcgccggaagtggctatcctcggcgtttccaagtccgcgatggagccggtgtggaatggtaaagagttcgtgccgcgtctgatgctgccgatttctctctccttcgaccaccgcgtgatcgacggtgctgatggtgcccgtttcattaccatcattaacaacacgctgtctgacattcgccgtctggtgatgtaagtaaaagagccggcccaacggccggcttttttctggtaatctcatgaatgtattgaggttattagcgaatagacaaatcggttgccgtttgttgtttaaaaattgttaacaattttgtaaaataccgacggatagaacgacccggtggataatgggcgtcataaaaaaaacgtcagacccgccggagataaatatatagaggtcatgatgagtactgaaatcaaaactcaggtcgtggtacttggggcaggccccgcaggttactccgctgccttccgttgcgctgatttaggtctggaaaccgtaatcgtagaacgttacaacacccttggcggtgtttgcctgaacgtcggctgtatcccttctaaagcactgctgcacgtagcaaaagttatcgaagaagccaaagcgctggctgaacacggtatcgtcttcggcgaaccgaaaaccgatatcgacaagattcgtacctggaaagagaaagtgatcaatcagctgaccggtggtctggctggtatggcgaaaggccgcaaagtcaaagtggtcaacggtctgggtaaatttaccggggctaacaccctggaagttgaaggtgagaacggtaaaaccgtgatcaacttcgacaacgcgatcattgcagcgggttctcgcccgattcaactgccgtttattccgcatgaagatccgcgtatctgggactctactgacgcgctggaactgaaagaagtaccagaacgcctgctggtaatgggtggcggtatcatcggtctggaaatgggcaccgtttaccacgcgctgggttcacagattgacgtggttgaaatgttcgaccaggttatcccggcagctgacaaagacatcgttaaagtcttcaccaagcgtatcagcaagaaattcaacctgatgctggaaaccaaagttaccgccgttgaagcgaaagaagacggtatttatgtgacgatggaaggcaaaaaagcaccagctgaaccgcagcgttacgacgccgtgctggtagcgattggtcgtgtgccgaacggtaaaaacctcgacgcaggcaaagctggcgtggaagttgacgaccgtggtttcatccgcgttgacaaacagctgcgtaccaacgtaccgcacatctttgctatcggcgatatcgtcggtcagccgatgctggcacacaaaggtgttcacgaaggtcacgttgccgctgaagttatcgccggtaagaaacactacttcgatccgaaagttatcccgtccatcgcctataccgaaccagaagttgcatgggtaggtctgactgagaaagaagcgaaagagaaaggcatcagctatgaaaccgccaccttcccgtgggctgcttctggtcgtgctatcgcttccgactgcgcagacggtatgaccaagctgattttcgacaaagaatctcaccgtgtgatcggtggtgcgattgtcggtactaacggcggcgagctgctgggtgaaatcggcctggcaattgaaatgggttgtgatgctgaagacatcgcactgaccatccacgcgcacccgactctgcacgagtctgtgggcctggcggcagaagtgttcgaaggtagcattactgacctgccgaacccgaaagcgaagaagaagtaatttttcgtttgccggaacatccggcaattaaaaaagcggctaaccacgccgctttttttacgcctgtaatttacctttccagtcgccttgctccgcgctcagagagacgttcgcgtactgctgaccgttgctcgttattcagcctggcagtatggttactgtcgtttagacgttgtgggcggctctcctgaactttctcccgaaaaacctgacgttgttcaggtgatgctgattgaacacgctggcgggcgttatcacgttgctgttggttcagtgggcgctgctgtactttttccttaaacacctggcgctgctcaggcgaggctgactgaatacgctcacgcgctgcgtctcttcgctgctggatctgtgggttagtctgcattttctcgcggactgcctggcgctgctcaggcgaggcgggctgaatgcgctcacgcgctgcctctcttcgctgctggttctgcgggttagtctgcattttctcgtgaactgcctggcgctgctcaggagaagctgactgataacgctgacgagcggcgtccttttgttgctgggtcagtggttggcgacggctgaagtcgcggaagtcgtcatagctcccatagtgttcagcttcattaaaccgctgtgccgctgcctgacgttgggtatctcgtgtaatgacgggggcggcgtgtgttcgttgctgaaactgacttgctgccgcctgacgctggctgtcgcgtgttggagcaggtagctgcgtggcactcattccgccgttgacatcagtttgatgaaaccgctttgccatatcctgatcatgatagggcacaccattacggtagtttggattgtgccgccatgccatattcttatcagtaagatgctcaccggtgatacggttgaaattgttgacgtcgatattgatgttgtcgccgttatgttgccagccattaccgtcacgatgaccgccatcgtggtgatgataattatcatcgtcatgatgatgatggtcatgatcgtcgtcatcccagtcgatgctgctgaatagtgcgtacgtggtagcaacgcccatgctatagccgaatccgcgtacaaagctgtcaacaaacggttctccggctggtggtggcagataaaccggcggatacgcagtattggcccagttcccgtaaaccacggttgggttgtagttgggaatatagaccacatcaggattgccgggctcaatggaaatgacggttgttgcaggctctgtaatgacagggttggcagttgaaacggtattggatggtatgacgggagccgtgactgtctgtgttaccggtacagttttcttcgttgtggtaataactttctgttcggttgatgacttcagcgagccggtttgttgtgccagttgccgcaatcgttgtaccgagtccatcacgtcctgcggctgggccagaaaagcatcgcccaggttttgcacccattgcgggttttcgcccatcaatgccatcaattgtggaaaggccaccagtgatttaacgctggcgtcccacggctggtcagataccgcctgaatagcagcatcgccttgtttaagtggattatcgtgcgaccattgcactgcttgagcaacgtttgtcggataggttgatgccatcagcacctgcgaaagtagggcgtcgggatacagcgcgacgggcgcgacccattgatctatttgtgcagtgctgaatgcggatttgacgacggcgggtgttacgggaggtgcggaaaccgttgcaggaagcgtaactgcggcagcgtcagacacagccagttgtgtcgattgcgtttccacaggcgcttccactgtgcggctttttatatatagcccggcagaggcggcacaaagcccggcactgcaaattagcgccagcacatggggtttaaacggcaaagtcattttcataattcggatctcaaggaaatcgcaatggtcggcgaactgccacccgcaggtgctgtgaatccgagtataaagaggcggtagtttaaattttgactaatcttgggattcgttgagaaaggtgattntcaccatgcgaattaacgaagtttttacggagggaaacaatctctagaccatccttaacgattcagccacttttttatgttgcttttttgtaaacagattaacacgtcgtcaaaatcctgctattctgcccgttgcggtactgggcatttaccctacaaactgctgtctcacaggagcgtgaagagaatcgcctgccgcactatgacaatgagagcgaggagaaccgtcgtgctagaagaataccgtaagcacgtagctgagcgtgccgctgaggggattgcgcccaaacccctggatgcaaaccaaatggccgcgcttgtagagctgctgaaaaacccgcccgcgggcgaagaagaattcctgttagatctgttaaccaaccgtgttcctcctggcgtcgatgaagccgcctatgttaaagcaggcttcctggctgctgtcgccaaaggcgaagccaaatccccactgctgactccggaaaaagccatcgaactgctgggtactatgcagggtggttacaacattcatccgctgatcgatgcgctggatgatgccaaactggcaccgatcgctgccaaagcactttctcacacactactgatgttcgataacttctatgacgtagaagagaaagcgaaagcaggcaacgaatatgcgaagcaggttatgcagtcctgggctgatgccgaatggttcctgaatcgcccggcgctggctgaaaaactgaccgttaccgtcttcaaagtcactggcgaaaccaacaccgatgacctttctccggcaccggatgcgtggtcacgcccggatatcccattgcacgcgctggcgatgctgaaaaacgcccgtgaaggtattgagccagaccagccaggtgttgttggcccgatcaaacagattgaagctctgcaacagaaaggtttcccgctggcgtacgtcggtgacgttgtgggtacgggttcatcgcgtaaatccgccacgaactccgttctgtggtttatgggcgatgatattccacatgtgccgaacaaacgcggcggtggtttgtgcctcggcggtaaaattgcacccatcttctttaacacgatggaagatgcgggtgcgctgccaatcgaagtggatgtctctaacctgaacatgggcgacgtaattgacgtttacccgtacaaaggtgaagtacgtaaccacgaaaccggcgaactgctggcgaccttcgaactgaaaaccgacgtgctgattgatgaagtgcgtgctggcggccgtattccgctgattatcggtcgtggcctgaccaccaaagcgcgtgaagcacttggtctgccgcacagtgatgtgttccgtcaggcgaaagatgtcgctgagagcgatcgcggcttctcgctggcgcagaaaatggtaggccgtgcctgtggcgtgaaaggcattcgtccgggcgcgtactgtgaaccgaaaatgacttctgtaggctctcaggacaccacaggcccgatgacccgtgatgaactgaaagacctggcgtgcctgggcttctcggctgacctggtgatgcagtctttctgccacaccgcggcgtatccgaagccagttgacgtgaacacgcaccacacgctgccggacttcattatgaaccgtggcggtgtgtcgctgcgtccgggtgacggcgtaatccactcctggctgaaccgtatgctgctgccggataccgtcggtaccggtggtgactcccatacccgtttcccgatcggtatctctttcccggcgggttctggtctggtggcatttgcagccgcaacaggcgtaatgccgctggatatgccggaatccgttctggtgcgcttcaaaggcaaaatgcagccgggcatcaccctgcgcgatctggtacacgccattccgctgtatgcgatcaaacaaggtctgctgaccgttgagaagaaaggcaagaaaaacatcttctctggccgcatccnggaaattgaaggtctgccggatctgaaagttgagcaggcctttgagctgaccgatgcgtccgccgagcgttctgctgccggttgtaccatcaagctgaacaaagaaccaatcatcgaatacctgaactccaacatcgtcctgctgaagtggataatcgcggaaggttacggcgatcgtcgtaccctggaacgtcgtattcagggcatggaaaaatggctggcgaatcctgagctgctggaagccgatgcagatgcggaatacgcggcagtgatcgacatcgatctggcggatattaaagagccaatcctctgtgctccgaacgacccggacgacgcacgtccgctgtctgcggtacagggcgagaagatcgacgaagtgtttatcggttcttgcatgactaacatcggtcacttccgtgccgcaggtaaactgctggatgcgcacaaaggtcagttgccgacccgcctgtgggtggcaccgccaacccgtatggacgccgcacagttgaccgaagaaggctactacagcgtcttcggtaagagtggtgcgcgtatcgagatccctggctgttccctgtgtatgggtaaccaggcgcgtgtggcggacggtgcaacggtggtttccacctctacccgtaacttcccgaaccgtctgggtactggcgcgaatgtcttcctggcttctgcggaactggctgctgttgcggcgctgattggcaaactgccgacgccggaagagtaccagacctacgtggcgcaggtagataaaacagccgttgatacttaccgttatctgaacttcaaccagctttctcagtacaccgagaaagccgatggggtgattttccagactgcggtttaaaaagtcagcgcacgcgctgcgcataaacgacacaatgcccggtgaatgagattcccgggcatttttttatttctaaaccatcgccgttccgctgtttttctccggtaaggctgcgataattacatcaatggcgcaatgcgatttcggtgcattgccgggagcagaggaacacactatggattacgaatttctgcgcgatattaccggagtggtaaaggtgcgtatgtccatggggcatgaagtggtcgggcactggtttaatgaagaggtgaaagaaaacctggccttgcttgatgaagtggaacaagcagcgcacgcactgaaaggtagcgaacgttcctggcagcgggcagggcatgagtatacgctatggatggacggcgaagaggtgatggttcgcgccaatcaactggaattcgctggcgatgaaatggaagaggggatgaactactacgacgaagaaagcctgtcgctatgcggcgttgaggattttctgcaggtcgtggcggcttaccgcaatttcgtgcagcagaagtaaataaatctggcggagcctgggagctccgccagagccgttaaacagctggcatattgcgcccgtaataaatctcgcgcatttctttccacagcgcagcggtaatttcctggcgctcgctgtcggttaaatcttccggtttggtgtggaacatgtagtgcttaaggtcgaactctttaagcaacatcttggtatggaagatattttcctgatagacgtttacatccaccatgtcatacagcgccttcatatcgtcagacataaagttctgaatcgaattaatctcatggtcgataaagtgcttcataccgttaatgtcgcgggtaaaaccgcgcacgcgataatcaatggttacgatatcggactcaagctggtggatcaggtaattcagcgccttcagcggagaaatcacgccgcaggtagagacttcaatatcggcgcggaaggtacataaaccgccttcaggatgactttccgggtaggtatgtacgcaaatatgacttttatcgagatgggcaacgaccgtttctggcagtgggccggggtgttctgttttgtcgatgagtttcgggtcaaccggttcttcactcaccagaatagtgacgctggcaccctgtggttcgtaatcctggcgggcgatgttaagaatattagccccgataatggaacaggtttctgacaggatttcggtcagacggttggcattatagagttcatcgatataagcaatataaccgtcgcgctcttcggcagttttggcgtagcagatatcgtaaatacaaaaactcagacttttggtcagattattaaagccatgcagtttcagttttttcaatttcttatcttctccttaggacggctgtgaagccagtgcgtcttgcagatactggggtaaggcaaaagctgccgtatggactgccggattgtaataacggcatttcaggccagaggcgagaaaacgcgcctgaataatttcggttgagagatggcgtaaggcgtcgttatctgtcgcccatgcaaaagtcatgataccgccgtaataggtcgggatcgccgcctgataaaagccaacgtcgctgaagtaatggctgagtttgcgatggctgtcgatggcttcttcctgctgtaaaaagcagacgccgttttgtgcgacgaagataccgccaggattcaggcaacgtttgcagccttcataaaatgccgaagtgaaaaggctttcgccgggaccgataggatcggtgcagtcggagataatgacatcaaaggtctggctggtttgattaacgaaattgacgccatcgtcgatcaccagcttaaagcgcggatcgtcgtagctaccggcgttatggttgggtagatactgacggcagaacgacacgacacccgcatcgatttccaccatcgtgattgactcaacgtttttatgtcgggttacttcacgcagcatggcaccgtcgccgccgccgataatcagcacatgtttcgcgtgaccgtgggccagtagcggaacatgggtcatcatctcatgatagataaactcgtcgcgctcggtggtttgtactacgccatccagcgccattacgcgaccaaatgcagcgttctcaaaaatgatcagatcctggtgatcggtcttttcatgatacagagcgttatctaccgcaaagtactgtccaaactggtcgtgtagcgtttcatgccactgttttttttcggccatgggttgatacctcctttgttaacacccgtaaaaanagggcgcaacataatagctaacattgaccgcggatgcacggtcaatatttctacaaaaaggtatcagggattatttgacgtaggcaagcaggcttaaggaatcgcgagccagggccttgcactttttagcgacgggaatgccaatgccgctgagatcgcggtagctgtcttcaccgagagctttcatgtcgaaggtgtcgtaattactgagatcccactggttttgctgggcgaaaaagaccagtgcgcgacgaatttgcccgttaggtaagttctggtaaccacaatcgttcttcagaaagacaaaaactgccgttaaatcggccatatcttcggcttcagactcactgagcgcgtaactgtttgcgcaaacggccatcaggctgccgaataacactgttctgaaaaacgtcttcattgcttctaccaggggcttaaagaagataaacgttagcacactgcgagcgaggcgacgaccattattgtcgattaaattgtgtctgcggcttgaccttcccgtaaggggaaggactatgctcaacgtttgattttgtttcgcctgcttaagaataaggaaataactatgcaacgtcgtgatttcttgaaatattccgtcgcactgggtgtggcttcagccttgccactgtggagccgtgcagtctttgcggcggaacgcccaacgttaccgatccctgatttgctcacgaccgatgcccgtaatcgcattcagttaactattggcgcaggtcagtctacctttggcgagaaaactgcaactacctggggctataacggcaatctgctggggccggcggtgaaattacagcgcggcaaagcggtaacggttgatatctataaccaactgacggaagagacgacgttgcactggcacgggctggaagtaccgggtgaagtcgacggcggcccacagggaattattccgccaggtggcaagcgctcggtgacgttgaacgttgatcaacctgccgctacctgctggttccatccacatcaacatggcaagaccgggcgacaggtggcgatggggctggctggtctggtggtgattgaagatgacgagatcctgaaattaatgctgccaaaacagtggggtatcgatgatgttccggtgatcgttcaggataagaaatttagcgccgacgggcagattgattatcaactggatgtgatgaccgccgccgtgggctggtttggcgatacgttgctgaccaacggtgcaatctacccgcaacacgctgccccgcgtggttggctgcgcctgcgtttgctcaatggctgtaatgcccgctcgctcaatttcgccaccagcgacaatcgcccgctttatgtgattgccagcgacggtggtctgctacctgaaccggtgaaggtgaacgagctgccggtgctgatgggcgagcgttttgaagtgctggtggaggttaacgacaacaaaccctttgacctggtgacgctgccggtcagccagatggggatggcgattgcgccgtttgataagcctcatccggtaatgcggattcagccgattgctattagtgcttccggtgctttgccagacacattaagtagcctgcctgcgttaccttcgctggaagggctgacggtacgcaagctgcaactttctatggacccgatgctcgatatgatggggatgcagatgctaatggagaaatatggcgatcaggcgatggccggaatggatcacagccagatgatgggccatatggggcacggcaatatgaatcatatgaaccacggcgggaagttcgatttccaccatgccaataaaatcaacggtcaggcgtttgatatgaataagccgatgtttgcggcggcgaaagggcagtacgaacgttgggttatctctggcgtgggcgacatgatgctgcatccgttccatattcacggcacgcagttccgtatcttgtcagaaaatggcaaaccgccagcggctcatcgcgcgggctggaaagataccgttaaggtagaaggcaatgtcagtgaagtgctggtgaagtttaatcacgacgcaccgaaagaacatgcttatatggcgcactgccatctgctggagcatgaagatacggggatgatgttagggtttacggtataaaaagaccgtattcgggaatatgcccggatctctccgggcattaaactgatgacaaacgcaaatctgcctgatgcgctacgcttatcaggcctacgttacctgtgcaatccattgattttgcacaattttgtaggctggataaggcgttcacgccgcatccggcatgaacaacgcgcacgttgtcagcaatctgagcaagtcttacttcacatcatccggcagcgcataagccacaatatagtcacccatcttcgtaccaaatgaaccgtgaccgcctgcggagatcactacatactgcttaccattcacttcataggtcattggcgtcgcctgaccacccgctggtaaacgaccctgccacagtttttcaccgttgctcatgttgtaagcgcgcaggtagttatctgccgtagcggcgataaacagcacgttacccgccgtggagattggcccgcccagcatcggcatacccatattgaacggcaccggtacaggcatcgggaacggcatactgtcctgcggcgtaccaatacgtttcttccacaccacttcattagttttcagatccagcgccgagatataaccccatgctggctgtttacatggcagaccaaatggtgagaggaacgggttgagcgtgacaccatacggtacaccgtactgtggctgaatgccggattccgtacccgtgcctttggcatctttcggctgctccatcgggttacccggaccgcgtgggatcagtttcgaaacaaacggcagtgccattgggttnnnnattgccacttcacgatttggatcaacggaaatcccgccccattcaaacattcccaggttacccgggaagaccagcgtgccctgttcagatggcggcgtgaaaatgccttcatagcgcatctggtggaacatcacgcggcacaccagttggtcaaacatggtggctccccacatatccgcaccgctcaaatctttcgtcggacggaagctcagttccgagaatggttgagtaggggtaacgtaatcgcctttggcagcaccttggggaaccggtttttccggtgccggaaccaccagttcgccattacgacgatcgagcacaaaaatgttgccggttttcgccggagcgtaaataactggcactttctgaccattaacggtgatgtccgccagcgtcggctgtgccggaagatccatatcccacaggtcgtggtgaacggtctggtagctccacgccaatttcccggttgtggcattcagcgccagaatcgagctggcataacgttcctgttccggtgtgcggttaccgccccagatatccggcgtggtcacgcccatcggcagatacaccagatccagcttcgcgtcataggccgctggtgcccacgagtttggcgagttaaaggtaaaggtgtgttcgtcagacgggattgcgttcggatctttcgcgcccggatcaaaagcccacagcagctccccggtgttgacatcaaaaccacggatcacgccagacgtttcgcgggttgagaagttatcggtaactgaacctgccatcacgatggttttatcggtgataatcggtggcgaagtcggttcatacagacccggtttggtgtctggcatattgctttgcagattgagcacgcctttattggcgaaggtttcgcacagcttgccgttttcagcgttaatcgcaatcaggcgaccatcattgaccggaagaatgatacgacgcgggcaatccgccatcacttccggcgaagccgtttctgctttggcttcatgataagagacgccacggcaggttacgtgctggaaagactcgttagttttcagctcaggatcgtaatgccatttctctttgccgctggcggcatcgagcgcaaacaggcgctggtgagcggtacacaggtaaagggtgtcgcccactttaatcggcgtcacttcattggtgatttcgcccggatcgttcggctgcttcacatcgccagtacggaacacccaggcttctttcagattatggacgttatcggcgttaatttgtttcagaggtgaaaagcgttgaccttcctgattgcgaccataggcaggccagtcctgatcggcaacgggtgagatagcttccgcaggtgtggcatcggcgcttaaggtgccgttgatttcctgcggatcgttaaatccggcccaggtcaggatactaccgctaatcagcagtgccaccaccagtgcggcaactgcgccgctggcaggaatgaccaggcgacgccagacaaacggcaggatcagccagatgccgaagaagaccagaatatcgctgcgcggagtcagcgcccagaagtcgaaaccaacttcccagacgccccaaatcatggtgccgagcagcagggcggcgtatagccaaagcgcggcacgtttactgcgccacagcatccaggcgacgccgagcatcacaaggccagcgatagggtagtaccaggagccgccaatcgcgaccagccagcctccgccaatgagtagatacagcccgcaaagcgctgcaaaaagggctgttagcgtgacgagtaatcgtcgcgagcctgtattgttaattgccataaagagacaccatttcaattcattaatattttagtagcaattaattataggttttaacatgtgtgatcgtcatcacaatttgagctttattaacagattccgcgaatgaatcgttttgctggtatactgcgtgtcttgcgctttgttgcggtgccaaaacctgcccgtgcgaagtgatttgtttttaaatcatatggttagagatatgaaacatactgtagaagtaatgatccccgaagcggagattaaagcgcgtatcgccgaactgggtcgtcagattactgagcgttacaaagacagcggcagcgatatggtgctggtgggtctgctgcgtggctcatttatgtttatggcggacctgtgccgtgaagttcaggtatctcatgaagtcgactttatgaccgcctccagctacggtagcggcatgtccaccacccgtgatgtgaaaatcctcaaagatctggatgaagatatccgtggcaaggatgtgctgattgttgaagatatcatcgactcggggaatacactgtcgaaagtgcgtgagatcttaagcctgcgcgaaccgaagtcgttggcgatttgtacgctgctggataaaccgtcccgtcgtgaagtgaacgtcccggtagaatttatcggtttctcgatcccggatgagtttgtggtgggttacggcattgattacgcacagcgttaccgtcatctgccgtatatcggcaaagtgattctgctggacgagtaagtgtgaagttgccggatgtgttgcatccggcatggcatttttatttgtggttggcgtgtttcagcttgaggttggaaatcccgtgacggtaacgttgctcaagggtttcgcggttggtggcagtaacatccagatcacgcagcaagccgtcgtgaatgccataagcccagccgtgaatggtaactttctgcccgcgtttccacgctgattgcataatggtggagtggcccaggttatacacctgttccatgacgttcagttcacacaaggtatccagacggcgctcttgcggcatttcgtcgagcaatgagctatgtttgaaccagatatcgcggatatgcagcagccagttgttgataagccccagttccgggttttcaactgcggcttgtacgccgccgcaaccgtagtggccacagataataatgtgttcaacttcgagtacatccactgcatactgaaccacggaaaggcagttcaggtcggtgtgaatgaccaggttagcaacattacggtgaacaaagagttcgcccggctcaagaccggttaaacgttctgcaggaacgcgactgtcggaacatccaatccatagaaagcgcggtttttgcgcttgtgccagtttctcaaaaaacccgggatcctcttccaccagcatttttgaccatagtgcattgttgctgatgagtgtatctatgtctttcatggaggttaacgacctgtaaccaaataattacgtttggctaatatagggcaactccgggacgatttaaaccacagataaagtgtaagaacgtaaggtaagtaaaaatttatgaccattgcactggaacttcaacagcttaaaaaaaactatccaggcggcgttcaggcgcttcgtggaatagatttgcaggtcgaagcgggtgatttttatgcgcttctcgggccgaacggggccgggaaatcgaccactatcggtattatcagctctctggtaaataaaacctccgggcgggtcagcgtatttggttacgatctcgagaaagatgtcgtgaacgctaaacgtcagttgggactggtgccgcaggaatttaacttcaacccgtttgaaaccgtgcagcaaattgtggtgaatcaggcagggtactacggtgtggagcgcaaagaggcgtacatccgcagcgaaaaatatcttaagcagctcgatttatggggaaaacgcaacgaacgnnnncgcatgttatctggcgggatgaagcgccgtttaatgattgcccgtgcgttaatgcatgaacctaaactactgattctcgacgagccgactgcaggcgtggatattgaacttcgccgctcaatgtggggctttttgaaggatttaaacgacaaaggcaccaccatcattctcaccacacactacctggaagaagcagaaatgctgtgccgcaatatcggcattattcaacacggtgagctggtggaaaatacctcgatgaaggcgctgctggcgaagctgaaatcggaaacctttattctcgatctcgcaccgaaaagtccgttaccgaagctcgatggctatcagtatcgactggtcgataccgcgacgctggaagttgaagtgctgcgtgagcaggggatcaacagcgtatttacgcagttaagtgagcagggcattcaggtattaagtatgcgtaacaaagctaaccgtctggaagagctgtttgtttcactggttaatgaaaaacaaggagatcgcgcatgatgcatctttactgggtggcgctaaaaagcatctgggcgaaagagatccatcgctttatgcgtatctgggtgcagacgctggtgccgccagtcatcaccatgaccctttactttattattttcggtaacctgattggttcgcgtattggcgatatgcatggcttcagctacatgcagttcatcgtaccggggctgatcatgatgtcggtgatcaccaacgcctacgccaacgtcgcgtcatcattttttggtgccaagttccagcgtaatattgaagagctgctggtagcgccggttccgactcacgtcattattgccggatatgtcggcggtggcgtggcgcgtggtctgtttgttggcattctggtgacggcaatttcactgttttttgtgccgtttcaggtgcattcgtgggtattcgttgccttaaccctggtgctcacggcggtgttgttctcccttgcgggtttgctgaacggtgtgtttgccaaaacgttcgatgacatcagcctggtgccaacctttgtgttaacgccactcacgtatttgggtggggtcttttactcactgactttgttgccgccgttctggcaagggctgtcgcacctgaacccaatcgtttatatgatcagtggtttccgctacggcttcctcggtatcaatgatgttccgctggtcactacctttggcgtactggtggtctttattgtggcgttttatttgatctgttggtcgctgatccaacgtggacgtggtttgcgtagctaaggctatttcctctcctctggatttgggggagaggagttttgacggctatcaccctttatcaacaatggtcagggtagactgattttcggctaaggaggaaggcgatgttaggttgggtaattacctgtcacgatgaccgggcgcaagagatactggatgtgctggagaaaaaacatggggcgcttcttcagtgccgggccgtgaatttctggcgcggattaagttctaatatgctcagccgcatgatgtgcgatgctctgcatgaagcggactctggtgagggtgtnatcttcttaaccgatatagccggagcgccaccgtaccgcgtggcttcattattaagccacaaacactcccgttgcgaagtgatttctggtgtcacgttaccgttaattgaacagatgatggcttgccgtgaaaccatgaccagttcagagtttcgcgagcgtattgtcgaactgggtgcgccggaggtgagtagtatttggcaccagcaacaaaaaaatccgcctttcgtcctcaaacataatttgtatgagtattaacccgcgattctgatggcgcttttgctacaataaaagcgttgtttcaccctcggtgattttttcatgtacaaacaagctgttattctcctgctgatgctgtttaccgcaagtgtcagtgccgcgttacctgcccgttatatgcaaaccatcgaaaatgctgcggtctgggcgcaaattggtgacaagatggtgaccgtggggaatattcgggccggacaaatcattgccgtggagcccactgccgcaagttattacgcatttaattttggctttggtaaagggtttatcgataaaggtcatcttgagccggttcaggggcgacaaaaagttgaagacggtttgggtgacctcaacaagccgctgagtaatcagaacttagttacctggaaagatacgccggtctataacgcgccgagtgtgggcagtgcgccatttggggtactggcggacaatttgcgctacccgattttgcataaactgaaagacaggttaaatcaaacctggtatcagatccgtattggcgatcgactggcctatatcagcgcgctggatgcccaacccgataatggccttccggtgctaacctatcaccatattctgcgcgacgaagaaaacacccgttttcgccatacttcgacgaccacctcggtacgcgctttcaataaccagatggcctggctgcgcgacaggggatacgcgacactgagcatggtgcagctggaaggttacgtgaagaataagatcaatcttcctgcgcgagcggtggtgattacctttgatgatggcctcaagtcagtgagccgctatgcgtatcctgtgttgaaacaatatggcatgaaggcgacggcgtttattgttacctcgcgcatcaaacgtcacccgcagaagtgggaaccaaaatcgctgcaatttatgagcgtttctgagcttaacgaaattcgcgatgtatttgatttccagtcacatacccattttttgcatcgggtagatggttatcgccgacccatattactgagccgtagtgagcacaatattctgtttgattttgcacgttcacgtcgcgctctggcgccatttaatccgcatgtctggtatctttcgtatccgtttggcggctttaatgacaaagccgtgaaggcagcaaacgatgccggatttcacctggcggtgacaaccatgaaaggcaaagtaaaaccgggggataatccgttgttactaaaacgactttatatcttaagaacggattcgctggagacgatgtcgcggctggtgagtaaccagccgcagggataacaatcaagcaacctgtaccggaatcgctttcgcggtacgtttcatttcattgtcgccttcaaaataggcgacgttgggtcgccaggtgcgagcttcttcatctggcatggtaacgaagctggcgatgatgacaatatcgccgacactggcgcagtgggccgccgcaccgttaacagaaataattctcgaaccgcgttctgccgcgatggcataagtggagaaacgcttgccgttggtgacattccagatatcaatggcttcgttttcgagaataccggctgcgtcaagaaaatcctggtcaatggcgcaagaaccttcatagtgcaggtccgcatgagtcactttcacgcggtggagtttgccctgcagcatcgtgcgaatcataacttctacctttctaccctgtcgttaacgaagcagnnggtgcctgctttgaggaaattctcacgcagtattgcccgatttttgtttagtgtctactcatctgacggcatttgcatcagcagtttgcgtaccgcgccgaagcgtgcaatgtatcgcctgtaacgaattgatatttctctgaacgctgctcggtaaacaataaagaggtggctgacgatagcacgccttgactggatactgccttcacgcaagacaacacggaagacagggaagatggatgcaccgagtaccacaccgcatgacgcggtatttaaacaatttttaatgcatgcggagacggctcgcgactttctggagatacatttgccagtggaattacgcgaactttgtgacctcaacacgcttcatttagagtcggggagtttcattgaagagagccttaaaggacacagcacggacgtgctctattccgtgcaaatgcagggcaatcccggttatctgcatgttgtgattgaacaccaaagcaagccggataagaaaatggcctttcgcatgatgcgttattctatagccgccatgcatcggcatctggaggcggatcacgacaaactaccgctggtagtgccgattctcttttatcagggcgaggccacaccttatccgctctcaatgtgctggtttgatatgttttactcgccggagctggcgcgacgcgtctataacagtcctttcccgctggtggatatcaccatcacaccggatgacgaaatcatgcaacatcggcggattgcgattctcgaactactgcaaaaacatattcgccagcgcgacttaatgttattgctggagcaactggtcacgctgattgacgaagggtacactagcgaaagtcagttagttgccatgcaaaactatatgctgcaacgcggtcatactgaacaagcggatttgttttatggtgtgctgagagacagggaaacgggagggaagtctatgatgacgctggcacagtggtttgaagagaaagggattgagaaggggattcagcagggaagacaggaggagaggcaagaattcgcccagcgttttctgagtaaagggatgtctcgggaagacgttgcagagatgacaaatttatctcttgctgagattgataggctgattaactaagttgtctgcgttatgaataattgcttacagacgccatcgccatgacgtggggcaaattaataattggcgccatcagccgtagcgccagttatactcgtcatacttcaaattgcatgtgctgcgtctgcgttcgctaaccccagtcacttacttatgtaagctcctggggattaatgagagacatccatgtctctcaccgaaggccagcctgcggctgggcaaattcgttcctgacgaatttgtcactcgcttgccgccttcctgcaacttgcaacttgaattatttagagtataagtattacgccagctcgaccattttgttgtcgatcaggcgagcatcgccaagccaggcggctaccagaattactgcccgtttgctggtttcagagacttccagcaatgtgtcggcatcgcgaatctgaatatcatcggcgcggaagcctttttcattcagttcttgcccggcaatagcaataatttcatcgagatcccgttcgccagcctgcaatttgtcggcaatcgaacttaaaactttgtacagaccgggcgcaattttgcgttgttctgccgtcagataaccgttacgggaactcagtgccagaccgtctttggcgcgcataattggcacaccgacaatctcaatatcaaagcccatatcagcaaccattttgcggatcagcgccagttgctgaaagtccttttcaccgaagcaggcgatgtccggctggaccaggttaaacagcttgctgacgatagtcgacacgccgcgaaaatgccccggccggctggcgccttccagcatggtcgaaagccctggaacgtcaacgtaagtatgggtttcagtaccgttcgggtagatctcttttaccgagggcgcgaaaaccagatccactttgcgcttgttcagcttttcgcagtcttcctgcaaggtgcgtgggtaccgagccaggtcctccgggcggtcgaactgcatcgggttaacgaaaatactgacgacgaccacatcggcgcgggctttggcttcgtcgaccagcttcatgtggccatcatgcaggttgcccatggtaggtaccagcgccacgcgcttgccttccatacgcaggcggcgaatttgctggcgcagcagtggcagggtttcgataattaacacaacgtcactccttaatggaaactgtgttcttcgcccggataaacgccggactccacttcagccatatactgccgcacagcagcgcggatgtcgcccgtttcagcgaggaaatttttggcaaatttagggatatgaccgccggtaatgccgaacgcatcgtgcatcacgaggatctgcccatcggtaacgttgcctgcgccaataccgataaccgggatcgccagcgcttcggtaatacgttttgccagttcaaccggcacgcattccagcaccagcaactgtgcaccagcggcttctaaggctaatgcatcgctaagcagtcgatcgctcgcttcatcgccgcgcccctgaactttgtagccaccgaaaatattcactgactgtggggttaaacctaagtgaccacatacaggaacggcacgttcggtcagcatttttacggtttcgaccagccactcaccgccttcaattttgaccatgttagcaccggcacgcataaccgttgcggcgttttcaaaggcttgttccggcgtggcatacgccataaacggcaggtcagccaacagcaggcagtttggcgcgccacgacgtactgcggtagtgtggtaggcgatatcttcaacggtaacgggaagggtagattcatgcccctgaacggtcatccccagcgagtcgcccaccagcatcacgttcagcccttcctcggcaaacagttttgcgaagctgtagtcgtaggcggtgatggtggcgaagcgttttttttcctgcttacatttctgcaatgaagcaatggtggtcggtttcataacgtatcctgatggctaaagtcagattgatcgcattctaacagccgaaaacagggaggcaatggttattagtgtggggaaatgttcgcaccagagcagaactctggtgcgatgaggagggaatgacgttttacttattcgtaggtaaaggagaaggtcgcgttacctgaaaatgttccaacaccgacagcattaccgctaccatccggtaccagctgcgccgtaaaaggtaaaaacagcaggttgtttgaccaggcggcgaagttgtagtcaaccgtgttgctaccatctgcttttaacaatactttgctattgtcataagttgaatttacttttacagccacgcctgaagccgagccagtcgttttacccaccagtgtggcatcgctgggtttatttgccgctttcaacttaaccgtaattttactggcataacagtattcagcacggatagaaaaagggatttcccgcgtaagcccatttttcacttccgaaacatagctgttcccaagcgttacctgattgccactgacgttgccctgatcttgtgccagggcaactgttgcacaggtcggttcatcgacgaaaaactttaaagagtcattgtcaatgtaaaagttgatccacggctggtcattggtacctatataccatgacgcaatctttcctgctatcgttgttccgctggaaacaccattcttgggtttaaattcaggagttatgaataagcgaaaacgtaaataccaactttgatcactgtactcataggcccatttcgtctgggtgcttggtatgaagttatctgcgccactttgtgcaggtagccataaatcaagttcatctgcggcaccacaactaaggcataataactcgacagaatacacaatgcctggaacagttgtttttaataacgctgcgccattcgttgtggtgtacgtggatattaaacttgggtcagctgtattaagaaagtgaactgccttactatccccaagagatttacaccctatggcatcgcctcttagttgaatatttacatcccatgtagcttcggctatttctgtcggaacctcgaccatttgtgacgccagactaagctgagtagagcttatcttcatgtgataatccccttcagcatttctctctatataacattcattcgccaatgcataccaggatgtggtaaaaaatagcagtatcgcactgcataactgaatcaacagtttattgcctttcctttgcataattatccttattattcgtaagatacgttaacaataacctggcttctcaccattcccgattcaggaggaagggcattattcacccgctgcatacgggaataaaaggtccaggttgagggaacagcattgccaggtgctaccgaataaattgctgttgaggaaccatccgttcctcgcacgttaaatgtctgctgattcggttgggccgaaaaaatcacaatgccgacgtttttcgccccggtagcctgctgttcatattcattactaaaaatttgattattcacctgtgcaagcgatcccgcctgcggctgaaaatctaatttcatttgcgactgtgtcgtttgaatgttatcgcaagagaccacattcacattaaacgttttgccacccgcataatccgttgtcggggttacattgtcggcaaaatagtccagcgtcactgtgccgagatcgacaacgccattattactgacttcaacctgacaggtgctgggcacgatctttgcggtgagatccacatcctggccggaataggcaaaaggcgtgataagggctgttgccagccctaaaaagtgtacgattttatgatgcctgcatagcattctaatatccttatccgctattactgataagtgatcgtgaaagtcgtgggagagcggaaattacccggtcttacatcggttaccaatctaccttccgcaacggtcatccgtgcacttaacgggtaatcgtaaggctgagttgtggtgtcggcgggaagcgtcacaggcactggtatcttttgagcacaatggaattgcgtactgccattgctttccggtgtatctgtagtccatacttccacagccgttctggttgctgcgctagcgtcagtaaacttgttagaaaaacccgccgatgacgattgagaaccagcacaggatataccattaggtgccagcactatttgggcgctgttttggggaaggccagagcaattgctaaagcgaattttaaactgttgcactttgctttttgcaccgagttcagaaatataaacattgccaaagaccacttcattgatcactttattactattatccattatctgagcactgcaggtacccatagtcaggttactgtttacggttaaagaagcggacgttgtactcgcagaagcaaaattgctgttaaagcttacacccacggcaacagtagcaatcagtgtagcgatgacttttaatttcatggtggctgtccctgttattcgtaggtgaagttaaaggtggcttttgcctgaaacgcaccggtgngtcctgctcccgccgttgtttcgcgcagtgctacggtcagaggcacaccgctggctttctcatcggcgctccattcaaatttgtcagtattattgggtgtgaagaaagtcgagtctgcggtatctctacgcttaatccccatccccaccccagcagcgccagaggttgcttcattaacaattaacttaccggaaaccgttgttcctgtaagtgtggtaaaaatctttgagtaaccattgctgcaatcggaggcctttaatttaaagttggcctgagcttcgggcgcagcggtagcgactttatccagaccaacatcaggaattgtcaggctgtattcatcgttactaccggtcactgctggaccaccatcttccactatagttatcgtgcaggtggtggctaatacggtggccgtaaaatcgacattaagatctgttgcagagccaaccgccggtaaacccaggcctattaacgcggatgttagtagtatccttttcatagaattttccatattagtgatttgctacctgacaggtaagattgttaagtaataaggtgttggtgcttcccagcgtttgtggctgcgccgggaactggtagtgcaacttacagtcaatggtttggttgttttcataccagcgcacgattaattccccgctgtcgttaataccgcgtacaaatgcctgaccaccctggcccatgctgccgatcatcacctcaccctggtaaacctccgcagcaaacggaatggatttgccattggcggcagtaatattcagcacggcagaacgcccctcgtcagtttcgaaacgggtcaaaacaacggagccgctacgtggtacggtggtggcgctggtacttttcagttcaacatcgttttccagtgtttcaatgttcagacctacccggttttcacgatatgggctgacagaggacgtcacggcatatccccagcgatcgatttcgttattactgttattgattcgtgcgcctttagcacctggggcgttgattaacaccagcgtgtcgttactgctgaaactgttgttagtgaacgttaaaccaccactgtgtaatacaaagccgccatcggttgagatggagtactgctggctgttatcagaagtggccgaggccgaagcggaaataccgcctaacccagattcatagttgagataaccaccaacagaggctaaatcgccggngtttttatcgaggctataacctgcgttgacactgtagttcaccagattgttttcagtgttaccggaactgttaacattcaactgatgtgaaccatcgaaatcggtattgagctgagtatttaaattgcggaaaccagaagacttacgtttgccacctaaaatattctcaataggtacgctaacgctgacgtacatcgcgtcatctttctcgccgtcttcattccagctacgttgtaggttgacgctgaaactgccccacgaaacgcttttactgtaaccaacattatattcagtgcggctattgttcgccgcccagtaatacgtccagctaccggaaataaacagcgaaccgtaatcttcataggcgatattcaatggctggttaatgctgacggtaaactggtttttcatacgtgagtacgtctgcatggtgtttttgtcttcatcggcagacaaatgcttggcgtcgtcaatgaggactaacgcatcatgcaggcccaggtaatcctgggtggaatagcggtacgccgcgaggttaaatgatgtcccggtatcctggaaaagtttgttccaggtcacgcgataactttgcccctggtaggttttatcatccggaatttcagcacgggaatgggtaacgtctaccgcaaaggcgccgatgctggtgttgatacccacacctaacagcccggcaagatagttattatcggtgaactgaatgccggtataacccgtgaagaggttattcagaccatagtaataagaggcttgccccatattgggttcggatcgcagactgtcatcaatgactttacccgcgctgaaatcccaacggcccacaccaggacgttgcatttgtacaaccgacgagaagggttgcgtaaaggtgcgtttggaaccatccgcttcttcaatggtcacgaccagttcgctaccaaagccggaagggctaatgtcgtctataacaaattcaccgggcggaacggtggtttcataaattttatatccgctttgcgtcacggtgactttggcgttggagtttgctacaccgcggatggtcggagcgtaactggccagcgcngaaggcagcatacggctgtcgctgtacaggcgaacaccacggacgttgacagagtcaaacgtttcaccggtggtataggcatcacccataattatctgggaacggattgccggaatgtcacgctgtaagtaacgatcctggaaatcgaaatcgctgccgttatctgttgtccagttatagttaccgcgcgcacgaaagtgccaggctcctaaattgatacctgagttgaacgcgccatagacgctgtcactattgtcgttatctgaacttgtgtgatacgcgttcagggtatatgccagtgtggcagcgttaattcccgattcccataaagaagggtcaacgtagccgccatagcttttcagaacataggcctgagggatcgtcagatcgagaaactggtcactaccgtcaaagcgcacatccgccttttcgtatgactttgccagatccagacaatcctcttcttcaccttctctggcgagtaaagtgacaggctgttcaggttgcttaatgtgaagttgcgccaggtttttatgggtaagacaggccgccgcactgttttcgccaatatccacaaacggaatttctaagctggaagtcgcctgaccgtttacaaatacgcggacattatagagacccggcggtgtcgggttgccttgagcataacgtttaacatcaatcgttgatgcgccagttcccattaaaaaggaactgtcatattccacggtgtccgccgcagcaccgttgctgctataaaacagggcacaacaggccgcaagtagcgtttttttcgggatacggcttttttgatgagtaaactggtacaaggttgcattcctggcgatgttaaaaagaatccgtttattttttagaatgttgcggaaccatcaatgttgccgccaaagtcgttgatcgctttaaagaccacttttccggatgacacgcttcctggcagaccggttacgccaaagcttgcctggctgaacggcgtgaccatgctggaattgacgttgtaggttttgccgccgctttccagcttgacctcattaaaggacacgtaatatggcgttgggttatttgcctgtaactgagcgttgtttaatttccaggtgattttcgccggtgcttcagccggttctccctgtaacccactcaggcgataaaagagtttgatgcgtgtgcggaaagccagctgtaacaagtttttgtcagcctcagcatctttcggcttaggcggcacttccagcacgttaaaccagtagacgctttcacggtctttcggcagggctgttgcaccggtatacatcacttttacggtttgaccgcgttttggctccacgcgtgaaactggtggggtcgcggtaaacggcactttgatctggctgggatcggcattgtcatcgcccgtatccaaccagttctgaatcagtaaggggcgattccctttattttccagacgaacgttaacatcttttttatcagcgttataaatgatacgtgttccggaaataataatgtcagcgaatgctggtgcactggctaacagagtactcacaaataatgcactaaccgtttttttaaccaagggaaacataagcactccttgctgtctgtagaaagattaaattcgcgaaaataaggtttgcctgctggcaaaccttatgctcaacacaccatcaattacttataagcaacggtgtacagcgcgttagtggttacatgaccagcagttacagccgggctgttcggtgctttaacgtaagatgcgttaaatacgtactggcctttaccttctgcgtctaatgtcagttcctgaacttcagaagagttgttcatatggacctgcttaatttcagcagcgccagctttgtttttcatgttatgaactgcaatgtttacgttctgagccggtgcaataccgttaacagtgatgttcatattgttattcagggtaccgctggtgttcgcgtaacttgcagaacccatagttaactcagcattcttcggagcacctggatcacactcaacagaaatcatgaactctttcggcagtaaaccgacagcagttgcgctaacttcagcaaaagtatcagtaacattcgcagtatccagggtaaccacgccatcagtggtaacgctatgcataccagtatctaccacacccactttacaggtaccggactgtaccataccgttaaagtcgatatgaccaccatctacagccagggcggaaccagaagccataaccagagcggctgcgagaagtgcttttttcattacatgcatccttacaaaaattatatgaaattaatattgcgagcggatattactcaaagtttttggaggatgtaataggggggaattatcacgggtgtgaatatatttacgtggtgtattgaattgttgctattctaggttttttaaacaaaaaatgcctaatctatttgcatgaagtgctatttcatgaattaattaaaaaaaactaaaatgtaaattaagtatatttaatctgtaagaggggaagtgaggagtaagataagaaaataaaataatacagctaataccagatggcaggttgtagtactgctagcgaagtgagtatttcacgtaatgtctccccatcaggaaacacgagttccggggcaatctcaaacagcggccacagcataaagccgcgattcttcatatcgtaatgcgggacggtgagtcgttcggtattaatggtttcattaccaaacaacatgatatcaagatcgagtgtgcgcggtccccagcgttctgctttacgaacgcgaccttgctgcaactctatttgctgtgtgtgattaagtaattcttcaggcgcaagtgttgtttccagcgccacggctgcgtttaagtaatcgggttgatcttgcggccccagcggtggggtgcggtaaaacgaagaaacggtaagaatgtggctttcagggatatcgcctaatgctttcagggcagcattgacctgctccagcggagaggccagattgctgcctatggcaatatacgccactgtcatgcggtaccctcacgacgtggtgcgcgtttgcgtggacgacgagtacgacgacgcggtgacggttcttcatccagctcgttgagcatccctttttggtctggtggcgcggaaacctggaactcaccccaccatttcaccagacgctgcagttcagcgttacgctcaacttcagctcgcaaggccaacaggtcataagccgcacggaacttaggatgctccagcaatttccatgcgcgtttaccctgacgtcgggacatacgcaactgcaactgccagatatcgcgggttaacgtcgtcagacgtttcgggattgccagtgaacggcaggcttcgtccagcacgtcgttcatcgccagcgcgaaagcgtcgtgataggtcaggccgctttcctgggcgatcttctgtgccgtctccagcagtgggtaccagaacatagcggcaaacaggaacgccgggttcacgcgcatatcgttatggatacgcgnatcggtattcttcagcacctgttcaatgatccgctccatcgggctgtcgccattttccgtgaagtagcgggtaatggtcgggaacagcggctggaacagatgatattcacacaacagcttataggtttcgtaaccgtagcccgcttgtagcagtttaagcgattcttcaaacaggcgtgccggtgggatatcgttcagcagggtagcgaggcgagggatcggttctgcggtttccgggctgatgcgcatacccaatttggcggcaaaacgtactgcgcgcagcatacgtaccggatcttcacggtagcgcgtttccgggttaccaatcagacggataacaccgtccttcagatccttcataccgccaacgtaatcacggacggtaaaatccgctacgctgtaatacaggctgttgatagtgaaatcgcggcgctgggcgtcttcttcgatggagccgaaaatgttgtcgcgcagcaacatgccgttttgcccgcgttgggaggtcgtgcggtcgctgacgttaccttcgtggtgtccacggaaggtcgcaacttcgataatctccgggccaaacatcacatgagccagacggaaacggcgacccaccaggcggcagttacggaacagtttgcgcacctgctcaggcgtggcgttagtggttacgtcaaaatctttcggctttttgccgagtaacaggtcgcgcacgccgccgccaaccagccaggnttcgtatcccgctttattgagcctgtacattaccttcagggcattttcactgatatctttgcgggaaatagcatgctgctcacgcgggatcaccgtcacctgtggacgggcgactgcctgttcagcctcgctttcctcncggcttagcaccttgcggcaaaaattagcgactcgggtaaaaatagtacacctcggtagtgtcaaacatcattcaggacaaaaaaatagcggctaatcatagctcagcatgacgcatttgagaatgttgaatttacaattgccgactcaggcactgcggtaagccgccagtttttgacggctgactgaaggatttgctcgacgctgaaatcctgccagtgtgcttctgcctgctgccccagaaattgaagtgccgcgattagtaccgggcgtggatcgcctttcggcaacgcaggcgcatgattctgcttggaaagtttagcgccttgtggattaagcgccagcggcagatgaatgtaatctggcactttccagccaaaaagctggtacagcgagatttgccgcactgtcggttcgatcaaatctgccccgcggacaatttcgctcacgccctggaagtgatcatccaccaccaccgccaggttataggcaaacaaaccatcacggcgatgaataataaaatcttcccgtgccagtttttcgtcggcgtgaataatgccgcgcagctggtcagtaaattgcgtgaccggatgctgctggcggatacgcactgcggcgttgtctggtccatgatgcaacacccggcaatgaccgtcgtaaataccgccaatgctttgaatacgcgcacgcgtgcaggtgcagtaataacttagtccttgttcatgtaaccaggcgagtgcttcacgataggcgtggtgacgttgcgattgccagagaacatcgccgtcccagtgcagaccgtaatgttccagctggcgcaggatagtttctgcggcaccgggaacttcacgaggcgggtcgatatcttcaatgcgtaccagccagcgaccgtgccgggcgcgagcctgcaaatagctgccaagcgcagcaatcagagaaccaaaatgaagctcgccggaaggagagggggcgaagcggccaatatactgtgtgtctgtcatctctttgaacaaaaaataaggcgggagcatttcccgcctgtggtaaacgtgatggaacggctgtaattagccagccatctgtttttcgcgaatttcagccagcgttttgcagtcgatgcacagatcggctgtcgggcgcgcttccagacggcgaataccaatttcaacaccgcaggattcacagtagccgaaatcttcgtcttccacttttttcagcgtcttctcgatctttttgatcagcttacgctcgcgatcgcggttacgcagttcgaggctgaactcttcttcctgggctgcacggtctaccgggtccgggaagttggctgcttcatcctgcatatgtgtaacggtgcgatcgacttcatccctgagttgattacgccatgcttccagaatacgacggaagtgcgccagctgggcttcattcatatactcttcgcccggcttctcctgatatggttccaccccagcgatggcgagaatactcagggacgatgttttacggttttgcccttcttgcatgttgcttctccttaacacgcactatcgatccccatgttcgggggaaaaatgaggccgctataaatagcagatgcttttccggatagcaattatctaaacgtaacacttgacaactgtgtgaggaaaagcgtatttgcgcacgcgaccagaatgtaaattaaccagttacttactttactacaatgtaaccggcagtgattttttaagagccatgccttcagcagaaatttccnctttgtaagccagaatttctacccccctctgttgagcttctgacaatagttgcgcgtatttctcatcgatgtggcgcgcgggtgaaaaccgtgtaatggctgaatgcagcacggcgaaaaagataaccgcacgctggccttcagccgctacgctcatcaactcccgaaggtgtttctgacctcgttcagtgaccgcatcgggaaaatatccctgttcgttctccgctaacgtaaccgatttcacttcaatatagcagtctggacgcgaatccgcctgcaacataaagtcaatacggctgcgttctgcgccgtattttacttcgcttttcagcgagctatagcctgacagttctgaaattgattcattaaggatagcctctttcgtcaacctgttagcccaaagcgtgttgacgcaaataaatgcgccgctctggctttgagttaattcccaggtgtgtgggtatttccgtttggtgttgtctgaagtcgaataccagacggtatcgccaggcgttgcacaaccggtcatcgcacccgtattcgggcagtgtagcgttaattcgcgaccatcgggtgtgatcacatcggctaaaaaacgtttgtaacgctgaattagcgtcgcgcgctgtagagggggagaaaattccattgcgacaatccttgttattgcgttagcgcccagcgttttagcggcgtgtagcgtgtgcgtccacgggcaaacgaggaggcgtaaagggtgaactccgtcaccgcatatgaccagttaaaacctggcggcgggattgtcaccgcctcgctggcgtcgcgcaataaggtaatatgtggatgaaacggacgattgctttgaaaacaaccgctgcgggcagcctgtgaacggagcatattcgccagctggattaagccgcgtggcggctgacgcatccctaaccacaccacacgcgaacgcagccattggccggcgtcatcaagcgtgagtgtgaaaccaggttgacgaatccgtccggctaaaagagaaagcgccttctctttctctgcgctcacttcgcctaaaaatgccagagtcagatgcaaattatcggcggcgaccggacgtcccgcctcaagtgggaagtgtgtggcgcgccagtggataatctgttcgcggatttctgcaggtaagtcgatagcaaagaacagacgttgcgggtcagacatgtgaggcactcggttatgaattaccgcgatgctacaatgtggcgcgaagaatgttaaccctctggagcgttttgtgtcgtcgttgcccgttgctgccgtgttacctgaattacttaccgctctcgattatgcgccgcaggtattattaagtgcgccgaccggggccgggaaatcaacctggctgccgctgcaactgctggcgcatcccggcattaacgggaaaattatcctcctggagccacggcgtctggcggcgcgtaacgtcgcgcaacggctggcggagctgcttaacgaaaagccaggcgataccgttggctaccggatgcgtgcgcaaaactgcgtcgggccgaatacccgcctggaagtagttaccgaaggcgtgctgacgcggatgatccagcgtgacccggaactgagcggtgttggattggtgatccttgatgaatttcatgagcgtagcttgcaggcggatttggcgttggcgctgttactcgatgtgcaacaaggtctgcgtgatgaccttaaactgctgattatgtcggctacgctggacaacgaccgcttgcagcaaatgctgccagaagcgcccgtcgtcatctcagaagggcgctcgtttccggttgaacgccgttatttaccgctgcccacgcatcagcgttttgacgatgccgttgcggtagccaccgctgaaatgctgcgtcaggaaagcggatcattactgttatttttacctggcgtcggagaaattcagcgtgtgcaggaacaactggcttcgcgcatcggcagtgatgtattgctctgcccgctgtatggcgcgttgtcgctgaacgatcagcgaaaagcgatcctcccggcaccgcaagggatgcgcaaagtggtgctggcgaccaatattgctgaaaccagtttaaccattgaaggtattcgtctggtggtggattgtgcccaggaaagggtggcgcgttttgatccgcgaacagggcttacgcggttgattactcagcgaatcagtcaggcgtcgatgacgcagcgtgccgggcncgccgggcgtctggagccgggtatctgcctgcatttaatcgccaaagaacaagcagaacgcgctaccgcgcaaagtgaaccggagatcttacaaagcgatctttccggtttgctgatggaattactgcaatggggatgcagcgatccggcgcagatgagctggctggatcaaccgccaacggtgaatctactggccgcgaaacgtctgttacaaatgctgggggcgctggacggtgaacggcttagtgcgcaagggcaaaaaatggcagcgctgggtaacgatccgcgtttagcggcaatgctggttagcgcaaagagcgacgacgaagctgctaccgcggcaaaaattgccgccattctcgaagagccgccacggatgggcaatagtgacctgggcgtggcgttttcgcgcaatcaaccagcctggcagcaacgtagtcagcaactgttaaaacgcttaaacgtacgcggcggtgaggcagacagttcgcttatcgcgccgctacttgccggggcgtttgccgatcgcattgctcgccgccgtgggcaagatggacgctatcaactggcaaacggcatgggggcgatgcttgatgccgacgacgcgctaagtcgccacgaatggttgatcgcgccgttattattgcagggcagcgcctcgccggatgcgcggattttactggcgttaccggtcgatattgatgaattagtacaacgctgtccgcagctggtgcagcaatctgacaccgtggaatgggatgacgcgcaaggtacgctgaaagcctggcgtcggctgcaaatcggtcagttgacggtgaaagtgcagccgttggcgaaaccgtcagaagacgagttgcatcaggcgatgcttaacggcatccgtgataaaggtttaagcgtgctcaactggacggcggaagcggaacagctacgcttgcgtttgttatgcgccggaaagtggttgccagaatatgactggccagcggttgatgatgaaagtttgttggcgacgctggaaacgtggctgctgccacatatggccggtgtacattcactacgcggcctgaaatcactcgacatttatcaggcactacgcggattacttgattggggaatgcagcaacgtctggatagtgaattgcctgcgcattacactgtgccgacgggaagccggatcgccattcgttatcatgaagataacccgcccgcgctggcggtgagaatgcaggagatgtttggtgaggccactaatccgacgatcgcccaggggcgcgtgccgctggtgctggaattgctttcacccgcccaaaggccgctgcaaatcacgcgtgatttgggggccttctggaaaggggcgtatcgtgaggtgcaaaaggagatgaaagggcgttatcccaaacacgtctggccggacgacccggcaaacacggcaccgacgcgacggacgaaaaagtattcgtaaggttggttttctccctctccctgtgggagagggccggggtgagggcaccagcgcgcacgtacaccctcaccctaaccctctcccttaagggagaggggaccgatcgagctcaaattttgagagatatcttcttctgtcttgtaacagaagaacagaaaatcgggcttttgcgcctgaatattgcggagaaaaagcatggccgggaatgaccgcgagccaattggacgcaaagggaaaccgacgcgtccggtcaaacaaaaggtaagccgtcgtcgttacgaagatgacgatgattacgacgattatgatgactatgaggatgaagaaccgatgccgcgcaaaggtaagggcaaaggcaaagggcgtaagcctcgtggcaaacgcggctggctatggctgctgttaaaactggctatcgtttttgccgtgctgatcgccatttacggcgtttatctcgatcaaaaaattcgtagccgtattgatggcaaggtctggcaactgcctgcggcagtttatggtcgaatggtcaaccttgagccagacatgaccatcagcaagaacgagatggtgaagctgctggaggcaacacagtatcgtcaggtgtcgaaaatgacccgtcctggcgaatttaccgtgcaggccaacagcattgagatgattcgccgtccgtttgatttcccggacagtaaagaagggcaggtgcgcgcgcgtctgacctttgatggcgatcatctggcgaccatcgtcaatatggagaacaaccgtcagttcggtttcttccgtcttgatccgcgtctgatcaccatgatctcctcaccaaacggtgagcagcgtttgtttgtgccgcgcagtggtttcccggatttgctggtggatactttgctggcgacagaagaccgccatttctacgagcatgatggaatcagtctctactccatcggacgtgcggtgctggcaaacctgaccgcaggtcgcacggtgcagggggcgagtacgctgacgcaacagctggtgaaaaacctgttcctctccagcgagcgctcttattggcgtaaagcgaatgaagcctacatggcgctgatcatggacgcgcgttacagcaaagaccgtattcttgagctgtatatgaacgaggtgtatctcggtcagagcggcgacaacgaaatccgcggcttcccgctggcgagcttgtattactttggtcgcccggtagaagaattgagcctcgatcagcaggcgctgttagtcggtatggtgaaaggagcgtccatctacaacccgtggcgtaacccgaaactggcgctggagcgacgtaatctggtactgcgtctgctgcaacagcaacagattattgatcaagaactctatgacatgttgagtgcgcgtccgctgggggttcagccgcgcggtggggtgatctctcctcagccagcctttatgcaactggtgcgtcaggagcttcaggctaaattaggcgataaggtaaaagatctctccggcgtgaagatcttcactacctttgactcggtggcccaggacgcggcagaaaaagccgccgtggaaggtattccggcactgaagaaacagcgtaagttgagcgatcttgaaactgcgattgtggtcgtcgaccgctttagtggtgaagttcgtgcgatggtcggaggttctgagccgcagtttgcgggctacaaccgtgcgatgcaggcgcgtcgttcgattggttcccttgcaaaaccagcgacttatctgacggccttaagccagccgaaaatctatcgtctgaatacgtggattgcggatgcgccaattgcgctgcgtcagccgaatggccaggtctggtcaccgcagaatgatgaccgtcgttatagcgaaagcggcagagtgatgctggtggatgcgttgacccgttcgatgaacgtgccgacggtaaatctggggatggcgctggggctgcctgcggttacggatacctggattaaactgggcgtaccgaaagatcagttgcatccggttccggcaatgctgctgggggcgttgaacttaacgccaatcgaagtggcgcaggcattccagaccatcgccagcggtggtaaccgtgcaccgctttctgcgctgcgttcggtaatcgcggaagatggcaaagtgctgtatcagagcttcccgcaggcggaacgcgctgttccggcgcaggcggcgtatctgacactatggaccatgcagcaggtggtacaacgcggtacgggtcgtcagcttggggcgaaatacccgaacctgcatctggcagggaaaacagggactaccaacaataacgtagatacctggtttgcgggcattgatggcagcacggtgaccatcacctgggtcggccgtgataacaaccagccgaccaaactgtatggagccagcggggcaatgtcgatttatcagcgttatctggctaaccagacgccaacgccgctgaatcttgttccgccagaagatattgcagatatgggcgtggactacgacggcaactttgtttgcagcggtggcatgcgtgtcttgccggtctggaccagcgatccgcaatcgctgtgccagcagagtgagatgcagcagcagccgtcaggcaatccgtttgatcagtcttctcagccgcagcaacagccgcaacagcaacctgctcagcaagagcagaaagacagcgacggtgtagccggttggattaaggatatgtttggtagtaattaacatctaagcgtgaaataccggatggcgagttgccatccggtaaaataacatcccacccaaagtattaaccctttcttttcatctggttgtttattaacccttcaggaacgctcagattgcgtaccgcttgcgaacccgccagcgtttcgaatattatcttatctttataataatcattctcgtttacgttatcattcactttacatcagagatataccaatggcgcgttccaaaactgctcagccaaaacactcactgcgtaaaatcgcagttgtagtagccacagcggttagcggcatgtctgtttatgcacaggcagcggttgaaccgaaagaagacactatcaccgttaccgctgcacctgcgccgcaagaaagcgcatgggggcctgctgcaactattgcggcgcgacagtcagctaccggcactaaaaccgatacgccgattcaaaaagtgccacagtctatttctgttgtgaccgccgaagagatggcgctgcatcagccgaagtcggtaaaagaagcgcttagctacacgccgggtgtctctgttggtacgcgtggcgcatccaacacctatgaccacctgatcattcgcggttttgcggcagaaggccaaagccagaataactatctgaatggcctgaagttgcagggcaacttctataacgatgcggtcattgatccgtatatgctggaacgcgctgaaattatgcgtggcccggtttccgtgctttacggtaaaagcagtcctggcggcctgttgaatatggtcagcaagcgtccgaccaccgaaccgctgaaagaagttcagtttaaagccggtactgacagcctgttccagactggttttgactttagcgatgcgctggatgatgacggcgtttactcttatcgcctaaccggtcttgcgcgttctgccaatgcccagcagaaagggtcagaagagcagcgttatgctattgcaccggcgttcacctggcgtccggatgataaaaccaatttcaccttcctttcttacttccagaacgagccggaaaccggttattacggctggttgccgaaagagggaaccgttgagccgctgccgaacggtaagcgtctgccgacagactttaacgaaggggcgaagaacaacacctattctcgtaatgagaagatggtgggctacagcttcgatcacgaatttaacgacacctttactgtgcgtcagaacctgcgctttgctgaaaacaaaacctcgcaaaacagcgtttatggttacggcgtctgctccgatccggcgaatgcttacagcaaacagtgtgcggcattagcgccagcggataaaggccattatctggcacgtaaatacgtcgttgatgatgagaagctgcaaaacttctccgttgatacccagttgcagagcaagtttgccactggcgatatcgaccacaccctgctgaccggtgtcgactttatgcgtatgcgtaatgatatcaacgcctggtttggttacgacgactccgtaccgctgctcgatctgtacaatccggtgaataccgatttcgacttcaatgccaaagatccggcaaactccggcccttaccgcattctgaataagcagaaacaaacgggcgtttatgttcaggatcaggcgcagtgggataaagtgctggtcaccctgggcggtcgttatgactgggcagatcaagaatctcttaaccgcgttgccgggacgaccgataaacgtgatgacaaacagtttacctggcgtggtggtgttaactacctgtttgataatggcgtaacaccttactttagctatagcgaatcgtttgaaccttcttcgcaagttgggaaggatggtaatattttcgcaccgtctaaaggtaagcagtatgaagtcggcgtgaaatatgtaccggaagatcgtccgattgtagttactggtgccgtgtataatctcactaaaaccaacaacctgatggcggaccctgagggttccttcttctcggttgaaggtggcgagatccgcgcacgtggcgtagaaatcgaagcgaaagcggcgctgtcggcgagtgttaacgtagtcggttcttatacttacaccgatgcggaatacaccaccgatactacctataaaggcaatacgcctgcacaggtgccaaaacacatggcttcgctgtgggctgactataccttctttgacggtccgctttcaggtctgacgctgggcaccggtggtcgttatactggctccagctatggtgatccggctaactcctttaaagtgggaagttatacggtcgtggatgcgttagtgcgttatgatctggcgcgagtcggcatggcgggctccaacgtggcgctgcatgttaacaacctgttcgatcgtgaatacgtcgccagctgctttaacacttatggctgcttctggggcgcagaacgtcaggtcgttgcaaccgcaaccttccgtttctaatttctcttttggggcacggatttccgtgcccgtttcacaagttggctgttatgcaggaatacacgaatcattccgataccacttttgcactgcgtaatatctcctttcgtgtgcccgggcgcacgcttttgcatccgctgtcgttaacctttcctgccgggaaagtgaccggtctgattggtcacaacggttctggtaaatccactctgctcaaaatgcttggccgtcatcagccgccgtcggaaggggagattcttcttgatgcccagccgctggaaagctggagcagcaaagcgttcgcccgcaaagtggcttatttgccgcagcagcttcctccggcagaagggatgaccgtgcgtgaactggtggcgattggtcgttacccgtggcatggcgcactagggcgctttggtgcggcagatcgcgaaaaagttgaggaagctatctcgctggttggcttaaaaccgctggcgcatcggctggtagacagcctctctggcggcgaacgtcagcgggcgtggatcgccatgctggtggcgcaggatagccgttgtctgttgctcgacgaaccgacttcggcgttggatatcgcccaccaggttgatgtgctggcgctggtgcaccgtttaagtcaggagcgtggcctgacggtcattgccgtgctgcacgatatcaatatggctgcgcgttactgtgattatctggtcgccctgcgcggcggtgaaatgattgctcagggaacgcctgcggaaattatgcgcggcgaaaccctcgaaatgatttatggcatcccgatgggtattctgccgcatccggcgggtgctgcacctgtgagttttgtttattgatgagcggcttacctcttatttcgcgccgtcgactgttaacggcgatggcgctttctccgttgttatggcagatgaataccgcccacgcggcggctattgacccaaatcgtattgtggcgctggagtggctgccggtggaattactactggcgctcggcatcgtgccttatggcgtggcagacaccatcaactatcgactgtgggtcagcgaaccaccactacctgaatcggtgattgacgtcggtttgcgtacagaacctaacctcgaactgctgaccgaaatgaaaccgtcgtttatggtctggtcggcgggatatggtccttcgccagaaatgctggctcgtattgcgccggggcgtggatttaacttcagcgacggcaaacagccgctggcgatggcgcgtaaatcgctgacggaaatggcggatttacttaacctgcaaagcgcagcagaaacgcatttagcgcaatatgaagactttatccgcagcatgaacccccgctttgtgaagcgtggtgcgcgtccgttattgctgacgacgcttatcgatccgcgccatatgctggtcttcggtccaaacagcttgttccaggaaattcttgatgagtacggcatcccaaatgcctggcaaggggaaaccaacttctggggcagtaccgccgtcagcatcgatcgtctggcagcgtataaagacgttgatgtgctctgttttgatcacgacaacagcaaagacatggatgcgctaatggcaacgccgctgtggcaggccatgccgtttgtccgcgccnnacnctttcagcgcgtacccgcagtctggttttatggtgcaactctctcggcaatgcactttgtgcgcgttctggataacgccattggaggtaaagcgtgagtaaacgtattgcgcttttcccggcattattgctggcgttgctggtgattgccgctacggcgctgacctggatgaacttctcgcaggcgctgccgcgtagccagtgggcgcaggctgcctggtcgccggatattgacgtcatcgagcagatgatttttcactacagcttgctgccgcgtctggnaatttcgctgctggtgggcgcaggcctggggctggtgggcgtgctgtttcagcaagtgctgcgtaatccgctggcggaaccgacgacacttggcgttgctacaggcgcgcaactggggattaccgtcactacgctctgggcgatcccaggggcgatggcgagtcagtttgctgcgctggcgggcgcttgcgttgttggcttaatcgtctttggcgtcgcgtgggggaaacggctttcgccggtaacgctgatcctcgcggggctggtagtgagcctttattgtggggcaatcaatcagttactggttatcttccaccatgaccaactgcaaagcatgttcctgtggagcaccggaacgctgacgcaaaccgactggggcggtgttgagcgtttatggccgcagttgctgggcggtgtgatgctgacgttgctgctacttcgtccgttaacactgatggggcttgatgatggcgtggcgcgcaatctcgggctagccttgtcgctggcgcgtctggcggcgctgtcgctggctattgtcatcagtgcgctgctggtgaacgcggtggggattatcggctttatcgggttgttcgcgccgttgctggcaaaaatgctgggggcgcggcgtctgctgccgcgactgatgctggcgtcgttgattggtgcgctgatcctctggctttccgatcaaatcatcctctggctgactcgcgtgtggatggaagtgtccaccggttcggtcactgcgttgatcggtgcgccgctgctactgtggctgttgccgcgtttacgcagcattagcgcgccggatatgaaggtcaacgatcgtgtcgcggctgaacgccaacatgtgctggcgtttgccctcgcgggcggcgtgctgctgttgatggctgtggtggtggcgctgtcgtttggtcgtgatgcgcacggctggacgtgggcgagcggggcgttgctcgaggatttgatgccctggcgctggccgcgaattatggcggcgctgtttgcgggcgtcatgctggcggtggcgggctgtattattcagcggctgaccggaaacccgatggcaagcccggaagtgctggggattagctctggcgcggcgtttggcgtggtactgatgctgtttctggtaccgggtaatgcttttggctggctgttacccgcgggaagtatcggtgcggcggtgacgctgttgattattatgatcgccgccgggcgcggtggattttccccacaccgcatgttactggcggggatggcgttaagtaccgcattcaccatgcttttaatgatgttgcaggcgagtggtgacccgcgaatggcgcaagtgctgacctggatctctggttcgacctacaacgccaccgatgcgcaggtctggcgcaccggaattgtgatggtgattttgctggcgattaccccgctgtgccgccgctggctgaccattttaccgctgggtggtgataccgcgcgggccgtgggggtggcgttaacgccgacgcgaattgcgctgctgctgttagcggcttgcctgacggcgaccgcgacgatgaccattggaccgttgagttttgttggtttaatggcaccgcatatcgcgcggatgatgggctttcgacggacgatgccgcacatcgtgatttcggcgctggtgggtggtttactgctggtgttcgctgactggtgtgggcggatggtgctgtttccgttccagatcccggnggggctgctgtcgacctttatcggcnnnncnnattttatctatttgttgagaaagcagagccgttaataaaatgcctcgcccggtgggcgaggcaaaatcatcacaacttcgcaaacacccgacgtgcagcatcgatggtgttattgatatcttccatgctgtgcgccacagacataaagcccgcttcaaacgctgacggtgccaggtaaacaccttcatccagcatcatatggaagaaacgcttaaaacgctcgacgtcacaggccatcacatcctgatagcacgtcacggactcggcgtcggtaaagaaaataccgaacatgccgccaacgtggtttaccaccagcggaattccggcttcttctgccgcttccagcagaccttctgccagacgtgttgtcagctcatccagcgtttcgtgaacgcccggctgcgcgacttcattcagacaggcgaaaccggctgccatcgcaatcgggttaccggaaagcgtacccgcctgatagaccggacccgtcggggccagcgcatccattacatcacgacgaccaccgaatgcgcctaccggcattccaccgccgatgattttgcccaggcaagtgagatccggttccacaccgtaataatcctgtgcgccagctagcgctacgcggaaaccggtcatcacttcatcgatgatcagcaacgcgccaaattcgtcgcacagcgmgcgcagacctggcaggaagtctggcagcggtggaacacagttcatattgcctgccaccggctcgacgataatacaggcaatctcttgcgggtattgctcaaacgcggcgcgtacagaagccagatcgttataagtacaggttaaggtatgtttggcgaaatctgccggaacgcccggcgagtttggctggcctaacgtgagtgcgccagagccggctttcaccagcaggcagtcagcgtgaccgtggtaacaaccttcaaatttaataattttgtcgcgaccggtaaaaccacgggccaggcggatggcgctcattgtcgcttcagtgccggagttcaccatgcgcaccatatccatggtcgggaccagttcggtcaccagttgcgccattttcacttccatttcggttggtgcaccaaagcttaaaccacgctcggcggcttcaatcacggcattgcggatcgccggatggttatggcccagcaccatcggcccccaggaaccgacataatcgatataggctttgccatcaacatcgtacagataagcgccgtccgctttttcgataaacagtggagtgccgcccacgccagtaaaggcgcgaacaggggagttcacaccgccagggatcagctcgcgcgctgcgctgtaaagattttcagacttactcatggagggttcctgattcgtagaaaaagtgaatggctgctattctatgttattcataacaagttaaatactcgtcaaacatcaggctgcttgtactggtgcaatcctgatttcttagagtataaaagttttgtgcatttgaaacattacgctttgcaaaggattttcatggaacgtgcgagtaaaatgccgtcatcttatttgtatgaccaataagtgatcattggatgaaaactgatactccctctttagaaacaccgcaggccgcgcgcctgcgacgcagacaactgattcgccaacttcttgagcgcgataaaaccccgttagccattttgtttatggcggcagtcgtcggcacgcttgtcgggctggcagcggttgcttttgacaaaggtgtcgcctggttgcagaaccaacgtatgggggcgctggtacatactgctgataattatccgctactgttaaccgttgcttttctctgttcggcggtgctggcgatgttcggctactttttggtgcgcaaatacgcgcccgaagcaggggggtcggggatcccggaaattgaaggggcgctggaagatcaacgtcctgttcgctggtggcgtgtattgccggtgaaattctttggcgggctggggacactcggcggaggcatggtgttggggcgcgaagggccaaccgtgcagatcggcggtaatatcgggcggatggtactcgatgttttccgcctgaaaggtgatgaagctcgccatacgctgttggcaaccggtgcggcggcgggtct

SEQ ID NO: 47 - DNA, 15344 bp, Escherichia coli
  Strain O55:H7
  modified_base (91)..(91): a, c, g or t
  modified_base (483)..(483): a, c, g or t
  modified_base (10276)..(10279): a, c, g or t
  modified_base (11833)..(11833): a, c, g or t
acgcgccgctggcgggtattttgtttattatcgaagagatgcgtccgcagtttcgctatacgttaatttcgattaaagcggtatttattgncgtcattatgtcgaccattatgtaccggatttttaatcatgaagttgcgttgattgacgtcggtaaactttctgacgcgccgcttaatacgctgtggctttatctgatcctcggtattatttttggcattttcggccctatttttaataaatgggtgctggggatgcaggatttgctgcaccgtgtgcacggcggcaatattaccaaatgggtactgatgggtggtgcgattggcggtctgtgtggattgctggggtttgtggcaccagcaacgtcgggcggcggttttaacctgattcctatcgctaccgcggggaatttcagcatgggaatgctggtgtttatcttcgtcgcgcgggtcattaccaccttactctgcttctcttccggcncgccgggcggtatttttgccccgatgctggcgctgggtactgtgctgggaaccgctttcggaatggttgccgttgagctgtttccgcaatatcaccttgaggcggggacgtttgctattgccggaatgggggcgttactggcggcatctattcgcgcgccgttaacggggatcattctggttctggagatgaccgataactaccagctcattttgccaatgattattaccggtcttggcgcaacactattagcgcaatttaccggcgggaaaccgctatactcggcgattcttgcgcgcacgctggcaaaacaggaagctgagcaactggcgcgaagcaaggccgcatcagccagcgagaatacttgaacgaaataccagggtattagataatggcgattattattgggttagaatttgcccaattgccgatgtcgtttggagcaaaatatgagtgatgacgtagcactgccgctggagtttaccgacgcagcagccaacaaagttaaaagcctgatcgctgacgaagataacccgaatctgaaattacgcgtgtatatcaccggtggcggttgcagcggcttccagtatggtttcacctttgatgatcaggtgaacgaaggcgatatgaccatcgaaaaacagggcgttggcctggtggttgatccgatgagcctgcaatatctggtcggcggttccgttgactataccgaaggactggaaggttctcgtttcatcgtgaccaacccgaacgcgaaaagcacctgcggttgcggttcttcctttagtatctaatctgttgttcatgtgccggataaactatccggcacatcttctctcttcaacgcccattctcatccagcgcaaacgtcggtagcttaagatgccaacgaatagccgccagccgaatcaatagcgtcacgaccatgcccatcatactggctgtttccagtggtacggaaaatgtgtaataagccgtagcgtggacaataccgccgataatacaggcagttgcgtagatttctgtacgtaaaatcatggggatttcgcgggccagaacatcacgaatgatcccgccgccaacgccagtaatgacgcccatacaaaccgcgattaacggaccggcttccgcattaaaggctttattcacgccaatgccgacaaacaccgccagaccaacggcgtccagcaccggcaacatccattttggtaagcgtcttggctggcgcaccagcacgatggtcagcatgctggttaccattgcaacgaccagatcggtgggatctttcacccaaaataccgggccgtgatccagcgccatgtcgcgaattgtcccgccgcctacagcggtaaccacgcccagtaccagaacaccaaaagggtccatacgcaattttccggctaacaaaacgccggagatggcaaataccgctgtgccgactatatccagccaatagacgagcattgttcaatccccactgagcacctaaaaaggtcaggcgctaatctacctgtgaaagcgcattacagagctgttgtgcagcgaggataatacgtgggcttgcacgttcaaaccagtcactcgtgagaggaataacgggaattttgagctgttcaccccagtattgtttgattttaggaatttggtccggtccgcctgtaatgacaatcgcctgtggcgagcgtgctaacacctgttcgcggctaacttgcggccagggaacccggctgtctttaaagatgttttctccgccacaaacttcgagtacctggttttgaatcgactcttttccactggtaaatggcggattaatgccgaattgcagaaaaacacgttttttaggtttatcagcatattgcgctttcaattgcgcgtattgatccagcagggattgcgcggcttgttcggccttatccggttgcggactccagggagccagttgacgtaacgcattggcaatttgttcaatgcttgtcgcatcgacccacatcacttttattcccagcgaagccagctggtcaacctgccgctcggcattacctccacgccaggcaatcaccagatcgggtttcagcgcgacaatgcgttccagattcatcccctgccaggtggaaacctgctcaatcttttgcgcttgtggaggatagtcggaatagctgctgaccccaaccggcgtgatcccggcggcaaaggcaagttcagtgttggcgggagaaagcgtgatgacgcgcggcgcggcgttgagccacagtggcgcaagaaaagacagggcgaccagcgccctgaacagtgacttagccatgtgccagtttctgcactagtgactcaaccatcaggctggactgtttagcggcaacagccaggaactcatcgaagctaagatgagactgttgatcggccacgtcggagatggcgcgtacgacaacaaacgggacgttgaaattgtggcagacatgggcgattgccgtcgcttccatctctacagcaatggcctgtgggaagttgtggcggattttcgccagaccaacagaaccgttgatgaaagcgtcgccgctaacaatcaggccacgtacagcgttaagattcagttcggcaatgcaggcctcagcggcagcgatcagtttatcgtcagctttaaagcctgccggacagcctggtaactgaccgtattcataaccaaatgccgtgacatccgcgtcgtgataacgcgcttcgtccgagacaacgatatcgcccactttcagcgttggtgccaggccaccggcagaaccggtgttaataatcacatctggcttgcagtgttccaacagcagagtggcacccagcgccgcagcgactttaccgatgcccgatttcagaagcgcaacctcggttccattcagttggccggtatagatttcgcaaccgcccagactgatagtttgacggttttcgattttgtcacgcagcagcgtaacttcttcttccattgcaccaatgatgccgattttcatagatttactcgcgataagcccgatttgaaggcatagtttaccatgcgcttacggggaagcgtatttctcacgcgggagaggacatggcacagattgatttccgaaaaaaaataaactggcatcgtcgttaccgttcaccgcagggcgttaaaaccgaacatgagatcctgcggatcttcgagagcgatcgcgggcgtatcatcaactctccggcaattcgtcgtctgcaacaaaagacccaggtttttccactggagcgcaatgccgccgtgcgcacgcgtcttacccactcgatggaagtccagcaggtggggcgctacatcgccaaagaaattttaagccgtctgaaagagcttaaattgctggaagcatacggcctggatgaactgaccggaccttttgaaagcattgttgagatgtcatgcctgatgcacgatatcggcaatccgccgtttggtcattttggcgaagcggcgataaatgactggtttcgccagcgtttgcacccggaagatgccgaaagccagcctctgactgacgatcgctgcagcgtggcggtactacgtttacgggacggggaagaaccgcttaacgagctgcggcgcaagattcgtcaggacttatgtcattttgaggggaatgcacaaggcattcgtctggtgcatacattgatgcggatgaatctcacctgggcgcaggttggcggtattttaaaatatacccgtccagcgtggtggcgtggcgaaacgcctgagacacatcactatttaatgaaaaagccgggttattatctttctgaagaagcctatattgcccggttgcgtaaagaacttaatttggcgctttacagtcgttttccattaacgtggattatggaagctgccgacgacatctcctattgtgtggcagatcttgaagatgcggtagagaaaagaatatttaccgttgagcagctttatcatcatttgcacgaggcgtggggccagcatgagaaaggttcgctcttttcgctggtggttgaaaatgcctgggaaaaatcacgctcaaatagtttaagccgcagtacggaagatcagttttttatgtatttacgggtaaacaccctaaataaactggtaccctacgcggcacaacgatttattgataatctgcctgcgattttcgccggaacgtttaatcatgcattattggaagatgccagcgaatgcagcgatcttcttaagctatataaaaatgtcgctgtaaaacatgtgtttagccatccagatgtcgagcagcttgaattgcagggctatcgggtcattagcggattattagagatttatcgccctttattaagcctgtcattatcagactttactgaactggtagaaaaagaacgggtgaaacgttcccctattgaatctcgcttattccacaaactctcgacgcgccatcggctggcctatgtcgaggctgtcagtaaattaccgtcagattctcctgagtttccgctatgggaatattattaccgttgccgcctgctgcaggattatatcagcggtatgaccgacctctatgcctgggatgaataccgacgtctgatggccgtagaacaataaccaggcttttgtaaagacgaacaataaatttttaccttttgcagaaactttagttcggaacttcgcgctataaaacgaatctgaagaacacagcaattttgcgttatctgttaatcgagactgaaatacatgaaaaaaaccacattagcactgagtgcactggctctgagtttaggtttggcgttatctccgctctctgcaacggcggctgagacttcttcagcaacgacagcccagcagatgccaagccttgcaccgatgctcgaaaaggtgatgccttcagtggtcagcattaacgtagaaggtagcacaaccgttaatacgccgcgtatgccgcgtaatttccagcagttcttcggtgatgattctccgttctgccaggaaggttctccgttccagagctctccgttctgccagggtggccagggcggtaatggtggcggccagcaacagaaattcatggcgctgggttccggcgtcatcattgatgccgataaaggctatgtcgtcaccaacaaccacgttgttgataacgcgacggtcattaaagttcaactgagcgatggccgtaagttcgacgcgaagatggttggcaaagatccgcgctctgatatcgcgctgatccaaatccagaatccgaaaaacctgaccgcaattaagatggcggattctgatgcactgcgcgtgggtgattacaccgtagcgattggtaacccgtttggtctgggcgagacggtaacttccgggattgtctctgcgctggggcgtagcggcctgaatgccgaaaactacgaaaacttcatccagaccgatgcagcgatcaaccgtggtaactccggtggtgcgctggttaacctgaacggcgaactgatcggtatcaacaccgcgatcctagcaccggacggcggtaacatcggtatcggttttgctatcccgagtaacatggtgaaaaacctgacctcgcagatggtggaatacggccaggtgaaacgcggtgagctgggtattatggggactgagctgaactccgaactggcgaaagcgatgaaagttgacgcccagcgcggtgctttcgtaagccaggttctgcctaattcctccgctgcaaaagcgggcattaaagcgggtgatgtgatcacctcactgaacggtaagccgatcagcagctttgccgcactgcgtgctcaagtgggtactatgccggtgggcagcaaactgaccctgggcttgctgcgcgacggtaagcaggtcaacgtgaatctggaactgcagcagagcagccagaatcaggttgattccagctccatcttcaacggcattgaaggcgctgagatgagcaacaaaggcaaagatcagggcgtggtagtgaacaacgtgaaaacgggcactccggctgcgcagatcggcctgaagaaaggtgatgtgattattggcgcgaaccagcaggctgtgaaaaacatcgctgaactgcgtaaagttctcgacagcaaaccgtctgtgctggcactgaacattcagcgcggcgacagcaccatctacctgttaatgcagtaatctccctcaaccccttcctgaaaacgggaagggggtctccttacaatctgtgaacttcaccacaactccatacatcttcatcatcctttaggcatttgcacaatgccgtacgttacgtacttccttatgctaagccgtgcataacggaggacttatggctggctggcatcttgataccaaaatggcgcaggatatcgtggcacgtaccatgcgtatcatcgataccaatatcaacgtaatggatgcccgtgggcgaattatcggcagcggcgatcgtgagcgtattggtgaattgcacgaaggtgcattgctggtactttcacagggacgagtcgtcgatatcgatgacgcggtggcacgtcatctgcacggtgtgcggcaagggattaatctaccgttacggctggaaggtgaaattgtcggcgtaattggcctgacaggtgaaccagagaatctgcgtaaatatggcgaactggtctgcatgacggctgaaatgatgctggaacagtcgcggttgatgcacttgttggcgcaggatagccgtttgcgggaggaactggtgatgaacctgattcaggcagaggagaatactcccgcacttactgaatgggcgcaacggctggggatcgatctcaatcaaccgcgagtggtggctattgttgaggtcgacagcggtcagcttggtgtggacagcgcaatggcggagttacaacaactgcaaaacgcgctgactacgcccgagcgtaataatctggtggcgattgtctcgctaaccgaaatggtggtgttgaaaccggcgttgaactcttttgggcgctgggatgtagaagatcatcgtaagcgagttgaacaactgattacccgcatgaaagagtacggccagctgcgttttcgcgtttcactgggcaactattttaccggtcctggcagtattgcccgatcctatcgtacggcgaaaacgacgatggtggtgggtaaacagcggatgccagaaagtcgctgctatttttatcaggatctgatgttacctgtgttactcgacagtttgcgtggcgactggcaggccaacgaactggcgcgaccgctggcgcggctgaaagcgatggacaataacggcttgctgcgacgaacgctggcggcgtggtttcgtcacaatgtgcaaccgctggcaacgtcaaaggcgttgtttattcatcgtaataccctggagtatcggcttaatcgtatatcggaactgaccgggcttgatttgggcaattttgatgacaggttgctgctgtatgtggcgttacaactggatgaagagcggtaggttatgcgttaaggttgaggcggcgctggctcattcccctcagcccgaaggggagaggggaatgcccgagttaaccgtcaattcgggattatttacgcgttagtttttccagatcggcttcaatctcgctgatcttattggttacgactgactccaggtgacgtaagtcgtcgaggatcttacgcttaagatcaacttcgctgcggtcacgctggcagatttgatcaagctcatcaatgatataccgtagattcgggctgatttcctggacttctttataaccctgacccacaccatcagcgacgaccgttttacgctgacgcggatatttaaacttaacgctcttggcgaaaaactcgcctttgtctttctggaaatagattttcagaatatcgttgttggcttcctgccggaggctgtaacgatcaatttcttcaggattggtaatacccagacttttcagattgtcgtacatagcgttacctcaaaatgagtcagtaaaatgtgcttattttagcatttggcctggcccgcccggctcgactgtgatcgcagaaagcctttttcttccagacttctatcatggcgtaaaaatcaaaaaattacctgctttattgtggcgatattccatgggatggattagcacatttatcttcgttttgcgaattacatgacagtccgaaacaagatgaaaaagtatttaaaaaaggggggaggaagaatgagtaggacgaattattctgaaccagaaagcaatcgggcagcgtcgtgctgcccgtgtgcatacttttagtcgatggtacgcagcagttcgttaatgccgactttgccgcgagttttcgcgtcaactttcttaacgataaccgcacagtagaggctgtatttgccatctttcgacggcagattacctgaaacaaccacagaccccgccggaacgcgaccgtagtggatttcgccggtttcacggtcgtaaatacgggtgctctgaccaatgtatacgcccatggaaatgacggaaccttcttcgacaatcaccccttcaactacttcagagcgcgcgccgatgaagcaattatcttcaatgatggttgggttagcctgcagcggttccagcacaccgccgatgcccacgccaccggaaaggtggacgtttttaccaatctgcgcacaagaaccgacggtcgcccaggtatcgaccatggtgccttcatcaacatatgcgccgatgttgacgtaagacggcatcagcacggtgttacgggcaataaacgcaccctgacgtaccgccgcaggtggtacaacgcggaagccttctttctggaaacgtgcttcgtcgtagtcggcgaatttcatcggcactttgtcgaagtagcggctttctgccccttcgatcacctgattatcattaatacggaaagagagcagcaccgcttttttcaaccactgatgcgtcacccactgaccgtcaattttttccgctacacgcagtgcgccggaatccagcagggcgatcacctgatttaccgcttcgcgggtaacggtgtctgcattggctggcgtgatctcggcacggcgttcaaaagcggtttcaataatgttctgtaactgctgcattgttaaactcttttcatatcagtaaacacatcaccctttatcgtttggattgagggcctctgtcaaccgctgatgcacttcctgctgcaactcgttattaagtgcacgccggtcagcggtggcaattatgaataaatcttctactcgctcgccaatggttgtaattcgggcaccatgaagcgaaattcccagatcggcaaaaattttcccgactctcgccagcagtcctggctggtcgagcgcgataagctcaaggaacgatttgcggtcggtatgggttggcaaaaacgtcacttcggtttcaacagtaaagtgacgtagtttagccggttgacgacgcggctgtggtggctgccagctactttgtgtcagtacttgctccagaccaaaccgaataacctcatgacgatctgcggatagcgggctaccatcgggttccagcacgataaaggtatccatcgccataccgtcgcgagtggtgaaaatttgtgcgtcgtgaacgcttaagttgcgtctatctaactcggcacaaacagcagcaaacaagtaagggcggtccgggctccagataaaaatctcggtgcctccacgcgtagcctgcgggctaagcaataccagcggtttgcttaaatcatgctgtaataaatggcgcgcatgccaggccagttgatttgggctatgacggacaaaatagttcgcgcgacagcgtgaccaaattnnnngcagcacctcttcgtcgatgttatccatgcgcagtagtgccagcgcctggagttggtgatggcgaacccgttcgcgcatatccggcgtgttttgcattccgcgtcgtagctgcttttcggtggcgaaatagagttcgcgcaacagactttgcttccagctattccacagcgtttcgttggtggcgcaaatgtcagccactgtcaggcataccagatagcgcagacgattttccgtttgaacttcttcggcaaactgcttgatgacttccgggtcctgaatatcgcgacgctgagctgtcaccgacatcagcaagtgctggcgaaccagccaggcgaccagctgtgtttcgcgtgagttcagcccgtggagttcggcaaaatgcactacatcctgagcaccgagaatagagtggtcgccgccgcgtcctttggcgatatcgtgaaacagcgcggcgatgaaaatcagctcagttgacggtaggcgcggccagacgttcacacacaacggatggcgctggcgcgtttcttcactggcaaaactctccagtttcagcatcacgcggatagtatgttcatccaccgtgtaggcgtggaacagatcaaactgcatctgcccgacgatatgtgaccattgcggcatatacgcgccgagtacgctatggcgatgcattggcaatagcccgcgccgcaccgctccggggtgacgtagaatgctcaaaaacagttttcgtgcttgcggaatattacacagcggttgttgcagatggcgacgggcatggcgtaactggcgcagtgtggtggagtaaatgccggtgatcgcactgttgcgcaccatggtgtagaacatacgcaagatggcttccggctggcgcataaatagtgtttcatcacgcaggtcgattagcgtaccgcgtagctgaaactcatcgtcgattggacgtggtttttcgtcggcgggaagggcgaggatggcttcatcgaacagttgcagcagcatctggttgagttcactgacgcggcgtgtcacgcggaagtaatccttcatcatccgctcgaccggttcgttaccttcgccactgtaattcagacgctgggcgacgctaagctggcgatcgaataacaggcgattatcgtaacggctgacgaccagatgcagggcaaagcgaatacgccacaatatatgcagacattcgtttaattccgcccgctccgctgaggttaagaagccaaacccaaccatttcatccagcgatgttgcgccaaaatgacggcgggccacccattgcagagtgtggatatcgcgcaagccgccagggctacttttgatgtctggttcaagattgtagctggtgccgtggtaacgctgatggcgctggttctgttcttcaactttcgccgcgtagaacttgtcggaaggccagaatccttcgctgaaaatatgtttttgcagttcaagaaatagcgcaacatcgccaattaataagcgggattcgatcaaattggtggcgacggttaaatccgataacccttccagcatgcactcttcaagcgtgngcacactatgaccgacttccagctttacatcccagagcagcgttaacagctcgcccactttttgcgcctgatcgtccgggagctttttacggcttaaaatcagtaaatcgatgtcagaaagtggatgcagctcgccacgaccgtagccaccgacggcgaccaatgccaggtcggcaatctggctgaatcccgcttcaatccataatcgttgcaggagctggtcgataaactcggtgcgcgcctcaatcaactgttctgcagagatcccattgtcaaaggcatcacccagccaacgctggaaagtatcgatatgggcttttatcccaccgacggttaattcatcacggggccagacgcatggattttgcggttgaccgggcagggtggggagagcggtgtttgcgtactgttctggaagggtattcattgtgcgccacccataagattaaattatcgcattaaaaaagccggcattcgccggcttcattttattcgtcgtgcgagattatcgccgggatggtgtcatccttgcgtagcgtcagaatttcgcagccgttatcagtcaccacaatagtatgctcatattgtgcagacaagctgcgatctttggtttttaccgtccagccatctttcatggtgcggatctcttttttacccgcgttgaccattggctcgatggtgaacgtcatcccaggtttcagtacgacgttggtttcacgggagtcatagtgcagcacctgcggttcttcatggaagccgcgaccaataccgtgtccgcaatattcacgaacgacggagaagccttctgcttcgacaaatttctgaatcgccgcaccgatttcgcgcagattaatgcctggttttaccatgcgtagcgccaggtacaggctttcttgcgtgatacggcacagacgttcgcccatgatggtcggcttaccgacgataaacattttcgaggtatcgccgtggaaaccatctttgattacggtgacatcaatgttaacgatatcgccatctttcagcagcttagcatcgtccggaataccgtggcacaccacttcattaatagaaatgcaaacggatttcggataaccgtgatagccgaggcaggctgaaaccgcgtgttgttcattaacaatgtaatcattacagatgcgatccagctcgccggtgctgacgcccggtttaacatatggttcgatcatctccagcacttcggcagccagtcggccagcgacgcgcattttttcgatatcttctggggtcttgattgagatagccattaattctgtccatcagcgtcggtgataccgacaatatatatgtaagtgccgtcaatggtatcacacccgggcaaattgagaatcattctgaatttcgccaaacgtgccactgaaggttttctataatagaaaattcgacgtctgatgctgtacacagcgccaacaattattggtgtccacggcgtatttgtggtataaagcgcgccggacttccgatccatttcgtatacacagactggacggaagcgacaatctcactttgtgtaacaacacacacgtatcggcacatattccggggtgccctttggggtcggtaatatgggatacgtggaggcataaccccaacttttatatagaggttttaatcatggcaactgtttccatgcgcgacatgctcaaggctggtgttcacttcggtcaccagacccgttactggaacccgaaaatgaagccgttcatcttcggtgcgcgtaacaaagttcacatcatcaaccttgagaaaactgtaccgatgttcaacgaagctctggctgaactgaacaagattgcttctcgcaaaggtaaaatccttttcgttggtactaaacgcgctgcaagcgaagcggtgaaagacgctgctctgagctgcgaccagttcttcgtgaaccatcgctggctgggcggtatgctgactaactggaaaaccgttcgtcagtccatcaaacgtctgaaagacctggaaactcagtctcaggacggtactttcgacaagctgaccaagaaagaagcgctgatgcgcactcgtgagctggagaaactggaaaacagcctgggcggtatcaaagacatgggcggtctgccggacgctctgtttgtaatcgatgctgaccacgaacacattgctatcaaagaagcaaacaacctgggtattccggtatttgctatcgttgataccaactctgatccggacggtgttgacttcgttatcccgggtaacgacgacgcaatccgtgctgtgaccctgtacctgggcgctgttgctgcaaccgtacgtgaaggccgttctcaggatctggcttcccaggcggaagaaagcttcgtagaagctgagtaataaggcttgataactcccccaaaatagttcgagttgcagaaaggcggcaagctcgagaattcccgggagcttacatctgtaagtgaccgggatgagcgagcgaagatgacgcatctgcggcgcgaaatatgaagggggagagcccttatagaccaggtagtacacgtttggttagggggcctgcatatggccccctttttcacttttatatctgtgcggtttaatgccgggcagatcacatctccgaggattttagaatggctgaaattaccgcatccctggtaaaagagctgcgtgagcgtactggcgcaggcatgatggattgcaaaaaagcactgactgaagctaacggcgacatcgagctggcaatcgaaaacatgcgtaagtccggtgctattaaagcagcgaaaaaagcaggcaacgttgctgctgacggcgtgatcaaaaccaaaatcgacggcaactacggcatcattctggaagttaactgccagactgacttcgttgcaaaagacgctggtttccaggcgttcgcagacaaagttctggacgcagctgttgctggcaaaatcactgacgttgaagttctgaaagcacagttcgaagaagaacgtgttgcgctggtagcgaaaattggtgaaaacatcaacattcgccgcgttgctgcgctggaaggcgacgttctgggttcttatcagcatggtgcgcgtatcggcgttctggttgctgctaaaggcgctgacgaagagctggttaaacacatcgctatgcacgttgctgcaagcaagccagaattcatcaaaccggaagacgtatccgctgaagtggtagaaaaagaataccaggtacagctggatatcgcgatgcagtctggtaagccgaaagaaatcgcagagaaaatggttgaaggccgcatgaagaaattcaccggcgaagtttctctgaccggtcagccgttcgttatggaaccaagcaaaactgttggtcagctgctgaaagagcataacgctgaagtgactggcttcatccgcttcgaagtgggtgaaggcatcgagaaagttgagactgactttgcagcagaagttgctgcgatgtccaagcagtcttaattatcaaaaaggagccgcctgagggc

SEQ ID NO: 48 - DNA, 10573 bp, Escherichia coli
  Strain O55:H7
  modified_base (2951)..(2951): a, c, g or t
  modified_base (2956)..(2956): a, c, g or t
  modified_base (9289)..(9292): a, c, g or t
ttgtgcccatcttgtaaattcagctaacccttgtggggctgcgctgaaaagcgacgtacaatgtcgctagtattaattcatttcaatcgttgacagtctcaggaaagaaacatggctaccaatgcaaaacccgtctataaacgcattctgcttaagttgagtggcgaagctctgcagggcactgaaggcttcggtattgatgcaagcatactggatcgtatggctcaggaaatcaaagaactggttgaactgggtattcaggttggtgtggtgattggtgggggtaacctgttccgtggcgctggtctggcgaaagcgggtatgaaccgcgttgtgggcgaccacatggggatgctggcgaccgtaatgaacggcctggcaatgcgtgatgcactgcaccgcgcctatgtgaacgctcgtctgatgtccgctattccattgaatggcgtgtgcgacagctacagctgggcagaagctatcagcctgttgcgcaacaaccgtgtggtgatcctctccgccggtacaggtaacccgttctttaccaccgactcagcagcttgcctgcgtggtatcgaaattgaagccgatgtggtgctgaaagcaaccaaagttgacggcgtgtttaccgctgatccggcgaaagatccaaccgcaaccatgtacgagcaactgacttacagcgaagtgctggaaaaagagctgaaagtcatggacctggcggccttcacgctggctcgtgaccataaattaccgattcgtgttttcaacatgaacaaaccgggtgcgctgcgccgtgtggtaatgggtgaaaaagaagggactttaatcacggaataattcccgtgatggataaataagggtaagattccgcgtaagtatcgcgggggatcttacccgtaatatgtttaatcagggctatacttagcacacttccactgtgtgtgactgtctggtctgactgagacaagttttcaaggattcgtaacgtgattagcgatatcagaaaagatgctgaagtacgcatggacaaatgcgtagaagcgttcaaaacccaaatcagcaaaatacgcacgggtcgtgcttctcccagcctgctggatggcattgtcgtggaatattacggcacgccgacgccgctgcgtcagctggcaagcgtaacggtagaagattcccgtactctgaaaatcaacgtgtttgatcgttcaatgtctccggccgttgaaaaagcgattatggcgtccgatcttggcctgaacccgaactctgcgggtagcgacatccgtgttccgctgccgccgctgacggaagaacgtcgtaaagatctgaccaaaatcgttcgtggtgaagcagaacaagcgcgtgttgcagtacgtaacgtgcgtcgtgacgcgaacgacaaagtgaaagcactgttgaaagataaagagatcagcgaagacgacgatcgccgttctcaggacgatgtacagaaactgactgatgctgcaatcaagaaaattgaagcggcgctggcagacaaagaagcagaactgatgcagttctgatttcttgaacgacaaaaacgccgctcagtagatccttgcggatcggctggcggcgttttgctttttattctgtctcaactctggatgtttcatgaagcaactcaccattctgggctcgaccggctcgattggttgcagcacgctggacgtggtgcgccataatcccgaacacttccgcgtagttgcgctggtggcaggcaaaaatgtcactcgcatggtagaacagtgcctggaattctctccccgctatgccgtaatggacgatgaagcgagtgcgaaacttcttaaaacgatgctacagcaacagggtagccgcaccgaagtcttaagtgggcaacaagccgcttgcgatatggcagcgcttgaggatgttgatcaggtgatggcagccattgttggcgctgctgggctgttacctacgcttgctgcgatccgcgcgggtaaaaccattttgctggccaataaagaatcactggttacctgcggacgtctgtttatggacgccgtaaagcagagcaaagcgcaattgttaccggtcgatagcgaacataacgccatttttcagagtttaccgcaacctatccagcataatctgggatacgctgaccttgagcaaaatggcgtggtgtccattttacttaccgggtctggtggccctttccgtgagacgccattgcgcgatttggcaacaatgacgcccgatcaagcctgccgtcatccgaactggtcgatgggacgtaaaatttctgtcgattcggctaccatgatgaacaaaggtctggaatacattgaagcgcgttggctgtttaacgccagcgccagccagatggaagtgctgattcacccgcagtcagtgattcactcaatggtgcgctatcaggacggcagtgttctggcgcagctgggggaaccggatatgcgtacgccaattgcccacaccatggcatggccgaatcgcgtgaactctggcgtgaagccgctcgatttttgcaaactaagtgcgttgacatttgccgcaccggattatgatcgttatccatgcctgaaactggcgatggaggcgttcgaacaaggccaggcagcgacgacagcattgaatgccgcaaacgaaatcaccgttgctgcttttcttgcgcaacaaatccgctttacggatatcgctgcgttgaatttatccgtactggaaaaaatggatatgcgcgaaccacaatgtgtggacgatgtgttatctgttgatgcgagcgcgcgtgaagtcgccagaaaagaggtgatgcgtctcgcaagctgaggataatccggctacagagagtcgcgctatttgttagcgtagggcttcagtgatatagtctgcgccatctgatcgtaagtagttggctttataaggtcaggtatgccgtggttttacanggctnttttttgtataggcttcagtattcctgagtaccgtaaaccctgtcagggaataaaaaacgcgtgatgttgtctgctactcaaccacttagcgaaaaattgccagcgcatggctgccgtcatgttgcgatcattatggacggcaatggtcgctgggcaaaaaagcaagggaagattcgtgcctttgggcataaagccggagcaaaatccgtccgccgggctgtctcttttgcggccaacaacggtattgaggcgttaacgctgtatgcctttagtagtgaaaactggaaccgaccagcgcaggaagtcagtgcgttaatggaactgtttgtgtgggcgctcgatagcgaagtaaaaagtctgcaccgacataacgtgcgtctgcgtattattggcgataccagtcgctttaactcgcgtttgcaagaacgtattcgtaaatctgaagcgctaacagccgggaataccggtctgacgctgaatattgcggcgaactacggtggacgttgggatatagtccagggagtcaggcaactggctgaaaaggtgcagcaaggaaacctgcaaccagatcagatagatgaagagatgctaaaccagcatgtctgtatgcatgaactggcccctgtagatttagtaattaggactgggggggagcatcgcattagtaactttttgctttggcaaattgcctatgccgaactttactttacagatgttctctggcccgatttcgatgaacaagactttgaaggggcgttaaatgcctttgctaatcgagagcgtcgtttcggcggcaccgagcccggtgatgaaacagcctgatgggggtcgcttttgctgaagtatcgcctgatatctgcttttgtgttaatacccgtcgtcatcgcggcgttgtttctgttgccgccggtggggttcgccattgtaacgctggtggtctgcatgctggcagcgtgggaatggggacagcttagcggttttaccactcgttcgcagcgagtatggttggcggtgttatgcgggttattgttggcgctgatgctttttctgttgccggaatatcaccgaaatattcatcaaccgctggttgaaatctcactttgggcttcgctgggttggtggattgtcgcgctattgctggtgctgttttacccaggttccgcagcaatctggcgtaactctaaaacattgcgccttatttttggcgtgctaaccattgttcccttcttctggggcatgctggcgttacgggcctggcactatgacgagaatcattacagtggcgcaatatggctgctctatgtcatgatcctggtatggggcgctgactccggcgcatatatgtttggcaaattgtttggtaaacataagctggcaccgaaggtttctccgggtaaaacctggcaaggctttatcggtggactcgctactgcagcggtaatctcatggggttatggcatgtgggcgaatctcgacgtcgctcccgtcaccttactcatttgctctattgtcgcagcgttagcctcagtgctcggcgatctgaccgagagtatgtttaagcgtgaagcaggaattaaggacagcggtcatttaattccaggacacggtggtattttagatcgtattgatagcctgacggctgcggtaccggtctttgcttgcttgttgttactggtattcaggacgctttaacggaaggtaatatgctgagttttctctgggatttggcttcgttcatcgttgcactgggtgtacttatcaccgtgcatgaatttggtcatttctgggttgcccggcgttgtggtgttcgcgttgagcgtttctcaatagggtttggtaaggcgctctggcggcgaactgataagctcggcaccgaatatgttatcgccctgatcccgttgggcggttatgtcaaaatgctggatgagcgcgcagaaccggtcgttccggaactccgccaccatgccttcaataataaatctgtcggccaacgagcggcgattattgccgcaggtccggttgcaaacttcatttttgctatctttgcctactggctggtttttattattggtgtgcctggcgtacgtccggtggttggcgaaatagcagccaattcgatagctgcggaagcacaaattgcaccaggtacggaactaaaagccgtagatggtatcgaaacgcctgattgggatgccgtgcgtttgcagttggtcgataaaattggcgatgaaagcaccaccattacagtagcgccatttggcagcgaccaacggcgggatgtaaagctcgatttacgtcactgggcgtttgagcctgataaagaagatccggtatcttcgctggggattcgtcctcgtgggccgcaaattgaacctgtactggaaaatgtgcagccaaactcggcggcaagcaaggcaggtttgcaagcaggcgacaggatcgttaaagtcgatggtcagcccttaacgcagtgggtgacctttgtgatgcttgtccgggataacccgggtaaatccttagcgttagaaatcgaaaggcaggggagtcccttgtctttgacattaatcccggagagtaaaccgggtaatggtaaagcgattggttttgtcggtattgagccgaaagtcattcctttgccagatgagtataaagttgtacgccagtatgggccgttcaacgccatcgtcgaagccacggacaaaacgtggcagctgatgaagctgacggtcagtatgctgggaaaattgatcaccggtgatgtgaaactgaacaacctcagtgggccgatctctatcgccaagggggctgggatgacagcggaactcggggtagtttattacctgccgtttcttgcgcttattagcgtgaacttagggataattaacctgtttccgttgcccgtacttgacggggggcatctgctgttccttgcgatcgaaaagatcaaaggcggaccggtatccgagcgggttcaagacttttgttatcgcattggctcgattctgctggtgctgttaatggggcttgcacttttcaatgatttctctcggttatgagagttagttaggaagaacgcataataacgatggcgatgaaaaagttgctcatagcgtcgctgctgtttagcagcgccaccgtatacggtgctgaagggttcgtagtgaaagatattcatttcgaaggccttcagcgtgtcgccgttggtgcggccctcctcagtatgccggtgcgcacaggcgacacggttaatgatgaagatatcagtaataccattcgcgctctgtttgctaccggcaactttgaggatgttcgcgtccttcgtgatggtgatacccttctggttcaggtaaaagaacgtccgaccattgccagcattactttctccggtaacaaatcggtgaaagatgacatgctgaagcaaaacctcgaggcttctggtgtgcgtgtgggcgaatccctcgatcgcaccaccattgccgatatcgagaaaggtctggaagacttctactacagcgtcggtaaatatagcgccagcgttaaagctgtcgtgaccccgctgccgcgcaaccgtgttgacctaaaactggtgttccaggaaggtgtgtcagctgaaatccagcaaattaacattgttggtaaccatgctttcaccaccgacgaactgatctctcatttccaactgcgtgacgaagtgccgtggtggaacgtggtaggcgatcgtaaataccagaaacagaaactggcgggcgaccttgaaaccctgcgcagctactatctggaccgcggttatgcccgtttcaacatagactctacccaggtcagtctgacgccagataaaaaaggtatttacgtcacggtgaacatcaccgaaggcgatcagtacaagctttctggcgttgaagtgagcggcaaccttgccgggcactccgctgaaattgagcagctgactaagatcgagccgggcgagctgtataacggcaccaaagtgaccaaaatggaagatgacattaaaaagcttctcggtcgctatggttatgcctatccgcgcgtacagtcgatgcctgaaattaacgatgccgacaaaaccgttaaattacgcgtgaacgttgatgcgggtaaccgtttctacgtgcgtaagatccgttttgaaggtaacgatacctcgaaagatgccgtcctgcgtcgcgaaatgcgtcagatggaaggtgcatggctgggaagcgatctggtcgatcagggtaaggagcgtctgaatcgtctgggcttctttgaaactgtcgataccgatacccaacgtgttccgggtagcccggaccaggtagatgtagtctacaaggtgaaagaacgtaacactggtagcttcaacttcgggattggttacggtactgaaagtggcgtgagcttccaggctggcgtgcaacaggataactggttaggtacaggttatgctgttggtatcaacgggaccaaaaacgattaccagacctatgctgaactgtcggtaaccaacccgtacttcaccgtagatggcgtaagcctcggtggtcgtctcttctataatgacttccaggcagatgacgccgacctgtccgactataccaacaagagttatggtacagacgtgacgttgggcttcccgattaacgaatataactcgctgcgtgcaggtctgggttatgtacataactccctgtccaacatgcagcctcaggttgcgatgtggcgttatctgtactctatgggtgaacatccgagcacctctgatcaggataacagcttcaaaacggacgacttcacgttcaactatggttggacctataacaagcttgaccgtggttacttcccgacagatggttcacgtgtcaacctgaccggtaaagtgaccattcctggatcggataacgaatactacaaagtgacgttagacacggcgacttatgtgccgatcgatgacgatcacaaatgggttgttctggggcgtacccgctggggttatggtgatggtttaggcggcaaagagatgccgttctacgagaacttctatgccggtggttccagcaccgtgcgtggcttccagtccaatacaattggtccgaaagcagtttacttcccgcatcaggccagtaattatgatccggactatgattacgaatgtgcgactcaggacggcgcgaaagacctgtgtaaatcggatgatgctgtaggcggtaacgccatggcggttgccagcctcgagttcatcaccccgacgccgtttattagcgataagtatgctaactcggttcgtacttccttcttctgggatatgggtaccgtttgggatacaaactgggattccagccaatattctggatatccggactatagtgatccaagcaatatccgtatgtctgcgggtatcgcattacaatggatgtccccattggggccgttggtgttctcctacgcccagccgttcaaaaagtacgatggagacaaggcagaacagttccagtttaacatcggtaaaacctggtaagtgttctccacaaaggaatgtagtggtagtgtagcgatgactttaggcgatcaatataaatcgccgggccacgcaaagaactgcaccctccggtgcaaatgggatggtaaggagtttattgtgaaaaagtggttattagctgcaggtctcggtttagcactggcaacatctgctcaggcggctgacaaaattgcaatcgtcaacatgggcagcctgttccagcaggtagcgcagaaaaccggtgtttctaacacgctggaaaatgagttcaaaggccgtgccagcgaactgcagcgtatggaaaccgatctgcaggctaaaatgaaaaagctgcagtccatgaaagcgggcagcgatcgcactaagctggaaaaagacgtgatggctcagcgccagacttttgctcagaaagcgcaggcttttgagcaggatcgcgcacgtcgttccaatgaagaacgcggcaaactggttactcgtatccagactgctgtgaaatccgttgccaacagccaggatatcgatctggttgttgatgcaaacgccgttgcttacaacagcagcgatgtaaaagacatcactgccgacgtactgaaacaggttaaataagtaatgccttcaattcgactggctgatttagcgcagcagttggatgcagaactacacggtgatggcgatatcgtcatcaccggcgttgcgtccatgcaatctgcacaaacaggtcacattacgttcatggttaacccaaaataccgtgagcatttaggcttgtgccaggcgtccgcggttgtcatgacccaggacgatcttcctttcnnnnaaagtgccgcgctggtagtgaagaatccctacctgacttacgcgcgcatggcgcaaattttagataccacgccgcagcccgcgcagaacattgcacccagtgcggtgatcgacgcgacggcgaagctgggtaacaacgtatcgattggcgctaacgcggtgattgaatccggcgttgaactgggcgataacgtgattatcggtgccggttgcttcgtaggtaaaaacagcaaaatcggtgcaggttcgcgtctctgggcgaacgtaaccatttaccatgagatccagatcggtcagaattgcctgatccagtccggaacagtggtaggcgcagacggctttggttatgccaacgatcgtggtaactgggtgaagatcccacagattggtcgcgtaattattggcgatcgcgtggagatcggtgcctgcactaccatcgatcgcggcgcgctggatgacactgttattggcaatggcgtgatcattgataaccagtgccagattgcacataacgtcgtgattggcgacaatacggcggttgccggtggcgtcattatggcgggcagcctgaaaattggtcgttactgcatgatcggcggagccagcgtaatcaacgggcatatggaaatatgcgacaaagtgacggttacgggcatgggtatggtgatgcgtcccatcactgaaccaggcgtctattcctcaggcattccgctgcaacccaacaaagtctggcgcaaaaccgctgcactggtgatgaacattgatgacatgagcaagcgtctgaaatcgcttgagcgcaaggttaatcaacaagactaacgttccatcttttgttcgccaaactttacggcctgtctcattcttacgattgcggcaggccgtgttattattgtcgtttcttatattttgacaggaagagtatcttgactactaacactcatactctgcagattgaagagattttagaacttctgccgcaccgtttcccgttcttactggtggatcgcgtgctggattttgaagaaggtcgttttctgcgcgcagtaaaaaatgtctctgtcaatgagccattcttccagggccatttccctggaaaaccgattttcccgggtgtgctgattctggaagcaatggcacaggcaacaggtattctggcgtttaaaagcgtaggaaaactggaaccgggtgagctgtactacttcgctggtattgacgaagcgcgcttcaagcgcccggtcgtgcctggcgatcaaatgatcatggaagtcactttcgaaaaaac

SEQ ID NO: 49 - DNA, 10623 bp, Escherichia coli
  Strain O55:H7
  modified_base (2113)..(2113): a, c, g or t
  modified_base (4241)..(4241): a, c, g or t
  modified_base (5015)..(5015): a, c, g or t
  modified_base (6890)..(6890): a, c, g or t
  modified_base (6972)..(6972): a, c, g or t
  modified_base (7161)..(7161): a, c, g or t
  modified_base (8742)..(8745): a, c, g or t
gcctgacccgttttaaaggggttgctctggtcgacggtaaagtagtttgcgaagcaacgatgatgtgtgctcgtagccgggaggcctgatacgtgattgataaatccgcctttgtgcatccaaccgccattgtggaagagggcgcgtcgattggcgcgaacgcacacattggtcctttttgtatcgttggaccccatgtcgaaattggtgagggtaccgtactgaaatctcacgttgtcgtgaatggtcatactaaaattggccgcgataatgagatttatcagttcgcctccatcggcgaagttaaccaggatctgaaatatgctggcgaaccgacccgcgtggaaatcggcgatcgtaaccgcattcgcgaaagcgtcaccattcatcgtggcacagtccagggcggtggattgacgaaggtgggcagcgacaacttactgatgatcaacgcgcacattgcgcacgattgtacggtaggtaaccgctgtattctcgccaacaacgcaacgctggcgggtcacgtatcggttgacgacttcgcgatcatcggcggcatgaccgcagtccatcagttctgcatcattggtgcgcatgtgatggttggcggctgctccggtgtggcgcaggacgtccctccttatgtcattgcgcagggtaaccacgccacgccgttcggtgtcaatatcgaagggctgaagcgccgcggattcagccgtgaggcgattaccgctatccgcaatgcgtataagctgatttatcgtagcggtaaaacgctcgatgaagtgaaaccggaaattgctgaactggcggaaacatatccggaagtgaaagcctttaccgatttctttgcacgctcaacgcgcggtctgattcgttaatgactgaacagcgtccattaacgattgccctggtcgccggagaaacctccggcgatatcctgggggccggtttaatccgcgctctgaaagaacgtgtgcccaacgcccgctttgttggtgttgccgggccacgaatgcaggctgaaggctgcgaagcctggtacgaaatggaagagttggcggtgatgggcattgttgaagtgctcggtcgtctgcgtcgcttactgcatattcgtgccgatctgacaaagcgttttggtgaactaaagccagatgtttttgttggcattgatgcgcctgacttcaatattaccctcgaaggtaaccttaaaaagcagggtatcaaaaccattcattatgtcagtccgtccgtctgggcgtggcgacagaaacgcgttttcaaaataggcagagccaccgatctggtgctcgcatttctgcctttcgaaaaagcgttttatgacaaatacaacgtaccgtgccgctttatcggtcataccatggctgatgccatgccattagatccagataaaaatagtgcccgtgatgtgctggggatcccttacgatgcccactgtctggcattgttgccgggcagccgtggtgcagaagtcgaaatgcttagtgccgatttcctgaaaacggcccagcttttgcgccagacatatccggatctcgaaatcgtggtgccactggtgaatgccaaacgccgcgagcagtttgaacgcatcaaagctgcagtcgcgccagacctgtcggttcatttgctggatggaatgggccgtgaggcgatggtcgccagcgatgcggcactactggcgtcggggacggcagctctggagtgtatgctggcgaaatgcccgatggtggtgggatatcgcatgaagccttttaccttctggttggcgaagcggctggtgaaaactgattatgtctcgctgccaaatctgctggcgggcagagagttagtcaaagagttattgcaggaagagtgtgagccgcaaaaactggctgcggcgctgttaccgctgttggcgaatgggaaaaccagccacgcgatgcacgataccttccgtgaactgcatcagcagatccgctgcaatgccgatgagcaggcggcacaagccgttctggagttagcacaatgatcgaatttgtctatccgcacacgcagctggttgcgggtgtggatgaagtcggacgcgggccgttagttggcgcggtcgtcaccnctgcggtgattctcgacccggcgcgcccgattgccgggctgaatgattccaaaaagctgagcgaaaaacgtcgtctggcgctctgtgaagagatcaaagagaaagcgttgagctggagtctgggccgcgcggaacctcacgaaatcgacgaactgaatattttacatgcgaccatgctggcgatgcagcgagccgtcgctgggctgcatattgcgccggaatatgtgttgattgatggtaaccgctgcccgaaattaccgatgcctgcgatggctgtggtgaaaggcgatagccgcgtaccggaaatcagtgccgcgtctatcctggcgaaagtgacgcgtgacgccgaaatggcggcgctggatattgttttcccgcaatatggttttgcccaacacaaagggtatccaaccgcttttcatctggaaaaactggctgaacacggcgcgaccgaacaccatcggcgcagctttgggcctgtcaaacgcgcactgggacttgcgtcctgattcttgtgtcgagattaagtaaaccggaatctgaagatgtctgaaccacgtttcgtacacctgcgggtgcacagcgactactcgatgatcgatggcctggccaaaaccgcaccgctggtaaaaaaggcggcggcgttgggtatgccagcactggcgatcaccgatttcaccaacctttgcggtctggtgaagttctacggagcgggacatggcgcagggattaagcctatcgtcggggcagattttaacgtccagtgcgacctgctgggtgatgagttaacccacctgacggtactggcggcgaacaataccggctatcagaatctgacgttgctgatctcaaaagcgtatcagcgcgggtacggtgccgccgggccgatcatcgatcgcgactggcttatcgaattaaacgaagggttgatccttctttccggcgggcgcatgggcgacgtcggacgcagtcttttgcgtggtaacagcgcgctggtagatgagtgtgtcgcgttttatgaagaacacttcccggatcgctattttctcgagctgatccgcaccggcaggccggatgaagaaagctatctgcacgcggcggtggaactggcggaagcgcgcggtttgcccgtcgtggcgactaacgatgtgcgctttatcgacagcagcgactttgacgcacacgaaatccgcgtcgcgatccacgacggctttaccctcgacgatcctaaacgcccgcgtaactattcgccgcagcaatatatgcgtagcgaagaggagatgtgcgagctgtttgccgacatcccagaagcccttgccaacaccgttgagatcgccaaacgctgtaacgtaactgtgcgtcttggtgaatacttcctgccgcagttcccgaccgggaacatgagcaccgaagattatctggtcaagcgtgcaaaagagggcctggaagagcgtctggcctttttattccctgatgaggaagaacgtgttaagcgccgcccggaatatgacgaacgtctggagactgaacttcaggttatcaaccagatgggcttcccgggctacttcctcatcgttatggaatttatccagtggtcgaaagataacggcgtaccggtagggccaggccgtggctccggtgcgggttcactggtggcctacgcgctgaaaatcaccgacctcgatccgctggaatttgacctgctgttcgaacgtttccttaacccggaacgtgtctccatgcctgacttcgacgttgacttctgtatggagaaacgcgatcaggttatcgaacacgtagcggacatgtacggtcgtgatgcggtatcgcagattatcaccttcggtacgatggcggcgaaagcggtgatccgcgacgtaggccgcgtgctggggcatccgtacggctttgtcgatcgtatctcgaaactgatcccgcccgatccggggatgacgctggcgaaagcgtttgaagccgagccgcagctgccggaaatctacgaagcggatgaagaagttaaggcgttgatcgacatggcgcgcaaactggaaggggtcacccgtaacgccggtaagcacgccggtggggtggttatcgcgccgaccaaaattaccgattttgcgccgcnttattgcgatgaagagggcaaacatccggtcacccagtttgataaaagcgacgttgaatacgccggactggtgaagttcgacttccttggtttgcgtacgctcaccatcatcaactgggcgctggagatgatcaacaagcggcgggcgaagaatggcgagccgccgctggatatcgccgcgatcccgctggatgacaagaaaagcttcgacatgctgcaacgctcggaaaccacggcggtattccagcttgaatcgcgcggcatgaaggacctgatcaagcgtctgcaacctgactgcttcgaagatatgatcgcactggtggcactgttccgccctggtccgttgcaatcagggatggtggataactttatcgaccgtaaacatggtcgcgaagagatctcctatccggacgtgcagtggcagcatgaaagcctgaaaccggtactggagccaacctacggcattatcctgtatcaggaacaggtcatgcagattgcgcaggtgctttctggttataccctcggtggcgcggatatgctgcgtcgtgcgatgggtaagaaaaagccggaagagatggctaagcaacgttctgtattttctgaaggtgcagaaaagaacggaatcaacgccgaactggcgatgaaaatcttcgacctggtggagaaattcgctggttacggatttaacaaatcgcactctgcggcctatgctttggtgtcatatcaaacattatggttgaaagcgcactatccggcagagtttatggcggcggnaatgaccgccgatatggacaacaccgagaaggtggtgggcctggtggatgagtgctggcggatggggctgaaaatcctgccaccagatataaactccggtctttaccatttccacgtcaacgacgacggcgaaatcgtgtatggtattggcgcgatcaaaggggtaggtgaaggtccgattgaggcgatcatcgaagcccgtaataaaggcggctacttccgcgaactgtttgatctctgcgcccgaaccgacaccaaaaagttgaaccgtcgcgtgctggaaaaactgatcatgtccggggcgtttgaccgtcttgggccacatcgcgcggcgctgatgaactcgctgggcgatgcgttaaaagcggcagatcaacacgcgaaagcggaagctatcggtcaggccgatatgttcggcgtgctggccgaagagccggaacaaattgaacaatcctatgccagctgccaaccgtggccggagcaggtggtattagatggggaacgtgaaacgttaggcctgtacctgaccggacaccctatcaaccagtatttaaaagagattgagcgttatgtcggaggcgtaaggctgaaagacatgcacccgacagaacgtggtaaagtcatcacggctgcggggctcgttgttgccgcgcgggttatggtcaccaagcgcggcaatcgtatcggtatctgcacgctggatgaccgttccgggcggctggaagtgatgttgtttactgacgccctggataaataccagcatttgctggaaaaagaccgcatacttatcgtcagcggacaggtcagctttgatgacttcagcggtgggcttaaaatgaccgctcgcgaagtgatggatattgacgaagcccgggaaaaatatgctcgcgggcttgctatctcgctgacggacaggcaaattgatgaccagcttttaaaccgactccgtcagtctctggaaccccaccgctctgggacaattccagtacatctctactatcagagggcggatgcacgcgcgcggttgcgttttggcgcgacgtggcgtgtctctccgagcgatcgtttattaaacgatctccgtggcctcattggttcggagcaggtggaactggagtttgactaatacaggaatactatgagtctgaatttccttgattttgaacagccgattgcagagctggaagcgaaaatcgattctctgactgcggttagccgtcaggatgagaaactggatattaacatcgatgaagaagtgcatcgtctgcgtgaaaaaagcgtagaactgacgcgtaaaatcttcgccgatctcggtgcatggcagattgcgcaactggcacgccatccacagcgtccttataccctggattacgttcgcctggcatttgatgaatttgacgaactggctggcgaccgcgcgtatgcagacgataaagctatcgtcggtggtatcgcccgtctcgatggtcgtccggtgatgatcattggtcatcaaaaaggtcgtgaaaccaaagaaaaaattcgccgtaactttggtatgccagcgccagaaggttaccgcaaagcactgcgtctgatgcaaatggctgaacgctttaagatgcctatcatcacctttatcgacaccccgggggcttatccgggcgtgggcgcagaagaacgtggtcagtctgaagccattgcacgcaacctgcgtgaaatgtctcgcctcggcgtaccggtagtttgtacggttatcggtgaaggtggttctggcggtgcgctggcgattggcgtgggcgataaagtgaatatgctgcaatacagcacctattccgttatctcgccggaaggttgtgcgtccattctgtggaagagcgccgacaaagcgccgcnggcggctgaagcgatgggtatcatcgctccgcgtctgaaagagctgaaactgatcgactccatcatcccggaaccgctgggnggcgctcaccgtaacccggaagcgatggcggcatcgttgaaagcgcaactgctggcggatctggccgatctcgacgtgttaagcactgaagatttaaaaaatcgtcgttatcagcgcctgatgagctacggttacgcgtaattcgcaaaagttctgaaaaagggtcacttcggtggcccttttttatcnccacggtttgagcaggctatgattaaggaaggattttccaggaggaacacatgaacatcattgccattatgggaccgcatggcgtcttttataaagatgagcccatcaaagaactggagtcggcgctggtggcgcaaggctttcagattatctggccacaaaacagcgttgatttgctgaaatttatcgaacataaccctcgaatttgcggcgtgatttttgactgggatgaatacagtctcgatttatgtagcgatatcaatcagcttaatgaatatctcccgctttatgccttcatcaacacccactcgacgatggatgtcagcgtgcaggatatgcggatggcgctctgtttttttgaatatgcgctggggcaggcggaagatatcgccattcgtatgcgtcagtacaccgacgaatatcttgataacattaccccaccgttcacgaaagccttgtttacctacgtcaaagagcggaagtacaccttttgtacgccgggtcatatgggcggcaccgcatatcaaaaaagcccggttggctgtctgttttatgactttttcggcgggaatacccttaaggctgatgtctctatttcggtcaccgagcttggttcgttgctcgaccacaccgggccacacctggaagcggaagagtacatcgcgcggactttcggcgcggaacagagttatatcgttaccaacggaacatcgacgtcgaacaaaattgtgggtatgtacgccgcgccatccggcagtacgctgttgattgaccgcaattgtcataaatcgctggcgcatctgttgatgatgaacgatgtagtgccagtctggctgaaaccgacgcgtaatgcgttggggattctgggtgggatcccgcgccgtgaatttactcgcgacagcatcgaagagaaagtcgctgccaccacgcaggcacaatggccggttcatgcggtgattaccaactcaacctatgatggcttgctctacaacaccgactggatcaaacagacgctggatgtcccgtcgatccacttcgattccgcctgggtgccgtacacccattttcatccgatctaccaggggaaaagtggtatgagcggcgagcgtgttgcgggaaaagtgatcttcgaaacgcaatcgacccacaaaatgctggcggcgttatcgcaggcttcgctgatccacattaaaggtgagtatgacgaagaggcgtttaacgaagcctttatgatgcataccaccacctcgcccagttatcccattgttgcttcggttgagacggcagcagcgatgctgcgtggtaatccgggcaaacggctgattaaccgttcagtagaacgagctctgcattttcgcaaagaggtccagcggctgcgggaagagtctgacggttggtttttcgatatctggcaaccgccgcaggtggatgaagccgaatgctggcccgttgcgcctggcgaacaatggcacggctttaacgatgcggatgccgatcatatgttcctcgatccggttaaagtcactattctgacgccggggatggacgagcagggcaatatgagcgaggaggggatcccgnnnncgctggtggcgaagttcctcgatgagcgtgggatcgtggtagagaaaaccggcccatataacctgctgtttctctttagtattggcatcgataaaaccaaagcaatgggattattgcgtgggttgacggaatttaaacgctcttacgatctcaatctgcgaatcaaaaatatgcttccggatctgtacgcagaagatcccgatttctaccgcaatatgcgtattcaggatctggcgcaagggatccataagctgattcgtaaacacgatcttcccggtttgatgttgcgggcattcgatactttgccggagatgatcatgacgccacatcaggcatggcagagacagattaaaggtgaagtagaaaccattgcgctggaacaactggtcggtagagtatcggcaaatatgatcctgccttatccaccgggcgtaccgctgttgatgcctggagaaatgctgaccaaagagagccgcacagtactcgattttctactgatgctttgttccgtagggcaacattaccccggttttgaaacggatattcacggtgcgaaacaggacgaagacggcgtttaccgcgtacgagtcctaaaaatggcgggataacttgccagagcggcttccgggcgagtaacgtgctgttaacaaataaaggagacgttatgctgggtttaaaacaggttcaccatattgcgattattgcgacggattatgcggtgagcaaagctttctactgcgatattcttggtttcacgctgcaaagcgaagtctatcgcgaagcgcgcgactcgtggaaaggggatttggcgcttaatgggcaatatgtgattgagcttttctcatttccgttcccgccggagcgccccagccgaccggaagcttgcggcctgcgtcatctggcttttagcgttgatgacatcgatgcggcagtggcgcaccttgaaagccataacgtgaagtgtgaagccatccgtgtcgatccatacacgcaaaaacgcttcaccttctttaacgatccggacgggctgccgttggaactgtatgagcagtaaggcttgtcatcgccgcatttgcccggtaacgtgccgggcattgctactgtaaaatcgcaccatcatgacactcacgctcaatagacaacttctcacctcacgccagattctggtggcctttagcggcgggcttgactccaccgttctgctgcatcagttggtgcagtggcggacggaaaatccgggggtcgctctgcgcgctattcatgtgcatcacggtttaagtgccaatgccgatgcctgggttacgcattgcgaaaacgtctgccaacagtggcaggtgccgctggtggtcgaacgcgtacaacttgcgcaagaggggctggggattgaggcccaggcgcggcaggcgcgttatcaggcatttgcccgcaccttgttgcccggtgaagtgctggtcaccgcgcaacatctcgacgatcaatgtgaaacttttctgctggcgctaaaacgcggtagcggccctgccgggctttcggctatggcggaagtttcggagtttgccggaacacggcttatccgcccgttgcttgcccgcacgcggggggaactggcgcagtgggcattggcgcatggtttacgctggattgaagacgaaagtaatcaggacgactcatacgatcgtaactttctgcgcctgcgcgtagtgccgttattgcagcagcgttggccgcattttgccgaaacaacggcccgcagcgccgcactttgtgctgaacaagagagcctgctggatgaactgctggcagatgatttagcacactgtcaatcgccgcaggggacgctgcagattgtgccaatgctggcgatgagtgatgctcgcc

SEQ ID NO: 50 - DNA, 12606 bp, Escherichia coli
  Strain O55:H7
  modified_base (2298)..(2298): a, c, g or t
  modified_base (12354)..(12355): a, c, g or t
  modified_base (12357)..(12358): a, c, g or t
  modified_base (12603)..(12604): a, c, g or t
cgattatccgccgctggctggcagggcagaatgcaccgatgccttcccgcgacgcgttggtgaggatctggcaggaagtggcgctggcgcgggaagatgcctccccctgtttacgtttgggcgcgtttgaaatccgacgctatcagtcgcaactgtggtggattaaatccgtcaccgggcaaagcgaaaacattgtgccgtggcagacgtggcttcaaccgctggaattaccggcggggctgggaagtgtacagcttaatgcgggaggcgatattcgccctccgcgtgcagacgaagcggtcagcgtgcgtttcaaagcgccaggattgctgcatattgtcgggcgtaacggcggacgtaagctaaagaaaatctggcaagagctgggcgtgccgccgtggctacgtgacaccacgccactgctgttttatggcgaaacgctgattgcggcggcaggggtatttgtgacgcaagaaggtgtggctgaaggtgagaatggcataagttttgtctggcagcgaaacgcttagtttagtgaaggccggatatgacgcattaagcgtcgcatccggcgaaagtcaatcaggactcgctcaccaccaccgtaccgatttccgggtggctaaagctggtaattttatccagacgtagctcacgggtttcgccagcggcctcgacgaccagatactccacatttttgcgggagactaaatcgctggctttggcctgcaatttttcgccatctttcagctcaagtgtcagcattaaatgatgctggcaggcgagctcaagattatcgtaatcatcacaattgattggttgatacgtatcattcattgacataatcgctcaccagtaagtttgccgcagcgtatgctgctttttccctgacagcctcagaaagggcgtcgtcggcagccatttcattcagcactttcaaaacgcagcccagcgcgtccggaacgtatcctaagtctccgctggcgatttccgcgtaccgcttgcgtattaactcacaatatttttccacatgccctcctgtcagcactctgacttaaccgtggatgcaagtctaagcctacgaagataaactctgtttcgcaaggtgactataccacactcatttctgcaatatcagcgccgcaactgcacgtattccgttacaatggcctcctgattcgaaaggagttttcttatggcgcttaaagcgacaatttataaagcgacggttaatgtggccgatctcgaccgcaaccagtttctcgatgcctctctgacgctggcgcgccacccttcagaaacccaggtgcgtatgatgctgcgcctgctggcgtggctgaaatatgctgatgaacgtctgcaatttacccgtggtttgtgtgccgatgatgagccggaagcgtggctgcgtaacgatcacctgggcattgatttgtggattgagctggggctgccggatgagcgacgaattaagaaagcctgcacccaggccgcagaagtggcgctgtttacctataatagtcgggcggcgcaaatctggtggcagcaaaatcagagcaaatgtgcgcagtttgccaatctttccgtctggtatctggacgacgagcagctggcgaaagtgagcgcctttgccgatcgtaccatgacgctgcaggcaacgattcaggatggcgtgatctggttatcggatgataagaataatctggaagtgaacttaaccgcctggcaacaaccttcatgattgtgatttcccgacatgttgctattcccgatggtgagcttgagatcaccgccattcgtgcgcagggcgcgggcgggcagcatgttaataagacctcaacggccattcatctgcgttttgacattcgggcatccagcctgccagagtattacaaagagcgtctgctcgccgccagccatcatttgatcagcagtgatggcgtaattgtcattaaggcacaggaataccgcagtcaggaactgaaccgcgaagcggcgctggcccggctggtggcagtgattaaagatttaacaacagaacaaaaagcccgacgacccacgcggcccacccgtgcatcgaaagagcgcaggctggcatcgaaagcacaaaaatcaagcgtgaaggcgatgcgcagcggtcgggaataaaaagaaggaatggatggtgaaaaaagcgatagtgacagcgatggctgtaatcagcctctttactctgatgggttgtaataatcgggccgaagtcgatacgctttctccggcgcaggctgccgaattgaaaccgatgccgcaaagttggcncggcgtgctgccgtgtgccgattgcgaaggaatcgaaacctctctgttcctcgaaaaagacggaacatgggtgatgaatgagcgttatctcggtgctcgtgaagaaccttcctccttcgcttcctacggtacatgggcgcgaaccgctgacaagctggtattaaccgacagcaaaggtgaaaagtcatattatcgggcgaaaggcgatgcgctggagatgctcgatcgtgaaggcaatccgattgaatcgcagttcaactatacgctggaaccggcacaatccagtttacccatgacgccgatgaccctgcggggcatgtatttttatatggctgatgcggcgaccttcactgattgcgcgaccggaaaacgtttcatggtagcgaataacgcagagctggagcgtggctacctggctgcgcgcggccacagtgaaaaaccggtgttactgtcagtagaaggtcactttacgcttgaggctaatccggataccggtgcgccaaccaaagtattagcacccgatacggcagggaaattttacccaaaccaggattgcagtagtttggggcagtaacccgtcttgagacagaaacaaacgcaaaacaggccagaaggatatatttcaacattttgaatttgcacgttttttgtaggccggataaggcgtttacgccgcatccggcaatggtgctcaacgcctgatgcgacgctggcgcgtcttatcatgcctacaacccccctcataccttaaggcggataaggcatttactttatcaccgggtcaaaccaacaaagcgacccgccttgatataaatccctggcttcaggtgcccaacatactgtaactgcgtttctggcttaaacgcagagacatcaccaatacgcatatgcatcagatcggcagggctaatccagcccgattgcgccagcgtaagcggatgcccggctttggcaaatgcatcagtgacaaattccgaacaaaaccacgactttttgtctccttcgaccacactgcttaactgcgctttcgccaggccgctgacgcactgttggcgaaaatcctcggagaacggattcagtgagcacatctggcgagtcaccataaagggaataaattcgacaatgccgcgatagttataaccgctatctttgattttattggcgaacgcggtgatttctgtggcttgttgcggggtaagatccgggactcgtaagacgaaaagtttatcactatgcttcatcgcttttttaagggaaacaatctggacgccagcgcctgtcgcttctgcaacgttattttcacccagatagattgcaacgtgactcacagaggaagtgctgaaaacgcggatcccaaatgaggttacccccaggcttgaggagaacagcaaatcgccgggtttgagatcaggtaccgttatttcttttattgattgttcggtgaaagagctttgatgctggaatttgacagcccatgttttcgcctcggcatctactgctgtggctgatgagtctggctggctgatatcaacggtacaggccgaaagtaaaagaaagcaggggagaagcaggcggcagtacgcctttggtttatccattttatacaatccatgtaaaaaagggccctgaaattcaggaccctttctggcatcagcctttaatttgtttcaccagatattcgacgatgtcaccagtcttaattaactgtttctcgccgttgcgacgatatttatattcgatatcgtcgttgtcgaggttacggtcgcccagcacaatagtgtgcggaataccgatcagttccatatcggcaaacatcacgcccggacgttcttttcggtcatccagcagcacttcgataccttgtgcacgcagttcgctgtacagtttctcagcaagctcttgtacgcggaaggatttgtgcatgttcatcggcagaattgccacctggaacggcgcgatagcgtcaggccatacgatgccgcgctcgtcgtagttctgctcaatcgccgcagccactacgcgcgttaccccgataccgtagcaacccatagtcaggatttggttacggccatcttcaccctgtacggaggctttcagtgcttcggagtacttggtacccagctggaagatgtgaccaacttcgataccacgtttgatcagcagcgtaccctggccatccgggcttggatcgccagccaccacgttacggatatccgcaacttccggggtagcgacatcgcgatcccagttgatgccgaagtagtgtttaccatcgatgttagcaccagcagtgaaatcactcatcgccgcaacggtacggtcaatcaccaccggaatcggcatgtttaccggacccagtgaacccggaccggctttaaccacggcacgaatttcttcttcggtcgcgaaagtcagcgggctggcaacctgcggcagtttttctgctttaacttcgttcagctcgtgatcaccgcgcaccagcagcgcaaccagcgggaagctactgccttcaaccgctttaaccagcagagtcttaaccgttttcttaatcggcagattgaactgttcaaccagttccgcgatggttttcgcgttcggcgtatcaaccagcgtcatttcctgggtagcagcagcgcgcggttctttcggcgcgatagcttctgccagctcaatgttcgctgcatagtcagaggtgtcggagaagaccacatcgtcttcaccgctctgcgccagcacctggaattcgtgagaggcgctgccgccgatagaaccggtgtcggcctgtacggcgcggaaatccagccccatgcggctgaagattttgctgtaggccgcatacattgcatcgtaggtttcctgcagggattcctgagaagtatggaaagagtaagcatctttcatcaggaattcgcgggaacgcatgacgccgaaacgcggacgcacttcgtcgcggaacttggtctggatctgatagaagttcagcggcagctgtttgtaagagctaagctcgttacgaatcaggtcagtgataacttcttcatgagttgggccgagtacgaacggacgctcgccacggtcaacaaaacgcagcagttccggaccgtactgttcccaacgaccactctcttgccacaaatcggctggctgaaccaccggcatcgacacctcgattgcaccggcgttgttcatctcttcacgcacgatgttttcgacttttttcagaacgcgcacgccggtcggcagccaggtatataacccggaggccagcttgcggatcatcccggcgcgcagcatcagctgatggctgatcacctcggcgtcggcaggtgtctccttgagagtggagagcaggtattggctagtacgcatgttgttacggttccagttggaaggtagaacaggctcaaggcgagcctgggacaaaaaaagtgatttagtttaccagtgcaaaagaaatgtcaaaagagaagggcgtgaatttaacgcggttccagcgcaaagacttcaaaacctgcgtcggtgacgcgccagcgaacgttaaaatcatgtagccagacggcataggttttgcccgtttcctcacctttacgataggccgggcgcgggtcttgcgccagtacttcgcggataaacagcgttaactgcggataacgcttctccagcgtcaaaagctgcttttcgacctctgcggtaaaactcaccgccatctctgcagctggcgcactttgcgcatagctggcactggcatcgggaagcgattcggcaaaggggagatacggtttgatatccactaccggcgtaccatcgaccagatccaggctgccgagcttcagaatcacgcagtctttatggcaaacaacctctttcagctctaccagcgacataccaatcgggttggggcggaaagtggagcgcgtagcgaaaacacccattctggcattaccgccaagacgaggcggacgcacagtcggacgccagccgccttccatcgtttgatgaaagacgaaaaggatccataaatggctgaatgcttccaggccgcgaacggcgtcagcctggttgtagggagcaatgagatgtagttcgccgttggcgctttttaccagacctggctggcgcggaacggcgaatttttctttatagggcgagcgaataacacctatttgctcgaactggaaactgctcatttcgccgtaatgttaagcgcagaaccgatacataaagcctgacgatagcagcctggcgtaccgctggtaacttcgcagctatgcagtaataccgcattggctttcattttcgaggcgttgatttgcatccgcttacgcgcggttggaatgctcggcggagagtcctgattagaggcctggcaagagtcgccactgacttcaccgagatcgcggaacggtttgccgactaattcttctgcattggtataaattcggaccggcgtggcgcgcggcgctttcggttttgcaggctccgctttcggctggggtgcagtgctttgaacgggttcgacaggggatctgcttaacatggaacagccgcttagcatgagtgctactaaacagatcggtaaagcacgcatagtatttcctcaatgtatgatcaaaacgtcaatattgaatcaggagcttgtaaaaatgacaagacgggcaagcgcccgtcctgaatgatattacaaattgtggaaacagcctaaaaattaccagcctttaacagcgccgccgttaaacactttgtttgctgcttcgtaaacttcgtcagactgataagcctggacgaatttcttcacgttctcggcgtctttgttatcttcacgcgttacgatcaggtttacgtacggggagtctttatcttcgacaaagataccgtttttcgctggagtcaggccaatctggctggcataggtggtgttaataactgccagagcgatttgcgcgtcgtccagagaacgcggcagttgcggtgcttccagttcaacaattttcagattttttgggttctcaacaacatcaagaacggtcggcagcaggccaacgccatctttcagtttgatcaagcccactttttgcagcagcagcagtgaacgaccaaggttagttggatcgtttggcacggcaacctgcgaaccatcctgcagttcatccagtgatttgattttcttggagtaaccagcaatcggataaacaaaagtgttgcctactgcgaccagtttgtagccacgatctttcagttgctgatcaaggtacggtttatgctggaaggcgttggcgtcgatatcgcctttgctcaatgcttcgtttggcagaacatagtcgttgaaggttaccagctcaacgtccaggccatatttgtctttcgcaactttctgcgcgacttctgcaacctgctgttcggcaccaacaatcacgccgactttaatgtggtttggatctttttcatcctgaccgcagcctaccagtgccagtgatccaatcagggctcccactgccgcaaaggttttgaatttgaacgccataccttattccttcttcaattatttatgttgtgttgaacgttacttgcgagtgacagcccggacgatgcggtcgcctgcgaactgaattaaataaaccagaatgaccagcaataccagtaccgtattcatcaccgtcgcgttatagccgatgtagccatactgatagccaatctgacctaaaccaccggcaccgactgcaccacccatcgcggaataaccgaccagggtaatcagggtgatagttgccgcattcaccagacccggcaacgcttccggtaacagcactttacggacgatctgcattggcgtggcacccattgcgcgggaagcttcaattaacccggttgggatctccagcagagcgttctcgaccatacgggcaataaacggtgctgcaccaacggttaacggaacaattgctgcctgcaaaccaatcgatgtaccgacaataacgcgggtaaacggaatcatccataccagcaagataatgaacgggatggaacggaaaatgttcacaatcgcagaaacggtacgatacagcttcgcgttagcaataatttgccccggacgcgtgacataaagcaggacgccaaccggcagaccaaccacaaacccaaaaaatccggatacgaaggtcattgccagcgtttcccatacgccacgaaccagcagccacatcatcggctcagacataacccagtacctctacttttacatggtgttcctgcagccaggcaatggcggcttgcgtatcttgttgtgtgccgtgcatttcagtcagcatgatgccgaacttaacgccaccggcgtaatccatctgcgcgctaataatgttgttgttgacgttgaaacgacgcgcggtttcagaaagcagtggggcatcgaccgattgaccggtaaactccagacgcagcatcggcacgcagtcagtaaatggctccgcttgcagacgttcctggtaatcttccgggatatccagatgcagggttgactgaataaacttctgcgccagcggcgttttcggatgtgagaacacttcacttaccgtgtcctgctcgatcagttcgccattgctgatgaccgcaacgcaatcacaaatacgcttcacaacgtccatttcgtgggtgatcaacagaatcgtcaaacccagacggcggttaatgtctttcagcagttcgagaatagaacgtgtcgttgccgggtctagcgcgctggtggcttcatcacacagcaatactttgggattgctggctaatgcacgggcaatcgccacacgttgtttctgcccaccggaaagattcgacgggtagctatcatgcttatctccaagaccaaccaatgacagcaattccgtcacgcgacgtttgatctcgtctttcggtgtattgtccagctccagcggcagagccacgttgccaaaaacagtacgcgaagagagcaggttaaaatgctggaaaatcataccaatctggcggcgagctttggtcaactcggattctgacagcgtggtcagttcctgtccatcgaccagcacgctaccctcggttgggcgctccagcaggtttacacaacgtataagcgtactcttacccgcgcctgaggcaccgataacgccataaatttgtccagctggcacatgcaggctgacgttgttcaacgcctggatggtgcgggtgccctggtggaacactttggtgatattcgaaagttttatcattgattatttattatcgtcattaagttagtcgtggcatctcgaatgcctgaaacgggcaacgccgtcaatgaaatggatgttaaggcatccagacgtctaaatcaatcaggtttatgcgaagagcactttcttgcaggtcgaaacatgcgatactagcgtcacatgccttattaaggagctataaaaggtggcgaagagcgtacccgcaatttttcttgaccgtgatggcaccattaatgtcgatcacggctatgtccatgagatcgacaactttgaatttatcgacggtgttattgacgccatgcgcgagctaaaaaaaatgggctttgcgctggtggtagtcaccaaccagtctggcattgctcgcggtaaatttaccgaagcacagtttgaaacgctgaccgagtggatggactggtcgctggcggaccgagatgtcgatctggatggtatctattattgcccgcatcatccgcagggtagtgttgaagagtttcgccaggtctgcgattgccgcaaaccacatccggggatgcttttgtcagcacgcgattatttgcatattgatatggccgcttcttatatggtgggcgataaattagaagatatgcaggcagcggttgcggcgaacgtgggaacaaaagtgctggtgcgtacgggtaaacctattacacctgaagcagaaaacgcggcagattgggtgttaaatagcctggcagacctgccgcaagcgataaaaaagcagcaaaaaccggcgcaatgattaaaagatgagcggttgaaataaaaatgcatttttccgcttgtcttcctgagccgactccctataatgcgcctccatcgacacggcggatgtgaatcacttcacacaaacagccggttcggttgaagagaaaaattctgaaattcagggttgactctgaaagaggaaagcgtaatatacgccacctcgcgacagtgagctgaaagccgcgtcgcaactgctctttaacaatttatcagacaatctgtgtgggcactcgaagatacggattcttaacgtcgcaagacgaaaaatgaataccaagtctcaagagtgaacacgtaattcattacgaagtttaattctttgagcatcaaacttttaaattgaagagtttgatcatggctcagattgaacgctggcggcaggcctaacacatgcaagtcgaacggtaacaggaagaagcttgcttctttgctgacgagtggcggacgggtgagtaatgtctgggaaactgcctgatggagggggataactactggaaacggtagctaataccgcataacgtcgcaagaccaaagagggggaccttcgggcctcttgccatcggatgtgcccagatgggattagctagtaggtggggtaacggctcacctaggcgacgatccctagctggtctgagaggatgaccagccacactggaactgagacacggtccagactcctacgggaggcagcagtggggaatattgcacaatgggcgcaagcctgatgcagccatgccgcgtgtatgaagaaggccttcgggttgtaaagtactttcagcggggaggaagggagtaaagttaatacctttgctcattgacgttacccgcagaagaagcaccggctaactccgtgccagcagccgcggtaatacggagggtgcaagcgttaatcggaattactgggcgtaaagcgcacgcaggcggtttgttaagtcagatgtgaaatccccgggctcaacctgggaactgcatctgatactggcaagcttgagtctcgtagaggggggtagaattccaggtgtagcggtgaaatgcgtagagatctggaggaataccggtggcgaaggcggccccctggacgaagactgacgctcaggtgcgaaagcgtggggagcaaacaggattagataccctggtagtccacgccgtaaacgatgtcgacttggaggttgtgcccttgaggcgtggcttccggagctaacgcgttaagtcgaccgcctggggagtacggccgcaaggttaaaactcaaatgaattgacgggggcccgcacaagcggtggagcatgtggtttaattcgatgcaacgcgaagaaccttacctggtcttgacatccacagaactttccagagatggattggtgccttcgggaactgtgagacaggtgctgcatggctgtcgtcagctcgtgttgtgaaatgttgggttaagtcccgcaacgagcgcaacccttatcctttgttgccagcggtccggccgggaactcaaaggagactgccagtgataaactggaggaaggtggggatgacgtcaagtcatcatggcccttacgaccagggctacacacgtgctacaatggcgcatacaaagagaagcgacctcgcgagagcaagcggacctcataaagtgcgtcgtagtccggattggagtctgcaactcgactccatgaagtcggaatcgctagtaatcgtggatcagaatgccacggtgaatacgttcccgggccttgtacacaccgcccgtcacaccatgggagtgggttgcaaaagaagtaggtagcttaaccttcgggagggcgcttaccactttgtgattcatgactggggtgaagtcgtaacaaggtaaccgtaggggaacctgcggttggatcacctccttaccttaaagaagcgtactttgcagtgctcacacagattgtctgatgaaaatgagcagtaaaacctctacaggcttgtagctcaggtggttagagcgcacccctgataagggtgaggtcggtggttcaagtccactcaggcctaccaaatttnnanngcaaatttgaagaggttttaactacatgttatggggctatagctcagctgggagagcgcctgctttgcacgcaggaggtctgcggttcgatcccgcatagctccaccatctctgtagtgattaaataaaaaatacttcagagtgtacctgcaaaggttcactgcgaagttttgctctttaaaaatctggatcaagctgaaaattgaaacactgaacaacgaaagttgttcgtgagtctctcaaanntt

SEQ ID NO: 51 - DNA, 84 bp, Escherichia coli
  Strain O55:H7
cttcgggttgtgaggttaagcgactaagcgtacacggtggatgccctggcagtcagaggcgatgaaggacgtgctaatctgcga

SEQ ID NO: 52 - DNA, 46 bp, Escherichia coli
  Strain O55:H7
  modified_base (40)..(40): a, c, g or t
tgatatgaaccgttataaccggcgatttccgaatgggganacccag

SEQ ID NO: 53 - DNA, 501 bp, Escherichia coli
  Strain O55:H7
  modified_base (186)..(186): a, c, g or t
cactatcattaactgaatccataggttaatgaggcgaaccgggggaactgaaacatctaagtaccccgaggaaaagaaatcaaccgagattcccccagtagcggcgagcgaacggggaggagcccagagcctgaatcagtgtgtgtgttagtggaagcgtctggaaaggcgcgcgatacagggtgncagccccgtacacaaaaatgcacatactgtgagctcgatgagtagggcgggacacgtggtatcctgtctgaatatggggggaccatcctccaaggctaaatactcctgactgaccgatagtgaaccagtaccgtgagggaaaggcgaaaagaaccccggcgaggggagtgaaaaagaacctgaaaccgtgtacgtacaagcagtgggagcctcttttatggggtgactgcgtaccttttgtataatgggtcagcgacttatattctgtagcaaggttaaccgaataggggagccgaagggaaaccgagtcttaac

SEQ ID NO: 54 - DNA, 333 bp, Escherichia coli
  Strain O55:H7
  modified_base (3)..(6): a, c, g or t
  modified_base (92)..(95): a, c, g or t
agnnnnagggtatagacccgaaacccggtgatctagccatgggcaggttgaaggttgggtaacactaactggaggaccgaaccgactaatgnnnnaaaattagcggatgacttgtggctgggggtgaaaggccaatcaaaccgggagatagctggttctccccgaaagctatttaggtagcgcctcgtgaattcatctccgggggtagagcactgtttcggcaagggggtcatcccgacttaccaacccgatgcaaactgcgaataccggagaatgttatcacgggagacacacggcgggtgctaacgtccgtcgtgaagagggaaacaaccc

SEQ ID NO: 55 - DNA, 13198 bp, Escherichia coli
  Strain O55:H7
  modified_base (233)..(233): a, c, g or t
  modified_base (1118)..(1118): a, c, g or t
  modified_base (6932)..(6935): a, c, g or t
  modified_base (10259)..(10259): a, c, g or t
  modified_base (10654)..(10654): a, c, g or t
  modified_base (10666)..(10666): a, c, g or t
gctaaggtcccaaagtcatggttaagtgggaaacgatgtgggaaggcccagacagccaggatgttggcttagaagcagccatcatttaaagaaagcgtaatagctcactggtcgagtcggcctgcgcggaagatgtaacggggctaaaccatgcaccgaagctgcggcagcgacactgtgtgttgttgggtaggggagcgttctgtaagcctgtgaaggtgtgctgtgaggcntgctggaggtatcagaagtgcgaatgctgacataagtaacgataaagcgggtgaaaagcccgctcgccggaagaccaagggttcctgtccaacgttaatcggggcagggtgagtcgacccctaaggcgaggccgaaaggcgtagtcgatgggaaacaggttaatattcctgtacttggtgttactgcgaaggggggacggagaaggctatgttggccgggcgacggttgtcccggtttaagcgtgtaggctggttttccaggcaaatccggaaaatcaaggctgaggcgtgatgacgaggcactacggtgctgaagcaacaaatgccctgcttccaggaaaagcctctaagcatcaggtaacatcaaatcgtaccccaaaccgacacaggtggtcaggtagagaataccaaggcgcttgagagaactcgggtgaaggaactaggcaaaatggtgccgtaacttcgggagaaggcacgctgatatgtaggtgaagtccctcgcggatggagctgaaatcagtcgaagataccagctggctgcaactgtttattaaaaacacagcactgtgcaaacacgaaagtggacgtatacggtgtgacgcctgcccggtgccggaaggttaattgatggggtcagcgcaagcgaagctcttgatcgaagccccggtaaacggcggccgtaactataacggtcctaaggtagcgaaattccttgtcgggtaagttccgacctgcacgaatggcgtaatgatggccaggctgtctccacccgagactcagtgaaattgaactcgctgtgaagatgcagtgtacccgcggcaagacggaaagaccccgtgaacctttactatagcttgacactgaacattgagccttgatgtgtangataggtgggaggctttgaagtgtggacgccagtctgcatggagccgaccttgaaataccaccctttaatgtttgatgttctaacgtggacccgtgatccgggttgcggacagtgtctggtgggtagtttgactggggcggtctcctcctaaagagtaacggaggagcacgaaggttggctaatcctggtcggacatcaggaggttagtgcaatggcataagccagcttgactgcgagcgtgacggcgcgagcaggtgcgaaagcaggtcatagtgatccggtggttctgaatggaagggccatcgctcaacggataaaaggtactccggggataacaggctgataccgcccaagagttcatatcgacggcggtgtttggcacctcgatgtcggctcatcacatcctggggctgaagtaggtcccaagggtatggctgttcgccatttaaagtggtacgcgagctgggtttagaacgtcgtgagacagttcggtccctatctgccgtgggcgctggagaactgaggggggctgctcctagtacgagaggaccggagtggacgcatcactggtgttcgggttgtcatgccaatggcactgcccggtagctaaatgcggaagagataagtgctgaaagcatctaagcacgaaacttgccccgagatgagttctccctgaccctttaagggtcctgaaggaacgttgaagacgacgacgttgataggccgggtgtgtaagcgcagcgatgcgttgagctaaccggtactaatgaaccgtgaggcttaaccttacaacgccgaaggtgttttggcggatgagagaagattttcggcctgatacagattaaatcagaacgcagaagcggtctgataaaacagaatttgcctggcggccgtagcgcggtggtcccacctgaccccatgccgaactcagaagtgaaacgccgtagcgccgatggtagtgtggggtctccccatgcgagagtagggaactgccaggcatcaaattaagcagtaagccggtcataaaaccggtggttgtaaaagaattcggtggagcggtagttcagtcggttagaatacctgcctgtcacgcagggggtcgcgggttcgagtcccgtccgttccgccacttattaagaagcctcgagttatcgctcgaggttttttttcgtctacatttctattattgctaaaatcgcaaaaatcctctgcgttttacgccctttttccgcaacattctaaagcccataatcacctcagttaacgaaaatagcattaaaagaggcatattatggctatccctgcatttggtttaggtactttccgtctgaaagacgacgttgttatttcatctgtgaaaacggcgcttgaacttggttatcgcgcaattgatactgcacaaatctatgataacgaagccgcagtaggtctggcgattgcagaaagtggcgtgccacgtcatgaactctacatcaccactaaaatctggattgaaaatctcagcaaagacaaattgatcccgagtctaaaagagagcctgcaaaaattgcgtaccgattatgttgatctgacgctaatccactggccgtcaccaaacgatgaagtctctgttgaagagtttatgcaggcgctgctggaagccaaaaaagaagggttgacgcgtgagatcggtatttccaacttcacgatcccattgatggaaaaggcgattgctgctgttggcgctgaaaacatcgctactaaccagattgaactctctccttatctgcaaaaccgtaaagtggttgcctgggctaaacagcacggcatccatattacttcctatatgacgctggcgtatggtaaggccctgaaagatgaggttattgctcgtatcgcagctaaacacaatgcgactccggcacaagtgattctggcgtgggctatgggggaaggttactcagtaattccttcttctactaaacgtgaaaacctggagagtaatcttaaggcacaaaatttacagcttgatgccgaagataaaaaagcgatcgccgcactggattgcaacgaccgcctggttagcccggaaggtctggctcctgaatgggattaagcctctctgacagctcctccgggagctgtttttacatgctcgctaaggaaatcgataaaagcccggatgcgcgtacttaccgcacggtcgctgtaatagacggcactgaatggcatttccactggcaacactttatctgccattaactccaccaattctccgcgagcgatttctctgtcgatcatatagtcggacaaacacgcaatcccgttgccactcaggcaaagctgtttcagtgtttccccactattggatgacaaaccgtacttcacctcatgtaattgtccatcgctacaggctaccggccaggtattgagggaagcgggttcagtgaatcccaggcaaacatgttgctttaaatcgtcgatcgtttctggcttcccgtagcgggaaatataatcgggggaggcgataatttttcgataactgttaaataacggcctggcacgtaagctggaatccgttaacgtaccggcgcgtatcgcgacatccacttttctttcgatcaaattaataatcgtttcggaggagactagcgataaagtgacttccggatagcgttcacgaaaaggcttaatcaacggcatcagaaagtgcagcaccactggagttgcggcatcgatgcgcaacagtccacgcggtgtattacgcgtctccataatttctgattctgccgctgccatctcctgcaaaattgactgtacgcgacgaaaataacgctcgccttcttccgtcaggctaagttgccgcgtggtccgattaagcaggctaacgccaagtttcatctccagctttttcaccgcccggcttaccgctgagtttgcttgccctaattgttccgctgcccggctaaagctgccgctttcgacgaccgaaacaaaaatggcgagttcttccgacgtggctttcatttttgctcctgttgcaaaatagatgagatattttgaatttatttgtcattaaaccatcaggatgcgtgatatgtcatccgatttaatgttctcaataatgagcaaaattctgaccggtgtaagcacttgcttacataacaatatacaattgctcgttgaaagagtgagctaaaatccctataacagtagaaccctcccgagtgcggaagggttgacgtaatagaggtttcaaagtcaaaagtgcgaaaaaacacctatgccatgcgctatgttgccggacaacctgcggagaggatcttaccgccggggtcttttgcgagcatcggccaggcattaccacccggagaaccgttaagtaccgaagagcgtattcggatcctggtgtggaacatatacaaacagcaacgcgctgaatggttgtcggtattaaagaattacggcaaagacgcacatctggtgttattgcaggaagcgcaaacaacgccagagttggtacagtttgcgactgctaactatcttgccgccgatcaggtacccgctttcgtgctgccacaacatccttctggcgtaatgaccctttcggcggcacatccagtgtattgctgcccgttacgtgaacgagaacccattttgcgtctggcgaagtcggcactggtgacggtctatccattacctgacacccgcctgttaatggtggttaatatacacgccgtcaacttcagtctgggcgtggatgtttatagtaagcagttacttcctattggtgatcagatagctcaccacagcggcccggtcattatggcgggagatttcaatgcctggagccgtagaaggatgaacgcgttatatcgttttgcgcgggaaatgtcgctgcgtcaggtgcgttttaccgatgatcagcgccgtcgggcgtttggtcgcccgctcgattttgttttctaccgtggtctgaacgtcagcgaagcttctgtactggttacgcgcgcgtccgatcacaatccgctactcgttgaattcagtcccggcaagcctgataaataaggtatgtcaggtctgccacagggcagaccaacgtttggagctgcccttttatactcaaacaacaaaaggacagtgcaatgacaacacaatcccaccatgaccacgtagaaaagcagtttagctctcaagccagcgaatatctgaccagtaccgtacatgcatccggacgagatttacagcgcctggcggtgtgtctggctgattatcctgatgcaagtgtacttgatatgggctgcggagcagggcatgccagctttgtcgctgcgcaaaatgtgagcacggtggtggcgtatgacttatctgcccaaatgctggatgtcgtggcacaagctgccgaagtccggcaactgaaaaatatcaccacccgccaggggtatgccgaaagtctgccatttgccgataacgcatttgatattgttatcagccgttattctgcccatcactggcatgatgttggtgcagcactgcgtgaagtgaaccggatattgaaacctggcggtaggctgattgtgatggacgtaatgtctccgggccacccagtgcgcgacatctggttacagacggtagaagcattatgcgatacctctcacgtacgaaactacgccagcggtgagtggttgaggttaatcaatgaagccaatctgatagttgataatttaattacagataagttaccgctggaattttcttcatgggtcgcgagaatgcgtacgccagaagcgttagtagacgctattcgcatttaccaacagagcgcatcgacagaggtgagaacgtattttgccttgcagaatgatggctctttcaccagtgatatcatcatggtagatgcacataaagcggcataaataaaaaaggcaccgggggaatcggtgcctttctattatctggtttgtcaggagtctggcatgctgttgtttttcacaaacaacgtcagcttatcgcctggttgcagattcgcagtatcgctgttccagcgcatcacatctttgatgttcacgccgtggcgtttagcaatgcttgaaagcgaatcgcctttgcgcacacgatacgtaatgctatcgctgttgtttgccaaccgctgtgcgctactacctgcgccaatcgtcagactttggcctggtttcagcttagagccgcgcagtttgttccactgctgcaaatctttggtgcttacgccgagacgtgaagcgatacttgaaagcgtgtcgccagagcgtacggtgtaaacacggctgttaagcggcgtattgtcggcaaccagcgtcgactgtacagcagcaatttcgcctgaagccagagattcacgcagttgatctgcatgcttctttggcaccatcacgtactgcggaccacttgcgcccagcgtggagcctttcacgccagcgttgaatgtcttcagcttgctgacggaaatccccgccatatctgcaaccttcgccatttcaaccgggctactcaggtgcacacgcgccagagcacggctttcatcggtcgttggcagacgtacgccataacgcttgctgtttttgagaatatcactcaatgccagcattttaggcacgtactgcttcgtttcctgcggcaacggtaacgaccagaagtccgtggatttcccacgcgctttgttcgttttaattgccttcatgacccgaccttcgccgctgttataagccgctacggtcagaagccagtcgccatcaaacattttgttcagacgctgcatcatattcagcgcggcagttgttgaagcaacaacatcgcgnnnngcgtcataattgcgggtctgtttcaaaccataattgcgccccgtgctcggaatgatctgccagatgcctgcggcattggcgccagacgttgcgtgaggatcaaaagcgctctccactatgggtagtagtaccagttccataggcatgttacgttttttaacttgcccggctatccagtacatatacggctctgcccgtaaagttacatcgtggagatagctcttattgcgtaaatatttctgtttctgttcgcgaatccggtcattttccggaattcccatctttagctcgtcgccaatgaaagcccacaagtcaccatctggcgcgatagacgtcccatcgtccatccatcgtgcctgacttgtaaactttgctgcttccccttgaccagctgcagaaaggctctgtgcgtgctgttgaacgttgccggtactctggcaacccacgagcaggacagaggcgagtaatatcgcttttgccttcatgtgtgcgtcaatagttgcttaaaagacgaccgatcataacggcgaacggagccgatgacaagaaagttttatcagaacctatctttctttgaccttaaccatgcaaaacgctcttcaggttgttgcaataatgtttcttcattaattacattaattaaatcaatatcttccgttcttaaaaaaacattaatttgccgctcatttttcagaattacgggtagtgttatttgattttttgcccgtaactccttaactttacgataataatcatttatggacaaatcgtgcggaagaatactcaaagcaaacttcatatttgataacgtatattcatgagcacaacataccaatgtatcgtcaggtaacgcacttaactttttaagtgattgatacatttgtgatgctgtcccttcaaacaaccgaccacacccaccagaaaacagcgtgtcgccgcaaaatagataaggtttactgaagtaacagatatgtcctaaagtgtgacccggcgtggcaattacactaaattcatgccccaaaacgaaggcagtttcgccatctttgactacctgtgttgttcccttatcttgtgtctcttgtggaccatacaccacaatttgcggaaacttttccaccagttcttttacgccgccaacgtgatcgtgatgatggtgggtgagaaatatggcctccggttgccagttattggcggcaatggcgtttaatactggctctgcgtctccgggatcgacaatcaggcagcgacctgcttcatcattcaaaacccagatgtaattgtcatcaaaggcgggaatactgttaagattcatagattacctctcagtgtgaaacggaaggttgtgatgaaaccggcaagagtccctcaaactgtcgtggctcctgatcgctggggcgatttgccctggggagagctttatcgcaaggcgctggagcgccagctcaacccgtggttcactaaaatgtatggttttcatctgcttaagattggcaatttaagcgcagaaatcaattgcgaagcgtgcgcggtttctcatcaagtgaatgtttctgcgcaaggaatgcctgtccaggtgcaggcggacccacttcatcttccttttgccgataaatccgttgatgtttgtctactggcacatacattgccgtggtgcaccgatccgcatcgtttattgcgtgaagccgatcgggtattgattgatgatggctggctggtcattagtggcttcaatcccattagtttaatgggattacgcaaacttgtgccggtattgcgcaaaacctcgccctataacagccggatgtttactctgatgcggcaactggactggctctctttgttgaattttgaagtgctacacgccagccgtttccacgttctcccgtggaacaaacacggaggaaaacttttgaatgcgcatattcctgcgcttggttgcttacaacttattgttgcccggaaacggactattcctttaacgctaaatccgatgaaacagagtaaaaacaagccacgaattcgccaggcggttggagccacccggcaatgtcgtaaaccacaggcttaaacttcgacttggtagcccgtatcttccagtgtgggattcatcgccgcggcacgagccagttcatcacagcgttcgttttccgggtgtccggcatggcctttaacccattcccatttgatttgatgctgccccaatgcagcatcaagacgttgccagagatcgacattttttactggttttttgtctgcggttttccagccacgttttttccagttatggatccactgggtgataccctggcggacatactggctgtcggtactcaaaatgacttcgcaatgttcttttaacgcctccagcgcgacaatagcggccatcaactccatacggttgttggtggtgcgggtgtagcctgcgctaaaggttttctcgcgtccgcgatagcgtaaaatagcgccgtaacccccaggtccaggattacccagacacgaaccatcggtgaaaatttctacctgtttaagcatctctggtagacttcctgtaattgaatcgaactgtaaaacgacaagtctgacataaatgaccgctatgagcactgcaattacacgccagatcgttctcgataccgaaaccaccggtatgaaccagattggtgcgcactatgaaggccacaagatcattgagattggtgccgttgaagtggtgaaccgtcgcctgacgggcaataacttccatgtttatctcaaacccgatcggctggtggatccggaagcctttggcgtacatggtattgccgatgaatttttgctcgataagcccacgtttgccgaagtagccgatgagttcatggactatatccgcggcgcggagttggtgatccataacgcagcgttcgatatcggctttatggactacgagttctcgttgcttaagcgcgatattccgaagactaataccttctgtaaggtcaccgatagccttgcggtggcgaggaaaatgtttcccggtaaacgcaacagcctcgatgcgttatgtgcccgctacgaaatagataacagtaaacgaacgctgcacggggcattactcgatgcccagatccttgcggaagtttatctggcgatgaccggtggtcaaacgtcgatggcttttgcgatggaaggagagacacaacagcaacaaggtgaagcaacaatccagcgccttgtacgtcaggcaagtaagttacgcgttgtttttgcgacagatgaagagcttgcagcacatgaagcccgtctcgatctggtgcagaaaaagggcggaagctgcctctggcgggnataaatacatgtaaaaggcgctaaaaatagcgacttgggcgatttttgcagcaaatgattcaaaagatgagaaaaaccgttgacgaagggtgaggcaatccgtaatattcgcctcgttcccaacggaacacaacgcggagcggtagttcagtcggttagaatacctgcctgtcacgcagggggtcgcgggttcgagtcccgtccgttccgccaaattcacctcatgaaaatgagttcagagaaccgcaagatttttaattttgcgggtttttttgtatttgaattccaccatttctctgttcaatgattttactctggcgtaagtgcgtgattctcgcttgttgtctcattcattaaaattcaataatgatatcgaaccattcagcttaaatatntttccagagaanaaatttatattgattaaatgaatgtatatttcaaattgattttgtttgttattatttaagtggggtatataattagagtccgttatcaatgctaaatattctaatcattatgacaggcgagggagtgtccaattatgaattcaaaaaagctttgttgcatatgtgtgttattctcgctgcttgcaggatgtgcctctgaatcttctattgatgaaaagaagaaaaaagctcaagtcacacaaagtaatattaataaaaacactccccagcaactgacagacaaagatttattcggtaatgaaaccactctggccgtatccgaagaggatattcaagcagcgcttgatggagatgagttccgcgttccccttaattctcctgtaatacttgttcaatccggcaaccgcgcaccggaaaccattatgcaggaggagatgcgaaaatattatactgtttccacattctctggtatcccggacaggcaaaagcctctgacttgtaacaaaaacaaagataaaaatgagaacgaggatgttgcccgtgctgagaatatgaactggatgcaggcactgcgttttgtggctgcaaaaggacatcagaaagcgattattgtttaccaggatatgttgcagacaggaaaatatgactctgcgctgaaatcaacagtatggtccgactataaaaatgaaaaactcactgacgctatctccctgcgctacctggtacgtttcacgctggtggatgtggcaacaggtgagtgggctacctggtcgccggtgaattatgaatcgagagtaatttttccgccggctggaataacaaaaacgagcaataaagaactatcaaatgaccatgttacggaagcgcaactgtttaatttgaaacaaaaaacatatgtatcgatggtgaaagacttggtgagtcgattccagtaatcgttattgttatgctgccgcctgtagtttagggtggcagcaaacaggagttgagtatttctataatgtaaatatgattgtttttataaagttataatatatattaccagtgtattgcatgtgagttatttttttaattcttcataaattaaaatggtatcatctgcaatggaaagaattgctattatctcttcatttttttatatttttcttttaatgtcttgtttctttcttttaatggagtacattcattaataatatcattcttagctgtcattgagtcagtttcgatatcgaatgctaaatctacaaagcaataatctacgtagaacataaatctacgtatatcttccggtatagcagtggaaaaataacggtattgcgtgtaagtggtttgatcatcgaattcgtctgattgtactgaatatgtaaatgtggccagtataaatagtaatgttaatcttaaatttataataatcatttgctggatatctcatctggattttgaaagtcagaaatgtaagcattgtttagttgcatggctcttattttgtttaactcagtatagcatggatatagccgagagaatgccagtcgccctactctggccccccaggttagagtaaaagagcattgagcaaatctgtaacgtataaattccctattagaagactctagtctttttaaagaaataactgcttcttttcttattgcttcgtcctcatcactattccatttttgaattttctcttttatatttgcttctgcttttttaagtgtaatagtgctcataataaatgagtttttaacacaatcaataaattcaagttcatcaacaccactacattctttagacatggaaatgtcaaatgccagaccttttgtacatgagaatgtcagcagtagaataattgttatttttcgcattctcataatactctgttttttgtgagtaatgtataaacgaactgaagttttattgcatacttgggatcgccaccaccattataattcatcgctacattttttattgtgataggtttccatccagtaattattactttcatggatgctttttgataatataaaatatctcccgggtgtattttatcgagattttttccaggattgtttttcgttaagttaggtatggtcgtttttctctcttttctgatgttgtcagccaaatcgcctttttggacaatggcgctatatagagttgagtcatattgatcgatagttgattcttcctttgtattagaaagtttcatcattaagtaagtaattgctgctttgatattctcttctggagagccagttatttgttcttttgcccagtaatttctttctggatcttttaacccattgaatgctttgtttctccattgtggtggggtaacaagggctgtagatttttctccagagattaaagctggcatcgctttatctttccgaaaacgaccaatttgtaatggataaccattccactgagaagtattttccgcatcgttttcagtccagagcatggcttttattatataccaatccaacggctgaaagtatggagtgctggacaaatgaatgttgatttcattaa

SEQ ID NO: 56 - DNA, 5529 bp, Escherichia coli
  Strain O55:H7
  modified_base (236)..(236): a, c, g or t
  modified_base (238)..(239): a, c, g or t
  modified_base (243)..(243): a, c, g or t
  modified_base (1792)..(1792): a, c, g or t
  modified_base (4264)..(4264): a, c, g or t
  modified_base (4590)..(4590): a, c, g or t
taataagtcatatttattccattctttatgattgctcacaaatgccaactctcttattttttttcatttaaaaaaatcactttcatcttctgttattcttgatgcgaaatcttgtcttagttgaaatgggaatttttcattaaataacgtactgtcagtgcttgtatttttgctttcactgtctgatgttgaagagtgtaaaatattgttagccattataataatcccatatgttntnnaaanagacgatcttcccataaactgtatgcactagtgccagcggaacaatgctcccatataattgactcataactgaaagaaactgactcttcgggttgaacgctgttatcaacaacaatatgtgatatagagacatgaatgtcgcttatctttgctccagttaatttgattttatagtacagttcattaattccaaatttatttgtacgataaaaggaaaaatcacatgtcaataattcattgtcgcaaattgctttgcctaataagggtgatgctttatctataggtttttttattgtcaaatgatgatggttgacgttttgatctcgatttaatccatgcatgaattcataaatcataatttgatcaatgtgtgctgtttgagctttatttccaatggatggttgtgatgaacaaccacttgaaatgagcccttgattatcaccatttagtgttaaataaattaaattcgccatttaaaactcctttgtattcatgaatgttattgaaattcaatgctttttttatcgtcggtatcgtattattcttcagcagcagccagcggcttaacacgccttcgagtcgctcattaatttgtttttccagcgcatctgtattctgcttctgcgcacgggcatcctggtactgcgtcaacagagactcaacgggtgtttcctgccccagtccccgctccgcctgccagatgacatttttgatataggaaagggttagtccctctttctcgcgctgcatcactagatctgcaaaagcatgtaagtcctggcgggtctgcaaccagccacgcaactgcgggctactctgtgcgcgggttttgagtgcctcattccattgtgtcgaggcctgttgctgttgcaggctttccggccagcgactgtcggcaacacgcatcatctgcatcccggtttccagcggctgtaccggggaggtatcaagaagttgttgcagcctgcgctcatagttttcgagttcaggtgaggccatccacaccgttgctgcgccctgagcggtgtcgttaacctgtaacagttgctgctgcaccggatagacctgccaccaccacaatgctgaggcgacagccactgaacaggcgatccctgcgataaaccctcttaccgtactgccttgctttatcacactggcctgtgggggattctctgtcagactgcgcacttccactttcatctcaggcaggccgggcaggggaggcactaccgcttctggtgtggaagatgcctgtgtttccggggcataaatcagcgttctgaccgtggtctgtgcggcgttctcagtgttactcttcagctggggttcaagccgtttacgcgtgttctgcataaaatagagcagattctccacgcgcggaacgcgcttcagttccacctgctggagcttatcgcagataagctgcaatgcccgctctgtgcggtagatcagtggtaggtcggattccgcaaaggagatttgctgacgcagaatattgccggttcgggagttaaaccagtccagcatttcagtacgcgccgggccgccntgcggccagaacttatcccagtcgtggcttaccattgccgccagcagttccgcaccttcgcagaatcccgccagtccctgtgtccgtgtccgggcaagcgtatagtaggtggcggtgtgtaaatccacaccgttggctttaaaaatcgccagcgccagcgactccaccagtttccagttcagctcaggctgtgacgggtggctggctttgtttatttcctcgcggatggcgctgaattccggcagcccgcgcgggtcactgccggtaacgatagtttgtgtcagtacgttactattcatccctgcctcctcagtacagtgtgtctgacagaccaaactggctgaacaacccaccgctgaacgggttatcttccgtgtcggtatgcacacggtaggtcatcgcgccaccgtccacgctaaagcgcacggtaaagttgccatcctgtactccggtcagttgtccggccccgaacaggcggaactgcgcccacggcccgctgaagctgatactgcgcggcgcgttgccgctggtgccgatgagcgtcagcttactttcgttgccttcgcgcatgttgttaggccagaccagatgggcggtatagttacggccctggctgtaatcgactaactgaccgtcaaggttcagtacactgcggcgtttattgcctgaaagcgataccgtttccacggcaaaggatgttcccagaccgttctgtttgctgaagaagatgtcacggattttctgcgcagtttccagttgcgcaataatatcttcgcgaataatgacgttgttatcgccatcctccagactcaggtcattatcgataaacagcttcaggttctgctggtagaaggtatccagtatgccatccggtttaaagaagcgttcgaaggcatccagtgaggcatcctgtgcagaacgcggattaaacggatagttatttgccagttgctcgttaaacggtttcaccacgctgtcgcgccagtccacttccatataatgtacagcctccaccatcaccacatgccaggcctggtcagtcagtctgccaacccagcggttgagcggagcaggcagcgtttttgccatctggcgggtggcgaatatcggatcgctgctgttctgatcaagccgtaactgcacggctttcagcgccgatttccctggtacaggcgcgttctggattgccagcaggtagcggtgcaactcggtgagttgctgatacacggcctgcatcgtgctttctttgtctttctgtactgccagggtaatgttttccggggcgaactcatgcccgagacgggtgagtaactggtagtccggctctgccagggcctcatcccgttctttggcagagagtttttcagaaaagacgcctggctgtgtgttgtcacgcagcacggtcagcgcccgctgcaaaggctggtcgccgctgataacctgctccagcgccccggtcagttgtccgatggactcaaaattgcggatattcagattgtccatcccggcccgccaggtggcggtgtagtcgctgatatactgctcggtgagctggcgctggatttccgcgcggtcggcgtcactgtatttcacgctgcgggtaaggttaagtacccaggaatccatcgccgtcagttcaaccagttcatcgcgctgttttacaaaatagctttgcaggccgtaacgggtaagaaactgtggaacaaccagtttgttgtcatcggcagatgtaaacacctggtcaaaggttggccctacctggtcacgcagattgaggtcggcaggaagaacgcccagcgcccgcgttttcaggctctggtaaacccgctggtagacaggcagtttgctcagttctttctgtgctgataccacgggcttgtcatatggcgtccagcggctgatggcgtcaccgtcgcccgcctgacgctctgcgtgccagtcagtatgagccagcgcgtagtcaagatgggacatcagttgtgcctggatatcgcgctggccgtggaacttttcgctccagcgttttgccatatactgcttcaccacctcattgttacgtccgcttttgtcctccagcattcgcatcacgcgcagcaccgcgagtttttcttcactctccggcggcgcggcattcatcgctttaaccagcccgttaaacagcgagggcaggtaacgttgctccagcagttgcagataggtctgttccacataaggtccgatacgtcgtccctggtacagtcccatatcggccagacggctgcggtcgccccagtcgccataggccagtgtggcatcgcgtaccgggttcagcagcggcagttgcaggttgccgtagtcatcttccccctgtggaggcggcacatccataaaggctttggcctgcttaagcacggtgatgccggactgatagttaccgttgtaatagtgatgccagccggtgatgagcagcagtgccgccacgccgccggtggnagagaaaaccgtcaggcggcgacgggaacgcatcagccaggcgcggctctccgttgccagattaggctctgcgagtaatgcctgcgggaacaagctgcgggtgaaataaggcgcggtgtccaccagaggccaggacgccagtgggttattgcccagtcggtactggcgggcggcagactgggtgaatatatcatccatctgcccgcgctgaagcgaagaggtgagatagacaccacgcagcatcacgttcatattttcaccgtcaagcagaccctcaagcagtgacaccagcggttcacggcttccctgcatctggcgggaaaaantgaataaagacgcgcgggtgtgagtctgggtgaccatcagatccggcaacgccagattcattcgatccacccatgtctgccagaaagcattcaactctgttcgccagtcatcattttcatgggcacggcgggtgaacgtgacgcccagaatcgcatcgcgatcctgtctgttcagggactggaacagggcggcaaaaccctgtaataaatcaagccgggtcagtaccacgtaaaccggtaactggcagtgaagatgctggcgtatatcctgtaagcggctgcgcagcgtctgtaacagatgctcgcggtggcgtttgtctgcggtcagcagatcgggtaaatcgagtgtcagaataatcccgttcagcggctggcgcgcgcgcttttctttcagccagccgagggcatgttcccacagacggcgatgcaggatatccgcatcagcgggagcgcagagtgtgccgtcgatatcaaagatcaccgcctgtttaccgacatggggcgtaaggtacaggcgttgttctgtgccgcgcgcgccctccggggcataaataatgtctgacggaaacccctcgcgcagcagtgtcgttttgccactgcccgccgggccgatgaccatataccacggtaactgccacaggaaacggcggttgtcgagatggcgttgcaggcgcagcagccagcggtcaaggtaacgctgctgggcgttcagctccacactgagcggatcaatggcctcttcgcgctgctgtttttgctgtttttcaagcagttgcaggcgcttcattacccggacggtaagccacaccagggcaataatcccccacgccgccgttgccagccagcggttcgccagtggtttgagccactgttcttcatacagcgtccacgtcgggcctttccaccagatccataccagcagaaaaatccacgccagta

SEQ ID NO: 57 - DNA, 6876 bp, Escherichia coli
  Strain O55:H7
  modified_base (4212)..(4212): a, c, g or t
aaaatccacgccagtatcagcagccagaaagcggagactttaaaccggggcatcgccggtcgcagggctgatttgagtccgctgagtagtcggggtgttggtaatctgaacacaaaaactcctgttctcttttattgttctgccgtgaatttttgttcaagctgcgtaagtaatgatggctcccagtcagacaccatcatctgactccctatcatcaacaacatccggtactgttgctgcgcaagctgtatcagccccgcctcctccgtcaactgtgcggcaaggtactggcggtgaaactgatcgcggggatcgccttcgggtagcatgtccagatatcgcagcgccgcctccagaccctgcccagcaaaacaggctctggctgcctgcgattcctcaccgatttgcgcaaccggtgcaactttgccgtcgggcgaagcagccagccattgtttcgtctgctcactgagaaacggtgtgcggtcattaaacagcagcccggtaagctggggcagacgctcaaggaagcggatgacctcatcgcggatggtgtctgccacctgtttgtaacccagacgcagtgccgtctgtgcagaaagacagtgaccgtccagccagtaaggagccagcaatacgcttttctcaacctgttgccacagcgccatatccgcgctggcaagccgggactggtaatccgccaccatatcggcagagaccgcagccagtggggtacgtccatcgctttccgcctggggtgtactggtgatggattgccacagggcatggcggcgcaggcgatagccctgcggcgagtccggctggcgttcacataaaatagccgccacttttaacagcgtgtcgcgccaggctttgtcgtcgtgactgtcgatggcgatttggggagccggagcactgggttgcgtcacgccgctttcagacgtgacggtggtttgtggtgaactaccggaggccgccggagtggggaccggagcaggagccgcacgattaaacgtacgctggtacagggcaaaaagatcatcggtagcctgtgccagttccgggacgttatgtgactgccagcactgcgccagtttcgccagctcacccagcagagtatcgcgctgcgttgtggcagcgttttgtgaaaagccttcaataccgtttcaaaacgtttaatgatctggctggcaaagcgttttttatgcgccatattctgcggcgcggccacagtccagtaatgttccacgtatagcgttagcaggtgcagtgccagcagtggatcaccggcatgttgcagggttctgagcaggtgtgccagtagcctgaagtctttgctttcagaagccagaagctgtagccccctgcgttgtagttcgggaatatcaagctgagcgtgggccagagaccccagcttgacgatttcgccgtcgatatactcccagtccgggttgtcatctttcagcgccgatgccagtttttcttccggcaggttttccagcaggtgcgatatccagacattcggatcgcgtaagtccattgccatatttttattctcccgcccagtggcaggcatcgcgcaggggggcaatcgcccttgccagcccgtcaatgttaaaggtcagctttcctgcggcgttatctgcgccggtatccactgtcagcgtttttgcgccgaacagttgcttaatttcatcaatcccggacagcccccggctggactccagcagggtgccgttctcgcgcacaaaccagtggctgcgcaatgcccggctgtcggcattcagagtgacggcgatatcatggacatccagagggtgcatcagcgccacctgcatccgggtgatattgtccacgcaactgaacatcagcaccgggcgcggcggaacatggccgatagccggggtggttatcaccaccgtcgggcgctcccccggcacctgcgtcaccagcagttctgtggtgttgccctcgcggcgtttttcctgctctgtggcgcgggtccaggcctcgcccacaaaaccggctttgaccagcgccccgtcaaaccctgacggggacagcggtgccagcaggtggtcatagcagtcaagccgctccagcgccgcggactcccgccgacaggactgcatggcctgtaacgtggctgtcgcatccggcggggtcgtggtggcgacggcgaccgccacaccggccattgacgatgcttctgcgggcgcggcagtggcgggtaagcccgtcatcaggcccgcgataaaccatcctgtctgccggaaaacgcgcaacctgctcataaaaccgtttcatcctttgtgacggactcgtcgttctgagcatcttccacgtctgccgtaaatgcgccgtccactgccgacaaccgaatccgggcaatcgccgtgttagccgccattttctgcaacagcagcagcgagagcggcggtagcatgtcgccatcgatgacagattccagcatcctcgcgccgttttccgcgcgggtgacgcggctcatgatttcgtccgtcacttccggttcaatgaccacttctgcaccaaagcgactgcgcagcacgttatccagacgggccagtttcccggcgataatggtggcgagcgtctctttcgacagcggcaggtacggcaccacctccattcgcgccagcagggcaggtttaaagaagtccgccagcaccggatagagggcttcctgcatggtttccgggtcatccgcgtgttcgacaatcacctggtaaccgaggttggaggtgaggaagaagacgatgtttttacagtcaatcaggcggccttcgccgtcggccatctcgcccttgtcaaacgcctggtagaacaggttgaggacatccgggtgcgctttttccacttcatcgagcagcaccaccgagtagggtttctggcggatggcttcagtcagcacgccgccttcgccatagccgacatagcccggaggggagccaatcagccgcgaaacggtgtgtttctcctggaactcggacatattgatggtggtcaggtactggcgaccgccgtagagcagctctgccagttgcaggacggtttcggttttacccacgcagctggggccagcgagcaggaacgcaccgagcgggcgtcccggacgacgcaggtcggcgcgtgcggtcagtagatgcttatgcaggctggcaatcgccaggtcctggcctttgatggtgtcgcccagccatttcggcaggtcggtgatgaccgacatttcattctgcgacaggcggttgagcggcacgccggtccattcggcaatcaccgccgcaatctgttttttatcgacgtgcggggagaccagcaaccggtcgttatgcagggcgtccagttcggcagtgagctgggccagccgctgtaccggggaaactgtttcagcggtctcttccggctgttctctgtcggtctcatcagccggtacggcaccggtattatcctgttctgactctgactctgactctggctgcgtatcctccacagtatctgcgtccggcaacggcgccgcatcgtcctctgccacgcccagtaactgctggcgcagcgcgataatctcccggaccagcgtctgctgctggtgccaagccgcttccagttcatccagcgccgtcagcgtttcatcatactgcaccagcacctcggtcatccgtgatgtgtcggtacgcagtccgatgcgaagctcgcgctcaagctggcgaatttccgcctcctgctggtggctcagagtggtcagcgccgagatttgcttcggcggcgacgacaggttgatggccacacgggcgcaggcggtatccagcacatcaatcgctttgtccggtaactgacgcccggagagataacgttcgctcagcgttgctgcggcctgcaaggcatcatcgtcaatcagcacgccgtgagaccgttcatagaccgccgacagaccacgcagaataattgtggcttcggcagcgttgggttcgctgaccttcactaactggaagcggcgcgacagggcggcgtctttctcgaagtattttttgtactcgctccaggtggtggcggcgatggttttcagttcgccacgcgccagcgccggtttcagcaggttggagatatccagcccgccctgctggttgcccgcgccaatcagggtatgcgcttcgtcgataaacagaatgaccggcaccggagaggaaatgacctccnccatcagccccttgaagcgtttttcaaactcacccttcaccgatgccccggcctgcaatgcgcccaggtcaagggtcatgatatcggtgtttttcagtttgtccggcacctggcctgccacgatgcgcagcgccagcccttcaatcagcgcgcttttacccacgcctgcttcgcccaccaccaccgggttgtttttacggcggcggcagagaatgtcgatcatcaggtcgatttcgtggtcgcggcacagtactgggtctagcctgccgttacgggcgtcttctgtcatgtttttggcgtagcgggcaagcagggtgtcagaggcgtccgtcagtgtgcctgcgcctttaccgtctgcatccggcacgactgattccgccgactcctgtgtccactgcacaaagtcctgttgcagacggtcacggttaatgccggtcaacagccgggcggcagcaggcggtatataacgcagcggcgaatgcagcaaggccagcagcaacacgccgccgcgcagttcgctgtgctgcatctcagccgacgccagcagccagccctctttaagccactcaaccagcatcggggaaaacgccgggtagctgtccgcagaacgggcggttgtgtagttctctaccgtcaacgcctggcgcaactcttccatgccaatatcgccctggcgggtaataacccgcaggtcactgcgtggcatggcgagcatctgaataagcacatggctgacggtaatttccgctgcctgctggctcatacattctgaggcggccatctccagcgcctggcgggagaacaggttcagccgttttaccagcgtgggaagatcaatctggatcataaacgtccttatcgaagtaatttgtttagctggtgcaggatgtcctgcgtctggctgtccagccgcaacagatagaacaggtaaaacaacgccagcacgacaacgccaccacaaaaaatatgtttaacagtcaggcgactgatgagctgataacgcccgccctgggtttttttgtcctggtgtaacagcgggaaaggggcatcgccgcgcagtttatgcagaacgtggtacagacggcggtagatctgctcaaattccccctgatcctgtactgccactttgtagcgcccgcgaaatcccagagaaaaacagagccagagaaattccagcagatcctggtaacgtttgggttcacggatcaggcgctccagcaggatgaaaactttctcgccaccccaggcttcgttgtggaaatggaccagcaatgactgcttgatccactcgttcttgttcgaccagccgttaccgagcgccgcttcatcaataaacgtgcagaggatgtagcgaaacgagataatcacgcccggttcgtagccctgttcctgaagcagttgctccacggcctgaacatctgtcaccacctgagcaaaaagatgctccggcatcgtctggctgttcatggtggaaaggcgcattaccataccgagtagcggcgtcgccgcgtcgatcatcggattcaggctgttgccacgaagcgcgagatggtagtcgcgcaggcttttttcgtcgtatccggtaaatggtggcagagacagtgacccctcatccatcgtcttaccctcttatcgcccacagttgcatgttcagatccgggaaactgccggatacatgcagtgcaacggccccggcggcagccatttctgtccaggcctggccgctcttgtcgagttcgaaatagctgaacccggaatggtagggaagctggcggggggccaccatcagtgcgcgcagaggaatacccgggatctgcacactgaccatattgcggattttttccggcgaggaaattttcgactgctggataaactgacgctggatctgatcgacaggcatatttgctgccacggccagtacaaaggtggcagactgtagcagttccgagtcatgaacatcggcctgccagatgccgtcacgcagatgcagcggcagattgaccgctcttggcgacagtacggtatgcagcgcccgtttgacttccggtaacagtgttttaaatgttttggtcaggtcatgatgatcatacacatcaagcgggcagggcaggcgtgacggctctgtaaaggtcatcagttcacccagcaacccggcaagatcaaggtagaaatcttccgggtggagctgggatcggcgggcgcgatgggtaaaccgggtctggttacggttaagcaactgcaacatcataaattccgccacatccgcgatgccgctctgcgccggagagccaatacggtttgccagatcgcttgcccgtccgccaatggccccctgtacctctttgagataaacacgcagtttcttactgacctgaatattctggcaggaggggataaaatcgtcatccagcgtcagggagccgtcggcatggcgatcgctgatacggcaaagcgggagcgtaatataggcactcatatcttctgcaccgctcataatgcgcggcgtcagttgtcccagcgtcagtgttcgcgcgtcgccttcttctgaatgcagatcccggacatcggcataattcagccggtaacgcccgattcgccgcccgtcgctgatttcatttctcacatcactggcgaccggcagagcgaggtaaatattgcggcttc

SEQ ID NO: 58 - DNA, 12415 bp, Escherichia coli
  Strain O55:H7
  modified_base (3)..(3): a, c, g or t
  modified_base (992)..(995): a, c, g or t
  modified_base (4944)..(4944): a, c, g or t
  modified_base (5476)..(5477): a, c, g or t
  modified_base (5480)..(5481): a, c, g or t
  modified_base (5483)..(5483): a, c, g or t
  modified_base (5489)..(5490): a, c, g or t
  modified_base (5492)..(5494): a, c, g or t
  modified_base (6224)..(6225): a, c, g or t
  modified_base (10430)..(10430): a, c, g or t
  modified_base (12025)..(12025): a, c, g or t
  modified_base (12080)..(12081): a, c, g or t
aanattttgcgggtacagcggatcgggcagtgcgtcctggtcggggatagaaaagacggtgccgtcaggcagtgtgcctgacgcgctgtcaatcatgatcttaccctgcgccagcagttcattgttgagggtgagttcggtaaatccccaggataaatcattcatggcccggaaacgctggttatccaggtagtcgttgtaacgctgctgttgctggaaatggtgtgggcgcatcagcatcccttcctgccacatcaccttgttgcgggtggttgccataattattcatcctcttttttcatttcgatgctgctttgacgtacatgcaccagcaggcggtaatggtggccggttccttccaccgtctcgatttgtttccattcagtggtctggtcatcggagaaataggccacgacaccaataaactgcgttttctcatccagctttatcggcggcagggttttgatggtgtccggcaacaggttgaaatcctggtggtcgatatagtttttacccagcacatccggtagcggcgtactggctatctggtcatagtcggctgcctgcaattttgagtcgtcagtcaggtacaccagttgcacatccacggcggctgattcaccctccgcattggtattggtgtccggttcagtcagcagggtgacggttatttccgaaggttgctccttcaggctcccgacctggatatccgggtttttgatcacctcgctgatttttttcgccgtttcgcagccggttaatatgacgcacatcagcacgcaggccagaaacgccttcctgttcatgcttccggctcccgctgtttttcacgaagcacccggtcatagacctgggcgtagacctcgttaaacagcatctcaaacccctgctggcgatcggaggccagttcttcgtaataatggctgtacatttgccatgctccggcatcatccagcggctggcgcagttcatggctgcggcggtactgcacnnnncggcgcagcagattttgtggtgagaaagcatccagcaggacacgaagcgactccacaatcgccgcccggttagcttcttcgtggtggcggacattgcgcaggctttcactgacggcggcgggagccgccagatgtaccgggcttttaccttcggcaaacatcacgtcgagcgcggtggcgtaatccatgttcaggcgcagcgggttatcttccagcgggcgcaaatgtttgtctgagaggctgttacgctgctgctgcaaatcgagcagaccttttattgcggcctgtaacgttcgtccggcctcctccagaaaatcatccgcatcgtcggaattgctcacggtaagcgagccgccaagaccgcgcagtaagggggggaccgcaaggtggcgttgcgccatttctgccgcagagatgtcatcattatgatcgccagggctggcataaatgggcggcagatccataaacggagtattgatccccccattacttgccggatcggacagcggtgccgatggccggacagccgcaatgcctgaaagcggatcgcccgtggtaatcaggctttcggactgaagtgcctggagtggatcggcagaaaaaccatttaccacggtgtctgcaagctggtgccggtgagtcattcccggatagtgtggcgcaccctccgttgatagcagggtatccgtgagcatatcgcgattggtaacgatggtttcgggagtggccatttcctcatcgtaatggggaatatctccccggttcagatgaaccctcaccatcagccgtccgatctggatctcatcgccctggcgcaactgtatcaggtctgatgttgctgtgacttttgcctgattcagccacagttgtgccgtctgcgggcgtagacaaaatgtgccatcgtgcaggataacggtaaaagcctgggccggaatgctctgctgacgatcctgtaccgaccagtggcattcgggggcatggccgacatttccctgctgtgtgaacagacagcgcgcsgcccgcccgctttccagctcactgccgttaatgacctgcaatgaaagcgtctgtagtttctcttccggcatattctgctccgtgattatcataatttacgaccgtaccctgatggtgactgagggtcgttcttccggtgtgccgaggaagctggtccagcccagcagcgcacttttgttatcgcccaggcgcattgcgcccacctgctccggcgccagccccagatgtaagtcccaggcaagctgatcgcgcaggatgaaggacacgaacgtcgtcagtggcaggaagttttcgccggacggcagaaaagagaggaactgttttcgggttaggctggtaatactgagctggaattttccgctgagatcgggtactcgtgtacccagaacaaagttgcccagtaccgatcttcccgccagtttttcgccatttttaagagaatagctccccaggctgttttgctgatccggttcaatatccaccttgcgacgttgccagttttgcagcgtcacttctgacaaatcaaagcagtgggacaccaggccacagataatttccggggatcgtcccggatttgccaggatcccggaatacgccagcattttgctgtgattaatcgccagcttatcgcgaagctggcggtggcccagcccgacaagggagtacatgcgctgcgagaacgcatccacaccgccgttacgaaaactgatgtgatagcggtacttacgccagatatgccagacaaactgggtcaggcggtggctgaacatatccagaaaatcacctaccggactttgttcatgtaccgctttccaggccaggtgatcgaggtaataaccggggagaggcgactggctcccctgtaaccccataaaggtagtggtcatcctgaatgcccctgacgtatcccgtttcagcgcactgatatcactgcacgggaaggcaaggctggcatcggcgctgaaacgcagggtttcctgtgccggatcgtcgcgcagggataattctggcgtccccttttcaccctttgccaggcggtgcaacagctccgccatcgcaaaaaaattgtaagagcaggcattatggaaaacctgtgccagcggatcattctgctctttatctgccgggggatttcccggactcagataagaggatgctgcccgattctttccgtccatttccatgtctcctggctttctgtgttcacaacggtcagcatgtggaatgagttaacgctggcgtacagcgacagaaaatgcgaaagcaccgtaccgagcagatacatttccccttcacagacaaacggctccgggtgcagatacagcgtggaggccagtccccggacgggaatacccgtaaacaggcgatcaacggggcgggtctccagacgctcaatggcatccagcttttgttgtgacagccgcgccgtctgcggatggtggattgcgtggcgatcaaagttggcgatgacctgcttcagcgcgtccgtatccagtaatgacagataattcaggttcatggcggagagcagggaccagtgcaggctgccatcaatgaccggccagagtggttgcgtcgggcgggtaatgttgcgaaaggaagcaacagccgcatttttaccggttgtgccggtgatatcgccggaacgaatttgtgacggaagctcacggttggtacaggtcagcgataccgaaaccacttcattactgagcagagattcgtctgacggataactgccatcagcatgtataaaggcaagggtatgatcaaagccgcgatggaacagggatgttttggtccggtgatgccagtacaccacttcccgcttccggctgtattccatctgatggctgaaactttcaaaggctggccactggcgcgcggcctgcgtcgaaacaggacgccccagatcttttttcctgaacatatcctggacctggctcaccacactgttaacggaaaatacatcgtaatgttgtgggtaatggcggctgggaaccagcggatagtctgcccgccggttgtccagcgtgatggcttctgcatggtggataaataaattaatggcaggtgcgcaatacaggcgcagggaatcgcggcgcagccggatgtccacgggcaaagggcgcgaaaaacgcagttgcagggtaaagaattccgcctgcaatccgtcaggcaaagccggacaaccacaaagatcaaaaaagagaaacgcatcggggtaacagaaatactcctgaaggatccggtagccgctgtggacgtttttcggccagggcagcatggcatcctgcggctcaaaaccgacagcttttagcataaactcaggcaggcgaatatgctgttcacccacagtcaggtcggcaccctgcaagtattcgcagaaccataaataaagctggtcacgggtatagttgtcgtcattgccgagccagaagcgaagtttgttcagatccagcgtgcggaagtccgttcccggtgcgaccgaaaaggtgatgttgataacaccattacgggtcgtactgcggttttcaatctgctccaggcgaacgggcagcagccagatatcccggcagagggtgaaggtacagggaggcggctcctcctttttagcatcagagggcagcacttcatcaactctgatttccccggcgttggttgtaaactgctcattacgggggattaacaccggtacagaagacttatccatatccggcgtatattcaataagggtcattgccggaaccggacgcaggtaattaggccatagcatcttaataagcccgtgcgtcagttctgggaattcatcctcaattttctggcggagattgccggtaagaaaagccaccccttccagcaggcgttcaatatccggatccgcatctttttcggccaggaagcgggccagatggggtttttccgttgccagcancttgctaagctggcgcaggtaatcgagttcttcccgaaaatagcgttcttcaaattccatttgtcagtccacccggtaatgctggctgccattcggtgccatatcaaattcaagcacctcatgcgtttcgttaaatgtcacccaggctgtaatatgaaacgtcatatccagcgggctggaggcggatgaaaccactgcctgcacttcagcgtgtgagatccggggttcatagcgttctatacattgctcgatggcccgactcatgaattcgcggaagttttcagccccttccggttcatcaatgcccagctcaggcgcaccccggcaactaccggaccgggtattaagaatgtttcttaggttctggcgaatggattgcctgagcgaatgaatactgcctccctgccggtttctggccgaagaggcttccatacgctcaaaaagagaacctgtggttctttcccgatccggtatcatggtgtgttactccctgtctaaccggccaaccagggaaagctcaaaatttgccccnntanntntaaaannannnctcacgcttagcgcaacctggtaccagccgggttcgccttctacatccataacctcaactttggcagcgcgcagaggtttgcggctgcgcacgtctgcaggcgggttttcctggtcggcaacatactgacggatccaggtattaagctctctttctaagtcgctcctttctttccatgaccccagttgttcacgctgcaacaccttgatgtagtgcgctaaccgattgatgatgaagagataaggaagctgcgtacccagcttatagttggtttctgcatcttttcccggaaagtgcttcggtttttgtaccgagtttgcagagaaaaaggctgcattatcagagtctttacgcatggtaagggtgataaaaccctcttcagccagttcaaattcgcggcgatcggtgaccagcacctcggttgggattttggcctgaatctgccccatcgtttcgaacagatgcaccggcagatctttcactgcgccgccgctttgcggaccgataatgtttggacactagcggtatttggcaaaactgtctgcgatattgcatgccagcatccaggccgtattaccccacagataatcttcgtggttctggctgacatcttcgtaatagttaaagttcttaacagggttatctgttggtgaatagggctggcgaagcaggaagcggggtgccgtaagccctaaatagcgcgaatcttccgagtcacgcatggcgcgcnntttggtgtaggccggaccttcaaagatggcataaagatctttgatattaggcagttcggtccacgagttcagccccataaactccggggaaaaggaggacaggaacggtgcgtgcgccattgcgcccacggcactgacgtattgcagcagtttcatgtcaggcgcggtatttttgaactcataagcgcccagcacggcagcgatgggttcaccgccaaactgtccgaaaccggacgaataaacgtgcttataaaatccggactgaataatttctggcgcaaactcaaagtcttccagaagttcctgcttggtgacatgaagcacgttgaccttgatgttttcacggaaatcaacgcgatccaccatggttttcagtgagcgccagaacgactcgacctgctgaaaggcaggcgcatggatgatgacatccatctggcggctgatgcgttcatcaatatctgcaatcatgctgtccacggccagtttattgaccggttcggcagatgcagtggattgcaggatgctggcaataaaggctgtcacaccctggcgggcaacgtcataaccttccgaaccgggctgaatacgggtctgtgccatgatttgatcaagcagcgacgattcctgctcaggctgcccggcatgactggaaacgagttcctcttcctgtaaagacatactgaaaatccttctgttttagctgtgtttctgaaaccggcttttcgccgtcagtgaagtacgcgctgccagtgcgacgcgctctgctgaaactcacaaaaatggataatctcatccaatagatcactgatacggcgatccagtgttgtaatcagcgcagccacaccatcctggttgatttcaacggacgggctgaaacatacctggtaaaccacctgcagaatgtctgcaacagagaggtggtatgtcccggagatatttttgtgtgccgtcatgcctggataaccctgtttaatgaaatagtggtggttatttattgctcacctggccgatttctttgagcaactgctcgcgggactcttcattttccagcaatgcctggagctgggtacggaatgccggaaggttacccatcggccccttcagtgcagtcagtgcttcacgcagttccagcaatttattcacttccggaacctgccgggccacgctatctggtgaaaaatcatccagtgacttgatattcagcgccacattcagttcatcgtccgttgtgcttcccttcagcgtggcggggacggtaaaattgaggccaatggctgcttcagccatcactgcaccgaaattgtgcttgttaacggaaactgcctgacgttcatccagtgaggatgtttcctgcgtatttccggtatcgccgacaacgagcatgttaagcggaagttccacttcagccgtctggccatctgtttttgggacatacgatatattaatacgttcgcgaggcgcgacgctgccttcaaattttttgctcataaaagtgatccgtcatgttatctcgtacaggccatgaacacggcatattcgtaccgcaaaaaatatcggaaatgccgtcttgatggcggtgaaaataaaatcaccactccttcatcaccccgcattttacgcttcaaaataaataagaaaaggactttttatcgatcgtaaagaggggtattctgcaagcgttaaatagattttatgaacctgtgtaattcgcgtcaggtgtattatggcaataatttaaatatagagttttttatgtatcttattgaattatataataattttattaaacataagctaatctaatgattgcttgtttatatatttgttttgtgattgattaagtgggtatttttaaggaatatctcaaaaattatcaaaatgataattcagaaaggataaatacaatatttattcatgattcagctttggccattttatggaggcaatacggactttgaacagttgggtatggttatccagatatatattattaagttattgctgaataagagatttaatgattttaaaaatagtttttacgacaaccgtaaattctagctcggtttgtatgtaaaaaatactgaaaaatgatgcggttccgtgaagtgagctgcatctgcctgtctgggattaacggcaggtcattgtaagtagtaattaaccacgttaacaaggagtttacaaatgccaacaccgtgttatatctccatcactggtcagacccagggaaatattactgcaggtgcatttaccgctgattctgtcggcaacatctatgtgcaggggcacgaagacgagatgctggtgcaggaattcctgcataacgttactgtcccgaccgatcctcagtccggtcagcctgcgggtcagcgtgctcacaagcctttcatttttaccgtggcgctgaacaaagcggttccgctgatgtacaacgcactggcctccggcgaaatgctgccaaccactgaacttcactggtggcgtacctctgtggaaggcaaacaggagcattatttcactacccgcctgactgattcgacgattgtcgatatgaaactgcatatgccgcattgccaggacccggcgaaacgcgagttcacccagttgctcgaagtttcactggcctaccgcaaaattgaatgggaacacgtcaaatctggcacctccggtgccgacgactggcgcgcaccgctggaagcataagttaagccaacagcatccggctatcaggccggatgctgtttttgtattacgccgtagaaagaaaggttgtcagtaagggggtacgttcacgggagatggcggctgccggaaacttcggcggtagcgtgcctgaacgcaagcgtagcactgtactgtcacagccgctttaacagcgaactgtctgtttttccttaaccccggaggttgctatgtcaaccggattacgtttcacgctggaagtggacggcctgccaccggatgcttttgcggtggtctcctttcatctgaaccagtcactctcttcgcttttttccctcgatctctctctggtcagccagcagtttctctcccttgaattccagcagatcctcgacaaaatggcctacctgacgatatggcagggcgatgacgtacagcgccgggtgaaaggtgtggtgacctggtttgaactgggggagaacgacaaaaaccagaagctgtacagcatgaaggtatgcccgccgctgtggcgcacagggctgcgccagaacttccgtatcttccagaatgaggacatcgcaagcatcctcggcacgatattgcaggaaaacggggtgaccgagtggagcccgctgttcagcgagccacatccttcccgtgagttttgtgtccagtacggtgagactgattacgatttcctgtgccggatggcggcggaggaaggcatcttcttttatgaggagcacgtgcaaaaaagtaccgaccagagcctggtcctgtgcgataccgtgcgttatctgccggagtcctttgagatcccctggaatccgaacacccgtaccgaggtaagcaccctctgcatcagccagtttcgctacagcgcacaaatccgcccttcttccgtggtgaccaaagactacacctttaaacgccccggctgggccggacgttttgaccaggaaggccagcaccaggattaccagcgcacacagtatgaagtgtatgactatcccggacgtttcaagggcgcccacgggcagaactttgcccgctggcagatggacggctggcgaaacaacgcagaagtggcgcgcggaacaagccgttcgccggagatatggccgggacggcgaattgtgctgacggggcatccgcaggcgaacctgaaccgggaatggcaggtggtggcaagtgaactgcacggtgagcagccgcaggcggtgccgggacgcaggggttcaggcaccacgctggataaccattttgcggtaataccggcagacagaacatggcgaccacagccgttgctgaaaccgctggtggacggcccgcagagcgccgtcgtgacgggaccggcaggcgaggaaatcttctgtgatgaacatggccgcgtgcgggtgaaatttaactgggaccgctataacccgtcaaaccaggacagttcatgctggatccgtgtggcacaggcgtgggcaggcaccgggtttggtaacctggcgataccgcgtgtgggtcaggaggtnattgtggacttcctcaacggcgatccggaccagccgatcattatggggcgtacctaccaccaggaaaaccgcacacccggtagcctgccggggacgaagacgcagatgaccattcgttcgaaaacctataagggcagcgggtttaatgaactgaagtttgacgatgcgacagggaaagaacaggtctacatccacgcgcagaagaacatgaacaccgaggtgctgaataaccgcaccacggatgtgataaacaaccatgccgaaaaaataggtaacaaccaggcgatcaccgttaccaataaccagatcctgaacattggcgttaatcagatacagacggttggtgtcaaccaggtggaaacggtaggcagtaaccagattatcaaagtgggatcaaaccaggttgaaaaggtggggatcattcgtgcgctgacggtgggtgtggcgtatcagacgacggtcggcggcattatgaatacctcggtggcgttgttgcagtcctcacaggtagggctgcataaatcactgatggtgggaatgggctacagcgtcaatgtagggaataacgtcaccttctcggtgggcaagacgatgaaggaaaacaccggacaaacagcagtttattctgccggtgagcatcttgaactctgctgtggtaaggcaaggctggtgctgacgaaggacggaagcatatttcttaatggtacgcacattcatctggaaggggagtcggatgtgaacggtgatgcgccggtgattaactggaactgtggtgccacacaacctgtaccggatgcgcctgtgccgaaagatttaccccccggaatgccggatatgcggcaattttgagtcaggtgcaaaaaatcaaaacggaactggtgcagtgaccagataaaccatattaaaagcagaaggaattgattcatgggaggaaaaccagcggcgcggcagggtgacatgacccgcaagggactggatattgtgcagggttcagcaggggtgctgataggtgcgccgacgggagtggcctgttcggtgtgtccgggagggattacctatgctaacccggtgaacccggtgctgggtgcgaaggtgctgccgggcgagacggaccttgcgctgcccggcccgctgccgtttattctttcccgcgcctacagcagctaccggaccagaacacccgcgccggtgggggtgtttggtcccggctggaaagcgcccttcgatatccgcttacagatacgcgatgaaggcctgatactcaacgacaacggcggcaggagcattcactttgagccgctgtttcccggcgagataagctacagccgcagcgagtcgttctggctggcgcggggcggggtggcggagcagcacagttcgcagccgctaagcgcgctctggcaggtgctgccggaagatgttcgcctgagtccgcatatgtacctggcgacaaacagccttcaggggccgtggtggatactcaactggccggagcgggtgccgggggcggacgaggtgctgccgccggagccgcccgcataccgggtgctgacgggcgtggtggatggcttcgggcggacgctggcctttcaccnggcggcggagggtgatgtggcgggcgcggtgacgggggtgacggacggcgcgggnngccgttttcacctggtgctgaccacacaggcacagcgggcggaagtattccgtaaacagcgcgccacgtctttatcttcccctgccggtccccgttctgcttcctcttctctggttttccccgacacgctgcccgccggtacagaatacggtgccgataacggtatccggctggaggcggtatggctgacacacgacccggcatacccggatgaactgcccgccgcgccgctggcgcgctacacgtacacggccagcggagaactgcgggcggtgtatgaccgcagcgggacgcaggtgcgcgggtttgcttatgatgcggagcacgccgggcg

SEQ ID NO: 59 - DNA, 2911 bp, Escherichia coli
  Strain O55:H7
  modified_base (396)..(399): a, c, g or t
  modified_base (401)..(401): a, c, g or t
  modified_base (403)..(406): a, c, g or t
  modified_base (1491)..(1493): a, c, g or t
  modified_base (1671)..(1671): a, c, g or t
  modified_base (1722)..(1722): a, c, g or t
  modified_base (1731)..(1731): a, c, g or t
  modified_base (1773)..(1773): a, c, g or t
  modified_base (1815)..(1815): a, c, g or t
  modified_base (1830)..(1830): a, c, g or t
  modified_base (1935)..(1935): a, c, g or t
  modified_base (2411)..(2411): a, c, g or t
  modified_base (2595)..(2595): a, c, g or t
caccattatgcgggtaggccggagagccgctaccggtatgatgataccggccgggtgacggagcaggtcaacccggaggggctggactaccgctttgagtacgggcaggaccgtgtgaccatcacggacagcctgaaccggcgggaggtgctgtacacggaaggcgagggtggcctgaaacgtgttgtgaagaaggaacatgcggacgggagcatcacccgcagcgagtatgatgaggcggggaggctgaaggcacagacggatgcggcgggacggcggacggagtacagcctgcatatggcgtcgggtgcggtgacagcggtgacggggccggacggcaggacggtgcggtatggctataacagccagcggcaggtgacgtcagtgacgtacccnnnngngnnnngcagcagccgggagtatgatgagaagggaaggctggcggcggagacctcgcgcagcggagagacgacgcggtacagctatgatgacccggcgagtgagctgccgacagggatacaggacgcgacgggcagtacaaaacagatggcatggagccgttacggtcagctgctgacctttacggactgctcggggtacacgacgcggtatgagtatgaccggtacggtcaacaaatcgccgttcaccgggaagaaggcatcagcacttacagcagttataacccgcgtggccaactggtcagtcagaaggatgcgcaggggcgtgaaacccgttatgagtacagcgccgcaggcgacctcaccgctatcgttgccccggacggcagccgcagtgagatacagtatgatgcgtggggaaaggccgtcagcaccacgcagggcggtctgacgcgcagcatggggtatgacgctgccgggcgcatcaccgtgctgaccaacgagaacggcagccagtccacgttccggtatgacccggtggacaggctgactgaacagcgcggttttgacggccggacgcaacgttaccactatgacctgaccggaaaactcacgcagagtgaagacgaggggcttatcaccctctggcactacgatgcgtcggaccgcatcacgcaccggacggtgaacggcgacccggcagagcagtggcagtatgatgagcacgggtggctaaccaccctcagccataccagtgaaggccaccgggtgtcggtccactacggctatgacgataaaggccgcctgacgggtgaacggcagacggtggagaacccggagacgggggagatgctgtgggagcatgagacggggcacgcgtacagcgaacaggggctggcgacccgtcaggagccggacggtctgccgccggtagagtggctgacgtatggcagcggttatcttgcggggatgaagctgggcggaacgccactggtcgagtacacgcgggaccggctgcaccgtgagacggcccgcagcttcggcggggaggcatatgaacttgccaccgcctggaataccagcggccagctnnngagcaggcacctgaaccttccgcagcttgaccgtgactacgactggaacgacaacggacagctaatccgcatcagcggcccgcaggagagccgggagtaccgttacagtgacacgggaaggctgacgggcgtccacaccacggcagcgaacctggatatcgatatcccgtatgcaacngacccggcaggaaaccggctgccggacccggaactgcayccggacagcacnctcacggcntggccggataaccgcatcgcggaagatgcgcactatgtctancgctacgatgaatacggcaggctggcggagaagacggaccgnatcccggaaggggtnatmcggatgcacgacgagcgcacccaccactatcactacgacagccagcaccgyctggtgttcyacacgcggatacagcacggcgaaccacaggtggagagccgntacctctatgacccgctgggccgccggacgggaaaacgggtgtggcggcgggagcgtgacctgacggggtggatgtcgctgtcgcgtaaaccggaggagacctggtacgggtgggacggygacaggctgacgacggtacagaccgacaccacgcgtatccagacggtgtaccagccgggragcttcacgccgctcctgagaatcgaaacagagaatggtgaacaggcgaaggcgcggcaccggagcctggcggaggtgttgcaggaggacacgggkgtgacgctaccggcggagctggcggtgatgctgggaaggctggagcgggarctgcggcagggcagcgtgagtgaagaaagccagcagtggcttgcgcagtgcgggctgacggcggagcagatggccgcgcagctggaggcggaatayatcccggagmggaaacttcatctttaccactgcgaccaccggggactgccgcnggcgctcatcagcccggaaggggaaacggcgtggcagggggagtatgacgagtggggaaacctgctgggcgaaaccagcgcgcagcaccttcaacagtcactccgtctgccgggacagcagtatgatgaggagtcggggctgtaytacaaccgcaaccggtactatgatccgttgcaggggagntatatcacccaggayccgatagggctggaggggggatggaacctgtatcagtacccactcaatcctattgaacatatagatccgttggggttagcacttgatttgaattattattctccgtcagatcctatatataaaggttctcttaatgtaagggaatttccaacgggttttacagttggaggtcatggttcgcctacatctatgagtgatgacagaatcaaaaaaggaagtgatctgacaataaaacaattagctagcgacataagagcgaatcctaaatatcatgaaggtatgcctgtagtcttgttttcct

SEQ ID NO: 60 - DNA, 1293 bp, Escherichia coli
  Strain O55:H7
  modified_base (355)..(356): a, c, g or t
  modified_base (358)..(360): a, c, g or t
  modified_base (364)..(365): a, c, g or t
ggaaaaggcaaaaattcatttgcacagaaactagctaacgaacttgatgctacagtgattgctcctgatgaaataatatggatttggccggatggaaactatgctattatggggcaaacagctaggataacaataggcggtaaggacaacggggtgtttgaattggtgccagacgagaaacaaccaggggactttcataagtttacacctacaggaagcaaatagtaatgaaagtatttacttttttgttgattatcatggtatgtctttataactttggagtgagggctgctatggataactcaaaacattctgatgaggcggaaaaattattggcggagctttctgctagaanngnnnaagnngaaggtgaaccaaaatcaacagtaagcgtcttttatttgcagccagaagaagtaaatactttatcacaccaggcaaaacgaggcgatggcgaggcgggttttaggttgttcttgtactacaagttgtccaattatgatgaagaaaaaagtagtcagtggttaaaaatagcggctaataatggtcatgcgacagctcagtatcggttatatgtagagttacaagaacaaggtgaaaccaaggaagctaatgaatggttacaaaaaattaaattggctgccagtaataatgacagttcagcaatatggttcttggtgaattgttataaaaaccagggaaataaaaaagaagcattgcaatgggcatataaactcaaagcgagtaaacagccgcttgatgcagatcgactaattgaagaattaacgaaagaacaaaagtagctttaaacaggtaacagaaaaatggagagtagaaaaactttaccagtcgctacaacacctacacacaaaattacgtttacgacgactgcaacaagctcatcaaagcgcaagttgaaaccaaaactggcatcttcgtcgccggttatcattacgatgtacttggcagatgcatcaaaagtcgcaagagaaaagatgaaaatatagctttttgtatcattaagtatgtggccagcacatgactcggcatagatcttatgactaagattctacaccccaaacctaagtatgggccaaagaagccgtttggttcattttttatatctccagcattttagtggatggagcttatgaaaataataaggttattattgctggcttgttcgataaccattcatttttttattgtaaaagaacatgtatttaaaatattcaatcaacatgcttattattttttgtttgctttttatgttttgatagcgttctgtttttt

SEQ ID NO: 61 - DNA, 1900 bp, Escherichia coli
  Strain O55:H7
  modified_base (1512)..(1512): a, c, g or t
  modified_base (1839)..(1839): a, c, g or t
  modified_base (1851)..(1851): a, c, g or t
  modified_base (1895)..(1896): a, c, g or t
gatcttttattgttgatttaatagcttgtataataattccttatatttcttctgtcataagtttcttgtttttgtccatgttaatatctcctcacctcagggaaagatcacctaacgccgcttttttgtactaaataattcgcactaaatgttcaataattgagatgttccttattatctaaaactgtttttcacagcttacatatgatcaaatactccttgcataaataaggagaacaaaatggaacttaaaaaattgatggaacatatttctattatccccgattacagacaagcctggaaagtagaacataaattgtcagatattctactgttgactatttgtgccgtcatttctggtgcagaaggttgggaagatatagaggattttggtgaaacgcatctcgattttttgaggcaatatggtgattttgaaaatggtattcctgtccacgataccattgccagagttgtatcctgtatcagtcctgcaaaatttcatgagtgctttattaactggatgcgtgactgccattcttcagatgataaagacgtcattgcaattgatggaaaaacgctccggcactcttatgacaagagtcgccgcaggggagcgattcatgtcattagtgcgttctcaacaatgcacagtctggtcatcggacagatcaagacggatgagaaatctaatgagattacagctccccctgaacttcttaacatactggatattaaaggaaaaatcatcacaactgatgcgatgggttgccagaaagatattgcagagaagatacaaaaacagggaggtgattatttattcgcggtaaaaggaaaccaggggcggctaaataaagcctttgaggaaaaatttccgctgaaagaattaaataatccagagcatgacagttacgcaattagtgaaaagagtcacggcagagaagaaatccgtcttcatattgtttgcgaagtccctgatgaacttattgatttcacgtttgaatggaaagggctgaagaaattatgcgtggcagtctcctttcggtccataatagcagaacaaaagaaagagccaaaaatgacggtcagatattatatcagttctgctgatttaaccgcagggaagttcgccacagcaatccgaaaccactggcacgtggagaataagctgcactggcgtctggacgtggtaatgaatgaagacgactgcaaaataagaagaggaaatgcagcagaattattttcagggatacggcacattgctattaatattttgacgaatgataaggtattcaaggcagggttaagacgtaagatgcgaaaagcagccatggacagaaactatctggcgtcagtccttgcggggagcgggctttcgtaatcttgccctggctgcaccgtgagacggcccgcagcttcggcggggcgggcagtacagcggggtacgaacaggtcacggcgtacaccctcacagggcagctacagagcaggcacctgaacctcccgcagcttgancgtgactacgactggaacgacaacggacagctaatccgcatcagcggcccgcaggagagccgggagtaccgttacagcgacacgggaaggctgacgggcgtccacaccacggcagcgaacctggatatcgatatcccgtatgcaacggacccggcaggaaaccggctgccggacccggaactgcatccggacagcacgctcacggcgtggccggataaccgcatcgcggaagatgcgcactatgtctaccgctacgatgaatacggcaggctgacggagaagacggaccgcattccggaaggggttatccggatgcacgacgagcgnacccaccactancactacgacagccagcaccgcctggtgttccacacgcggatacnntacg

SEQ ID NO: 62 - DNA, 4542 bp, Escherichia coli
  Strain O55:H7
  modified_base (13)..(13): a, c, g or t
  modified_base (243)..(243): a, c, g or t
  modified_base (1795)..(1795): a, c, g or t
  modified_base (3584)..(3585): a, c, g or t
ggtggagagccgntacctctatgacccgctgggccgccggacgggaaaacgggtgtggcggcgggagcgtgacctgacggggtggatgtcgctgtcgcgtaaaccggaggtgacctggtacgggtgggacggcgacaggctgacgacggtacagaccggcaccacacgtatccagacggtataccagccggggagcttcacaccgctcatccgcatcgaaacggagaacggcgagcgggaganagcgcagcgccgcagcctggcggagaaactccagcaggaagggagtgaggacggtcacggtgtggtgttcccggcagaactggtgaggatgctggacaggctggaggaagaaatccgggcagaccgcgtgagcagtgaaagccgggcgtggcttgcgcagtgcggactgacggtggagcaactggaaaaacaggtggagccggaatacacgccggcgcgcacgttgcatctgtaccactgtgaccaccggggactgccgctggcgcttatcagcgaagacggcaatacggcgtggagcgcggaatatgatgaatggggcaaccagcttaatgaggagaacccgcatcacctgcaccagccgtaccgtctgccgggccagcagcatgatgaggagtcggggctgtactataaccgtcaccggtactacgatccgttgcaggggcggtatatcaccccggacccgattgggttgagaggtggatggaatatgtatcagtatccgttgaatcccatacaagtgatagacccaatggggttagatgcgattgagaatatgacatcaggtggactaatttatgccgtatctggtgtacctggattgattgttgcaaacagcattactaacagtgcttaccagttcggttatgatatggatgctattgttggcggagctcataatggggccgccgatgcaatgagatattgttacttgatgtgtcgaatgactaagacatttggatcaacaatagctgacgtgataggtaaaaatcatgaggcggctggggatagacaaggtcagccagctaaagaaagaatcatggatcttaaaaataacactgtcggtattgcttgtggcgatttttctgccaaatgtagcgatgcatgtattgaaaaatataacattgggcaactcttcgggttagatggtataaaagcagataatccaataaaagcaaagcaagggagttcagatgcttcaaattattagaggcaaacttgtcatttttttaattaccctttgtttatttgttgtttaccttgggtttgataacaattcaaattctgacatcgtattttatggacataaaacaccaaagagcgttgagatatatctttctgaaaaaatattatttataaaataattaatgaccaaaaaattagtagagggaatggtcattttataagtataatggttaataattacaagacgcactgtggagtggttgatataaatcttaattttttcaatgatattctttatagcgtgcgattaaaaaacattagtaaactggagaatatggagttctgcgctacaaaacaacgggtgtattttagtgataaaaacaagaaggctagttataaaataattaattatggagactattatgatgttgattattatgataacaatttgaaaaatgaagtttttgactggattggtaaatggtcataatgaacaacaccagaaagagaaaaatataaaatacatacagaaagacatgagagcaagggacggggcagggcaagatcatgaaaatcgtgatgtaaatcncgattttcatcctggctttaacgcctacaggtgatcaaaatttaacctttggaataactaaaaagataaaaaggacgccaggtgagtattcaaagtttgcttgattatatttcagtgatccctgatatacgacaacaaggaaaggttaaacataaattatctgatattttgtttctcaccgtatgtgcagtaattgcaggtgccgatgagtggcaggaaattgaagattttggacatgaaagacttgaatggctaaagaaatatggtgattttgataatggcattccggtcgatgacaccattgcacgcgttgtgagtaacattgacagtttggcctttgaaaagatatttattgaatggatgcaggagtgccatgaaatcactgatggtgaaattatagcaatagatggaaagaccataagaggctcctttgataagggaaaaagaaaaggagcaatccatatggtgagtgcattctcgaacgaaaatggtgttgtactggggcaggtaaaaacggaagccaaaagtaatgagattacagccattccagagttgcttaacctactggatttaaataaaaatttgataaccattgatgctatgggctgtcagaaagatatcgcttcgaagatcaaagataaaaaagcagattatcttctggcagtaaaaggcaatcaggggaaattacatcatgcattcgaggaaaaatttcctgtaaatgtgttttctaattataaaggcgattcgtttagtacgcaggagataagtcatggaagaaaagaaacacgtttgcatattgtcagtaacgtaacgcctgaattttgtgattttgaattcgaatggaagggattaaaaaagctttgtgtagcattgtcattcaggcagaagaaagaagataaatcagcagaaggtgtaagcatccgatattatatttcatcaaaggatatggatgctaaagaatttgcacatgctatcagagcgcactggctgatcgagcacagtcttcattgggtgttagatgtaaaaatgaatgaagatgccagccggataagaagaggaaacgcagccgaaataatatctggaataaagaagatggcactgaatttattaagagattgcaaagacattaagggtggggtgaagaggaaaagaaagaaggttgcgttaaacacatgttatatagaagaagtgcttgcatcctgctcagagcttgggtttcgaactgacaaaatgaaaaatttaacacagatttaattcatgctcttgccctgcggggggattattaaatcttcccagttttttattatttaactctcgctcagcacactaaacatccctttctgaattccccgccctaaatacagcccccactcaccgcaacctaaactcatccgcatcccgccatgccggaaacttttctctatattcccgcaatgccaccatcgacagctccgcatcaatgcgcgttgcctgatgcgcgtcggcagtagcgataatctcgccttgtggattaatcacccggctgtcaccgcgataatggcagccgttgccatcgctgccgacgcgattgcatcccgccacatacgcctgattctcaatcgcgcgggccgtcagcaatgcctgccagtgcagagagcgcggagcaggccagttggcaacgtagatggcgaggtcataatcgttgagattgcgcgaccacaccggaaaacgtaagtcgtagcacaccaacggcaaaatacgccagccgcgccattccacaatcactcgcgcattgcccgctttataatgnngatgctcatctgccatgcggaacagatgacgcttatcataaaaatgtaccgtgccgcccggctcaaccagcaaaaagcggttaaccgaaccagactccgtttgtaatgcaacactgcctgcaatcagcgcattgcactgctgcgctttggctgtcatccagttcactacgtcatcttgtgctagcgacgaagcagccgcttccatggcaaagccgctggtaaacatctccggtagaacgatcacatcgcgcccggtaataccttccagttgacgatcaaaatgacgcaggttggcaggaccatccatccacaccagtggttgctgcaaaagcgtaatcttcaaaccaggcacggtgtacaactcctttatgcgaagggttttataactttaacaccttatcaggcagttgccttagcgcagaataaattgataacaaatgctgatattggaaatatctgatttgcaaattatcgtgttatcgccaggctttaggaggttaataacatgggcaggataagctcgggaggaatgatgtttaaggcaataacgacagtcgccgcactggtcatcgccaccagtgcaatggcgcaggatgatttaaccattagcagccttgcaaagggcgaaaccaccaaagctgcatttaatcagatggtgcaagggcataagctgcctgcctgggtgatgaaaggcggtacttatacccctgcacaaaccgtaacgttgggagatgagacgtatcaggtgatgagcgcgtgcaaaccgcatgactgtggctcgcaacgtatcgctgtgatgtggtccgagaaatctaatcagatgacggggctgttctcgactattgatgagaaaacgtcgcaagagaaactgacctggttgaatgtgaacgatgcgctttcgattgatggtaaaacggtgctgttcgcggcgttgaccggcagcctggaaaaccatcc

SEQ ID NO: 63 - DNA, 3873 bp, Escherichia coli
  Strain O55:H7
aaataattagcggataaagaaacggagcctttcggctccgttattcaattacgcggcttcaactttccgcactttctccggcaactttaccggcttcgtcgccagctcttccggatcaaagtcatcaacgttaatactgcgcagacggctttcttccgctttcaccagaatagcggcttcatctttatcaatcagccccttcgccagcgcgttgtgcgccagttcatccagacgggtaaatggcagatttttaccgagctctttacagatccgctgatgaatcgggtcggcggcaatcacatccaccaacgcctcttccagtaaaccaaccgggttatgctcgcttggcgtcaggtactgaccgcgaccaatacgtgagcgagtggcgttcggcacttgtaaaatcttcgccactttatgatccagcttgtcagacggtgccagataatgacgtccggtcgggaagatcaccacattcagcagcccggcaaccacgcggttcgggaagttttgcagtaaatcgtccatcgcctgttctgcctgatacagcgcatcctgtacgccccagtgcaccagcggcagatcggcttcattacggccttcgtcgtcataacgcttcagaacggcagaggcgaggtaaagctggcttaaaatatcacccagacgtgccgagatacgctcacgacgtttcaggctgccgcccagcactgccatcgagacatcagaaagcagggcgaggttggcgctcaggcggttcaggtgctgatagtagcgtttagtggcatcgccggttggcgtgctgctggttaaaccgcgcgtcaggcccagccagaagctgcgaactttgttgctaccgacgtgaccgatatgtttgaacaacagtttatcgaacacgttgacgtcattgttcttcgccgcttccatctcttccagcacgtacggatggcaacgaatcgctccttgtccgaagatcatcatgctgcgggtcagaatgttagccccttcaacggtgatggcaatcggtgcgccctggtaagcacgcgccaggaagttgctttgcccgagcataatgcctttaccgccggtaatatccatcgcatcaataatcgactgctgcccgcggtgggtacagtgatacttaacgatagccgacagcacggcaggtttttcgccgagcataatgccgtaggtaatcagcgatgccgcagcgtccattacataagcgttcccggcaatacgcgccagcggctcttcaatcccttccatcttaccgatagagattttgaactgacggcgaatgtgagcatacgcgcccgttgccagcgctaccgatttcacgccgccggttgagttggaaggcagggtgatgccgcggcctaccgagaggcactccaccagcatccgccagccttgcccggccattttcggcccgccgataatgtagtcgatcggtacgaagacatctttaccgcgcgtcggtccgttctggaacggcacattcagcgggaagtggcgacgaccaatttccacgcccggcgtggtggtcgggatcagcgcacaggtaatacctaaatcttctgcaccgccgagtaatttctccgggtcggagagtttaaacgccagcccaagtacagtcgcaatcggtgccagcgtaatgtagcgtttgttccaggtcagacgcatccccagcacctgctggccctgccattcgcccatgcagacaatcccggtgtccggaatcgcgcccgcatcggaacccgcttccgggctggtcagtgcaaagcaagggatctcctgaccacgcgccagacgcggcagatagtgatctttctgctcgtcagtgccgtaatgttgcagcagctcgccggggcctaatgagttcggcacgccgacggtaatcgccaggatcccgctgacgccggagagtttttgcagcacacgagactgggcataagctgaaaactccaggccgccgtactcttttttgatgatcatcgcgaagaagcgatgctctttcagatacgcccacaactccggcggcagatccgccagttcatgggtgatctggaaatcattcgccatccggcaggcttcttctaccgggccgtcgagaaacgcttgctcttctgcggtcaggcgcggctgcggatagttatgcagctttttccagtccggcttgccctggaacaagtcgccttcccaccaggtggtacccgcatcaatcgcttctttctcagtgcgcgacatcggcggcatcaccttacggaaaccgcgaaataccggcgcggaaatcatcgacttacgcataggtgcaaagttaaacggcacgaggataatggccagaggcaccagtacccacgccgaccacagaccagcgacgccgagggcagctgtccaggcgagcaaaatcagactgctgataaataagctcacgcggtgatagaacaacgcgccgagcaggacaactgtagcgagaatactcaaaatcatcataacgaaaagccccttacttgtaggaggtctgaccacttgtgatggtatggttgtagtggatgtaaaaacatttagcaatgtgtttacaatataattacaacgaagctcacattgttgctgtttttatctacacttcagggcaaaaagtcctggtcatagcacctgcccgtacttctcgcttttggcggtatccggtacactgcattttgtctattacatttatgctgaaggatatcctcatgtaccaggatcttattcgtaacgaactgaacgaagcggcggaaacgctggctaactttttaaaagatgacgccaatattcacgccattcagcgagcggcggtcctgttagcagacagctttaaagccggtggcaaggtgctttcctgcggcaacggcggctcccattgcgacgccatgcactttgccgaagagctgaccggtcgctaccgtgaaaaccgtccgggctacccggcgattgccatctctgacgtcagccatatttcctgcgtcggtaacgattttggtttcaatgatattttctcccgctatgttgaagcggtaggccgcgaaggcgatgtactgctggggatctccacgtctggtaactctgcaaacgtgatcaaagcgatcgcggcggcgcgtgagaagggaatgaaagtgattaccctgaccggcaaagatggcggcaaaatggctggtacggcggatattgaaattcgcgttccacattttggttatgccgaccgcattcaggaaattcacattaaagtgatccatatcctgatccagttaattgaaaaagagatggttaagtaagtctggcgtaggccgaataatgcgtttacgccgcatccggcctgaaaattcttaagtcaatcttcgccgggggccatgcgctcccgctgttgtgggggttaccgatgtgcgaattgctcgggatgagcgccaacgtccctaccgatatttgctttagtttcaccgggctggtgcagcgtggtggtggaaccgggccacataaagatggctggggcattaccttttacgaaggtaaaggctgtcgcacatttaaagatccacaacccagctttaattcccccattgccaaacttgttcaggactacccgataaaatcctgttcggttgtggctcatattcgccaggcaaatcggggcgaggtggcgttggaaaatactcacccgtttacccgcgagttatggggacgtaactggacttatgcccataacggacaactgacgggctataaatcactggaaaccggcaacttccgcccggtaggtaaaaccgacagcgaaaaagccttttgctggctgctgtataaattaacgcagcgttatccgcgtacgccgggcaatatggc

SEQ ID NO: 64 - DNA, 1 bp, Escherichia coli
  Strain O55:H7
a

SEQ ID NO: 65 - DNA, 13138 bp, Escherichia coli
  Strain O55:H7
  modified_base (660)..(660): a, c, g or t
  modified_base (1122)..(1122): a, c, g or t
  modified_base (1310)..(1310): a, c, g or t
  modified_base (1313)..(1316): a, c, g or t
  modified_base (1828)..(1831): a, c, g or t
  modified_base (1834)..(1834): a, c, g or t
  modified_base (2185)..(2185): a, c, g or t
  modified_base (2626)..(2627): a, c, g or t
  modified_base (2714)..(2714): a, c, g or t
  modified_base (3351)..(3351): a, c, g or t
  modified_base (3371)..(3371): a, c, g or t
  modified_base (3626)..(3629): a, c, g or t
  modified_base (3767)..(3767): a, c, g or t
  modified_base (3774)..(3774): a, c, g or t
  modified_base (4361)..(4364): a, c, g or t
  modified_base (9482)..(9482): a, c, g or t
  modified_base (11525)..(11525): a, c, g or t
  modified_base (11577)..(11578): a, c, g or t
  modified_base (12505)..(12505): a, c, g or t
tatatcgcctcactggcggatgaactgcggcagaagggcgttttcaacatgctgctttcggatgggcgctatgtaatggcgtattgctcgaccaatctgcactggatcacccgccgcgcgccgtttggcgtggcaacgttgctggatcaggatgtggaaatcgacttcagctcgcagaccacaccgaatgatgtggtcacggtgattgcgacacagccgctgacgggcaatgaaacctggcaaaagattatgccaggcgaatggcgcttattttgcctcggggagcgtgtagtttgatgccagttgtggttgcacaacttcgtggcttaacggcttgctgaccacgtaacggccattgaccacagaaacggtcggtggcttacgggtttgctcaaagtagtcgtagcctggcttcagttgctcccagaagtccttaaagttggaatatttatggcgcttcatattggcgtcggtcatgcggaacgggtaaatgctcacttgcacgctcggctgaccaaataccagtgcgccagtaacgaactggaaaatctcgtcaatgccctgattggtcatcgcgtagcagccgatggaaacacaatcgccgtggatcatcaggtatttcccttcataaccatgcgcacggtcataggcattgggganaccaatattaatcgctttgtagtaacggctgtctggttttaactgattacgctggacgctataaaacccttccgggcttttgaaatcgccctgacgctgttttggccctaagccgccggaatatttacagattttatagctgtcgagcagttgatattgctcgcccattttgacgtagagatcgagcgtacgttcttccttgaagatctggatgtagacaggggatcccatcaactgctgcttatactctttgctcactggcgtggtcgagctactgctgcccagcaaaccggcaaacgaaacgcacgggatcaacaacatcgcaagaattaatgcgattttacgcatactgcttattccttgataaaacggttacacacgccaggacggcaaaatggatcccaaatcggaatagtctggattgggaaggctcacattatcaccaaaagagttttacgcaancctgtcggcgcagggtttacaaatttcatcggcagcgggctttacccaaagagcgccgcgtgagttccagttctctcaaatcgtaaaagtttatcggtaagtttgtaaatcaggatccagtccggttcgacatgagcatcgcgataacctttccatgaaccttgcagcgggtggtctttataaacagntgnnnncggtaaagtattattgataagaagcgtcataagatatttcaatttattcatatccttatgacgcttttgtgcaagttttacatcctttgaaaattgtcccgagttcaatatccctttgaatcatatttaaactcctaatttatcaaataaatcatcggcgtctttggccttatgaacatcaacgccagcttcgctgtttttgattgattgaatggttaattgattaggctcgcgtaaatcaaacggcaatgccttttcacgcgcgacctttgtgagggttatgcgaaccaggtcagagatggtcagccccatcccggccagtacgtccgccgcctgattcttcagatcttcatcgattcgggcgcgaacaaatgcgttagcagccattgggatatctcctgtgctgtatatttattcagcttgaattgtagctcaaatgagcaacagcgacaatctatgagtaatttaataaacggatgtttttacataattaactgaaatatatttattannnntanaataatggtttattaagtttgttcaggtacgggccgggatacactgtaacatcaatgcatgaccagccattattgagtatgtccttgccgtcgattccatcctttgtattgtcgggattactgttgatttgtttgccgttttcttcatttgccagcgccaccacatcacatatctctttcagctacgccgcccgccagcggatgcaaaaccgtgcgcgtttattaaaacagtaccaaacccatctgaaaaagcaggtcagctatattgtggaaggcaatgccgaaagcagaagggcgctacgccagcacaaccgcgaacagataaaacagcatccagaatggtttcctgcnccgctcaaggcgagtgacagacgctggcaggcgctggcggaaaacaaccactttttaagcagcgaccatctgcataacattaccgaagtggcgattcaccgcctggagcagcagcttggcaagccttacgtctggggcggcacgcggcctgataaaggctttgactgtagcgggttggttttttatgcctacaacaagatcctcgaggcgaagctcccgcgtacggctaatgagatgtatcactaccatcgggcaacgattgtggcgaataacgacctgcgccggggagatttgctgtttttccatatccacagccgcgagattgccgaccatatgggggtgtatctgggcgacggtcagtttattgagtcaccgcgcaccggggaaaccattcgggtaagtcggttagctgaacctttctggcaggatcactttttaggnncgcgccggattttgacggaagagacgattttgtaggacggataaggcattcacgccgcatccggcagttgtgcgcagatgcctgatncgacgctgacgcgtcttatcatgcctacaaatctgtgcgtttttgcgagccgctttcccgttattccatcacctcattgccgacctttccttttcttcttaccgttgagaaaaaggagtcgccatgtctgaatatcgtcggtattacatcaaagggggaacctggtttttcacggttaacctacgaaatcgtcgaagccaccttctgaccgctcagttccagatgctccgtaacgccattattaacgttaagcgagacagaccttttgaaattaacgcctgggtcgttttgccggagcatatgcattgcatatggacattacccgaaagcgatgatgatttttcctcccgctggcgggagattaaaaagcagttcacccatgcttgtggattgaaaaatatctggcaaccacgtttttaggagcacaccatccgcaataccaaagactatcgccatcatgttgattatatttatataaatccagtaaaacatggctgggtaaagcaagtgagtgattggccattctcaacgttccatcgcgatgtggcgcgagggttatatcccattgattgggcgggagacataacggattttagtgccggggagcgtatcatttcataattgtgcgctggtgccngatgcctgatgcgacgctgncgcgtcttatcatgcctacaaaactgcactcaaccgtaggccggataaggcgttcacgccgcatccggcaattgtgcaccaatgccggatgcgccccttaaaggccaatcaactcaacgcccccattatcttcaactccagctcatccggcacttcgttatacgacagcacatgcagccccggcgctcaggttgtatttaaatatcccgatacagacgccgccgatcaggttaatcgccagaatcatcatcccgnnnntggcatccccgcgcacaaacttcgatgccccgtccatcgcgccgtagaaatcggcctcgctggcaacatctttacgccgggtttgcgcctgtgcctggttgatcaatccggcgttaagatcggcgtcaatcgccagantcatcangccgggcatcgcatccagggtaaagcgggcagaaacctcggaaatacgctcggcccctttggtgacgacgataaagttgattgtcaacagcgtcagtaaatccgagcgtgaaagcattatcgccgcgctgcacgggcagtcgatttttaacggtggtgggctgtcgccgttaaataaaatcagcccgtctcatccgccaaaacctgccaccgtggcggtgccggaagagacggagaaaaaagcgcgtgatgtgaatgagaaaacggcgctgctgaagaagaaatccgccaccgagcttggcgagctggcaaccagtatcaacaccattgcccgtgatgcgcatatggaagcgaatctggagatggagattgtcccgcagggattacgcgtgctgattaaagacgaccagaatcgcaatatgttcgaacgcggcagcgcgcagattatgccgttctttaaaactttgctggtggagctcgcgccagtgttcgactcgctcgataacaaaattattattaccgggcataccgatgcgatggcctacaaaaacaatatctacaacaactggaacctttcgggcgatcgcnnnntctcagctcgtcgggtgctggaagaggccggaatgccggaagataaagtgatgcaggtaagcgcaatggcggaccagatgctgctggacgcgaaaaatccgcaaagcgcgggcaaccgacgcattgagattatggtgctgaccaaaagtgcgtccgatacgctgtatcaatactttggtcagcatggggataaagtggtgcagccgctggtgcaaaagctggataagcagcaggtgctttcgcagcgaacgcgctaaatgctgaatctttacgcatttctcaaaccctgaaatcactgtatactttaccagtgttgagaggtgagtaatgcgtaaaatcattcatgtggatatggactgctttttcgccgcagtggagatgcgcgacaatcccgccctgcgcgatatccctattgctattggcggcagccgcgaacgtcggggggtgatcagcaccgccaattatcccgcgcgtaaatttggcgtacgcagcgctatgccgacagggatggcgctcaaattatgcccacatctcaccttgcttccggggcgctttgacgcctacaaagaagcctcaaatcatatccgtgaaatcttctcgcgctacacctcgcgtattgaaccgttgtcactggatgaagcctacctcgatgtcactgatagcgtccattgccacggttctgcgaccctcatcgcccaggaaatccgccagacaattttcagcgagctgcaactgacggcgtctgcgggcgtggcaccagtaaagtttctcgccaaaatcgcctccgacatgaataaacccaacggccagtttgtgattacgccggcagaagtttcggcatttctgcaaaccttaccgctggcaaaaattcccggtgttggcaaagtctcagcggcaaagctggaagcgatggggctgcggacctgcggtgatgtacaaaagtgtgatctggtgattctgcttaaacgctttggcaaatttggccgcattttgtgggagcgtagtcaggggattgacgagcgcgacgttaacagcgaacggttacgaaaatccgtcggcgtggaacgcacgatggcggaagatattcatcactggtctgaatgtgaagcgattatcgagcggctgtatccggaacttgaacgccgtctggcaaaggtaaaacctgatttactgattgctcgccagggggtgaaattaaagttcgacgattttcagcaaaccacccaggagcacgtctggccgcggctgaataaagctgacttaatcgccaccgcgcgtaaaacctgggatgaacgccgcggcgggcgcggtgtgcgactggtggggctgcatgtgacgttgcttgaccctcaaatggaaagacaactggtgctgggattatgatgtatactattatgtatattctggtgtgcattattatgaggggatcactgtatgcatcgaattctcgctgaaaaatcggtcaatatcactgaattacgtaaaaacccagctaaatactttattgatcaaccggttgcggttctttctaataatcgccccgcaggatatctcttaagtgccagcgcattcgaagcgttaatggacatgcttgctgaacaagaggagaaaaagcccataaaggcgcgcttccgtccaagtgctgcaagattagaggaaattacacgccgagctgaaaaatatcttaatgatatgacggatgatgatttcaatgactttaaggaataaggatgcgggtattcaaaacaaaacttattcgcctgcaacttacagcagaggagcttgatgcgttaacggcggattttatttcctataagcgtgacggtgttttgccagatatatttggtcgcgatgcactctacgacgactcgtttacttggccattaatcaaatttgagcgagttgctcatattcatctggcaaatgtgaataatccatttccgccacagttgcgccaattcagcagaacgaatgacgaatcgcatttggtatattgtcagggtgcgtttgatgagcaagcatggttgctcattgccattctgaaacctgaacctcataaactggctcgagataacaaccaaatgcataaaattgggaaaatggcagaagcgtttcgcatgcgtttttgaatttatattatgaataacatacaaataagaaactatcagcctggcgattttcagcaactatgcgctattttcattagagcggttatgatgaccgccagtcagcattattcaccacaacaaattgccgcctgggcgcagattgacgaatctcgctggaaggagaaactcgcgaaatcacaagtgcgggttgcagtcattaatgcacaaccggttggttttatttcccgcattgaacattatatcgatatgttatttgttgaccctgaatacacccgccgtggggttgccagcgctttgttaaaaccttggattaagtctgaatccgaacttacggtggacgccagcataaccgcaaaacccttttttgaacgttatggttttcagacagttaagcagcagcgcgttgaatgccggggagcgtggtttactaatttttctatgcgatataaaccgcaacattaaatccagcttgcaatgaaaataacgcccgcctggtatgtgcgcgttttcttattccacaaactgcaaggaggtaaatcatgacaaatcctttatcaatgactctttgcagacctttcctggattaattcttttttttcttgccctggattcgtctgccatttcctgatttttatatttatatactctaaataattcgagttgcaggaaggcgacaagcgagtgaatccccaggagcttacataagtaagtgactggggtgaacgaacgcagtcgcagtacatgcaacttgaagtatgacgagtataaatggaatggtacatgggcaaatatattcgtcccttatccgatgcggtatttaccatcgcatctgatgacctgtggatcgagagtttagcgatccaacaattacacaccacggcaaatttacccaacatgcagcgcgtagtggggatgccagatttacaccccggacgcggctacccgattggcgcagcgttcttctctgttggtcgtttttacccgacaagacgtcgcggtaacggtgctggaaacagaaacgggccgctactctgacacgctgcgttcggcgctgatttctctggatggcgacaacgcatgggcgttaagcgaaagttggtgcggcactattcagtggatttgtctgagtccgtatcggcctcatcatgggcgcaaaaactggtttctgggcattgggcgttttaccgctgatgagcaggaacaatcggatgcaatccgttatgagacgctgcgtccgtcggggccgggcggtcaacatgtcaataaaaccgactcggcggtacgcgccacgcatctggcaaccgggattagcgtgaaggttcagtcagaacgcagccagcatgctaacaaacggctggcgcgattgctgattgcctggaagctggagcagcagcaacaggaaaatagcgcagtgctgaaatcgcagcggcgaatgttccatcaccagattgaacgtggcaacccgcgacgaacgttcacagggatggcttttatcgaaggataatgaaggatgaaactgccggaaggcgattaaacgccatccggcagcaaatcaaataattacttcgccggaatttctttcagcagttcagtcagcagtgtccagtaatgacctacgctttcgatgtgaacttgctcatccggagagtgtggaccggtgattgttggcccgatagaaaccatgtccatttccggatacggttttttgaacagaccacattccaggcctgcgtggataatctggatgttcggcgtcttgttgaacaggcgctgataggtttcacgtaccagatgcatcaccggagaattagcgtccggctgccagccaggatatgcgcctttcgcttcggttttcgcgccagccagtttacccagcgaatccagcatgctcaccacgtagtctttaccgctgtcgatcagagaacggatcagacagtgaatttctacgttattgtcagtcatggtcaccacaccgacgttcagggaggtttcgaccacaccttttgccacgtcggagttgcggatcacaccgttcggggtggcgttcagcagacgaataaaggtatcgcgagatttcgcaatcagggcagctttatcgttcgctacagagtccagcaacaaggccagatttttctctttctctgccagctcgtttttcaggatctcctgataggtattcaccagagatttcagggcgtcgactttatcagctgcgacagcaatggtcgcaaaggcttcacgcgggatggcgttacgcagtgtgccgccgttgaaatcaataagacgcaggtccagttcttctgcatgacccgccaggaagcgcaccagcagtttgttggcattacccaggccaacgtggatttccccgccggagtgaccgcctttcagaccttttaaggttaacttgaaggtttcaaaaccagctggaaccgcttcacgatctaaatgcaggttggaggtgaagtcgataccccccgcgcaacccatgtagatttcaccttcttcttcggagtcggtgttaatcagaatatcagcctgcaaccagttgctctgtaagccgaacgcaccgtccataccggcttcttcggtcatggtcagcagcacttccaacgggccgtgaaccacgttttcgtcagccagaaccgccagtgcagaggccataccaatgccgttatccgcacccagcgtggtgccgcgcgctttaacccattcgccatcaatatatggctggataggatctttcgtgaagtcatgcacggtgtcgttatttttctgcggcaccatatcgaggtgggcctgcaagacgaccggtttacgattttccatacctgcggtagcaggtttacgaatcaggatattacctacctgatcgcgttcgacatggaaacctttctcttttgcccaaccaacaatgtattcagcgagttgctcttcatgataggacgggtgaggaatagaacagattttggcaaaaatatcccacagcggntgtggagataattgagacagttcagacacgttaagtctccttgtcgatcacccgcaaaacagtattgcaggtcacagggttagcagaaaatgttgtcaacacaagacaggcttgcgagatatgtttgagaataccactttatcccgcgtcagggagaggcagtgcgtaaaaagacgcggactcatgtgaaatactggtttttagtgcgccagatctctataatctcgcgcaacctattttcccctcgaacactttttaagccgtagataaacaggctgggacacttcacatgagcgaaaaatacatcgtcacctgggacatgttgcagatccatgcacgtaaactcgcaagccgactgatgccttctgaacaatggaaaggcattattgccgtaagccgtggcggtctggtaccgggtgcgttactggcgcgtgaactgggtattcgtcatgtcgataccgtttgtatttccagctacgatcacgacaaccagcgcgagcttaaagtgctgaaacgcgcagaaggcgatggcgaaggcttcatcgttattgatgacctggtggataccggtggtactgcggttgcgattcgtgaaatgtatccaaaagcgcactttgtcaccatctttgcaaaaccggctggtcgtccgctggttgatgattatgttgttgatatcccgcaagatacctggatcgaacagccgtgggatatgggcgtcgtattcgtcccgccaatctccggtcgctaatcttttcaacgcctggcactgccgggcgttgttctttttaacttcaggcgagttacaatagtttccagtaagtattctggaggctgcatccatgacacaggcaaacctgagcgaaaccctgttcaaaccccgctttaaacatcctgaaacctcgacgctagtccgccgctttaatcacggcgcacaaccgcctgtgcagtcggcccttgatggtaaaaccatccctcactggtatcgcatgattaaccgtctgatgtggatctggcgcggcattgacccacgcgaaatcctcgacgtccaggcacgtattgtgatgagcgatgccgaacgtaccgacgatgatttatacgatacggtgattggctaccgtggcggcaactggatttatgagtgggccacccaggcgatggtgtggcaacaaaaagcctgtgcggaagaagatccgcaactcagtggtcgtcactggctgcatgcggctacgttgtacaacattgccgcctatcctcatctgaaaggagatgacctggccgagcaagcgcaggctttgtcaaaccgcgcctatgaagaggccgctcagcgtctaccgggcacgatgcggcagatggagtttaccgtacccggcggtgcgcccatcaccggctttttgcatatgccgaaaggcgatggcccgttcccgacggtattaatgtgtggtggtctggatgcgatgcagacggactattacagcctgtatgaacgttattttgcgccgcgcggcattgcgatgctgactattgatatgccgtcggtgggcttttcttcaaaatggaagctcacccaggactccagcctgttgcatcagcgcgtcttaaaggctctgcctaacgtaccgtgggtggatcacactcgcgtcgcggcctttggtttccgtttcggcgctaacgttgccgtgcgtctggcatatcttgaatcgccgcgtctgaaagcggttgcctgtcttggtccggtagttcataccctgttgagtgattttaagtgccagcaacaggtgccggaaatgtatcttgacgttctggcgagtcgtttggggatgcatgatgcttccgacgaagcgttgcgcgtggagctgaatcgctattcattaaaagtgcaaggattgctgggacgtcgatgcccaacgccaatgttatcaggctactggaagaacgatccgttcagcccggaagaggactcacgcttaatcacctcatcatctgctgacggtaaattattagagatcccatttaacccggtgtatcggaattttgacaaaggtnttcaggaaatcaccgactggatcgaaaaacgcttgtgttaaaaatttgctannttttgccaatttggtaaaacagttgcatcacaacaggagatagcaatgacgttaccgagtggacacccgaagagcagattgatcaaaaaatttaccgtactaggcccgtatattcgtgaaggtaagtgcgaagataatcgattctttttcgattgtctggctgtatgcgtcaacgtgaaaccggcaccggaagtgcgtgagttctggggctggtggatggagcttgaagcgcaggaatcccgttttacctacagttaccagtttggtctgttcgataaagcaggcgactggaagagtgttccggtaaaagatactgaagtggttgaacgactggagcacaccctgcgtgagtttcacgagaagctgcgtgaactgctgacgacgctgaatctgaagttggaaccggcggatgattttcgtgacgagccggtgaagttaacggcgtgagtgaaatgtgccggatgcatcacatccggcaataatcattaaaactgataggtcatgccaaccgcgacaatatcatcattattaatattcaatttgttatcgctatccagttggttgattttataatcaacaaacgctgacatatttttgttgaaataatatgtagccccgacatcgatataattgaccagatcttcatcaccgataccttcaatatctttccctttcgataagacataacccagcgatggacgcagaccaaagtcaaactggtattgagcgaccgcttcaaagttctgtgtcttattggcaaagccgccagttattggcgtcattttgcgtgtttcagaataaaaagttgccagataaatattattggcatcgtatttcagacctgtagcccaagcttctgcacgcttgcctgtgccacggctttgcaggttctgctcgttggtgcgatctgagttggtataggccccnctaatggcgaaatcgctgccgccaaagtcatatgtcaatgacgtgccgaagccatcgccgttttgctttttaacgtcgcggttttcgtttttcccttgatattgcagggttaagttcaggccatcgataacgccgaagaagtcggtgttccgatacgtcgtcagaccgctggcgcgtttggtcataaagttgtcggtctgcgccgaggagtcgccaccaaattccgggaacatatcggtccaggcttccacgtcatacaacgcgcccaggttacggccatagtcgaaagaacccaaatctttatacttcaatccggcaaaagcgagacgcgttttttgctgtgcagtatcactctccgctttatttccggcaaactccgcttcccaacgaccataaccagtcagttgatcgttaatttgtgtttcgcctttaaaaccaaaacggatataactctggtcgccatctttactgtcgttatcactcatataatgcatggctttaactttgccatagacatccagtttattaccgtctttgttatatatttctgcggcctgtacggatgcagatgccacaatgcccatcaccactaatgccagagtgctctttttcattttcattcctgattttaat

SEQ ID NO: 66 - DNA, 8893 bp, Escherichia coli
  Strain O55:H7
  modified_base (2)..(2): a, c, g or t
  modified_base (692)..(695): a, c, g or t
  modified_base (855)..(855): a, c, g or t
  modified_base (1072)..(1075): a, c, g or t
  modified_base (1155)..(1158): a, c, g or t
  modified_base (2552)..(2552): a, c, g or t
  modified_base (2812)..(2812): a, c, g or t
  modified_base (8857)..(8858): a, c, g or t
  modified_base (8860)..(8862): a, c, g or t
  modified_base (8865)..(8868): a, c, g or t
anattctgcgggagagccccgttgaaaacaggaaagtttttaacctgagattgttaaagatatattacagattaatgatattcttaaaatgtggtaatttattaaatctgtaataaaagcgtaaacaactgccgctaggcttgctgatcccgcgcaacaaaacgccatgctttgctcgcagatggttggcaaccgacgacagtcctgctaaaacgttcgtttgatatcatttttcctaaaattgaatggcagagaatcatgagtgacagccagacgctggtggtaaaactcggcaccagtgtgctaacaggcggatcgcgccgcctgaaccgtgcccatatcgttgaacttgttcgccagtgcgcgcagttacatgccgccgggcatcggattgttattgtgacgtcgggcgcgatcgccgccggacgtgagcacctgggttacccggaactgccagcgactatcgcctcgaaacaactgctggcggcggtagggcagagtcgactgattcaactgtgggaacagctgttttcgatttatggcattcacgtcgggcaaatgctgctgactcgtgctgatatggaagaccgtgaacgcttcctgaacgcccgcgacaccctgcgtgcgttgctcgataacaatatcgttccggtaatcaatgagaacgatgctgtcgctacggcagagattannnncggcgataacgacaacctttctgcactggcggcgattctggcgggtgccgataaactgttgttactgaccgatcaaaaaggtttgtataccgctgacccgcgcagcaatccgcaggcagaactgattaaagatgtttacggcattgatgacgcactgcgngcgattgctggtgacagcgtttcaggcctcggaactggcggcatgagtaccaaattgcaggccgctgacgtggcttgccgtgcgggtatcgacaccattattgccgcgggcagcaagccgggcgttattggtgatgtgatggaaggcatttccgtcggtacgctgttccatgcccaggcgactccgcttgaaaaccgtaaacgctggattttcggtnnnncgcctgcgggtgaaatcacggtagatgaaggggcaaccgccgccattcttgaacgcggcagctccctgttgccgaaaggnnnnaaaagcgtgactggcaacttctcgcgtggtgaagtcatccgcatttgtaacctcgaaggtcgcgatatcgcccacggcgtcagtcgttacaacagcgatgcattacgccgtattgccggacaccactcgcaagaaattgatgcaatactgggatatgaatacggcccggttgccgttcaccgtgatgacatgatcacccgttaaggagcaggctgatgctggaacaaatgggcattgccgcgaagcaagcctcgtataaattagcgcaactctccagccgcgaaaaaaatcgcgtgctggaaaaaatcgccgatgaactggaagcacaaagcgaaatcatcctcaacgctaacgcccaggatgttgctgacgcgcgagccaatggccttagcgaagcgatgcttgaccgtctggcactgacgcccgcacggctgaaaggcattgccgacgatgtacgtcaggtgtgcaacctcgccgatccagtggggcaggtaatcgatggcggcgtactggacagcggcctgcgtcttgagcgtcgtcgcgtaccgctgggggttattggcgtgatttatgaagcgcgcccgaacgtgacggttgatgtcgcttcgctgtgcctgaaaaccggtaacgcggtgatcctgcgtggtggcaaagaaacctgtcgcactaacgcggcaacggtggtggtgattcaggacgccctgaaatcctgtggcttaccggcgggtgccgtgcaggcgattgataatcctgaccgtgcgctggtcagtgaaatgctgcgtatggataaatacatcgacatgctgatcccgcgcggcggggctggtttgcataaactgtgccgcgagcagtcgacgatcccggtgatcacaggtggtataggcgtatgccatatttatgttgatgaaagtgcagagattgctgaagccctgaaagtaatcgtcaatgcgaaaactcagcgtccgagcacatgtaatacggtagaaacgttgctggtgaataaaaacatcgcctatagcttcctgcccgcattaagcaaacaaatggcggaaagcggcgtgacgttacacgcagatgcatctgcgctggcgcagttgcagacaggccctgcgaaggtggtggcggttaaagccgaagagtatgacgatgagtttctgtcattagatttgaacgtcaaaatcgtcagcgatcttgacgatgccatcgcccatattcgtgaacacggcacgcaacactccgatgcgatcctgacccgcgatatgcgcaacgcccagcgttttattaacgaagtggattcgtccgctgtttacgttaacgcctctacgcgttttaccgacggcggccagtttggactgggtgcggaagtggcggtaagcacacaaaaactccacgcncgtggcccaatggggctggaagcactgaccacttacaagtggatcggcattggtgattacaccattcgtgcgtaaataaaaccgggtgatgcaaaagtagccgtttgattcacaaggccattgacgcatcgcccggttagttttaaccttgtccaccgtgattcacgttcgtgaacatgtcctttcagggccgatatagctcagttggtagagcagcgcattcgtaatgcgaaggtcgtaggttcgactcctattatcgncaccacttaaatcaataagttacctcgcatttaagtaaaccacgttctcctcttgtgccgtatttgtgccattgcgacttataatcgcatcgattttgctcgcgtgctcggtgagatgcccggctgaaaggtgggcgtatctttgaaccatttcgagagtttcccatcctcccatctctttaagtgcaagaagagagacaccggactgaaccagccagcttgcccaggtatgcctcaggtcatggaagcggaagttgctaatgcctgcccgctttaacgctcctttccatgccttgttgctgtcggttctcatcttccttaccgctgctgtttttgttccgtcgcttcggtaggcaggtttggtgtggacaaatacccatctcttatggagcccctgctgttttcttaatatctggcatgcggtttcgttaagaggaactccgatcgcattgccagcttttgtttcatcagggtgcatccatgccattttcttatccagatcgacctgtgaccactcaaggtctgtaacgttggagcggcgaagacctgtagtgattgcgaacatgaccacagggaagaaatgaggagcaatttctgcaaacaggcgcttcgattcctcctctgtaagccatctgattcgtccattcttaacgcgtggtgttgatatttttggcgccctgtcaagccatccacattcaacagccatattgagaatagcgcgaagtattgccagatgccgcgtcttcgttcctttgcttgccagctttggtttatactccggcactggcttgccaagccgcaaacacctgtcccggctcatctcccagttcaggcgatggcggcggttttccatcccgtctaccgcctccattattttttctgttgttatgtcagagagaatggtttctctgaagtgcaacatccagaacgatataatgctcttgtcatcatcaatggacttcttatccgatttctcacgcagccaccgtatgcaggcttccttgaatagctttttcggcgattccccgagattttttactctccacgcctctgctttcagacgatcgtgaagttcttgcgcttgccttttgtccgatgtttcaagagagcgtctaactcttgatccatcttgcgcgacgaaatcgcagtgccatgtgccaccgcgcagtttgattgacatgctttaacctcctgcacatcaaccgcattcaccgcgctattgtgtctcacagacttaagcgccgcaatgcagtctgacttgcaaatgcgatatgggcttttaggtttatctggatttatctttgcggcctgaagtcgtccacttcgtatccactgcgtgatagtgcctttgtctaccttcagatacgacgcagcctcttcacgagtgaagatttcttcttccacttggagtctccatttattggattgacatgattgctgtaggtctggatatcttgagaagctggcaggcctcatcgagtgtgaggctgtggttagtccttgcgtaactcgctaattcttctgtaagtctctggtgctttgtttccgtgtatcttcatttcagacttcaacagagcaacgagagaatcccattcgttgaggattcctttgaatgccggaacgcgctttgcaaccttgtcgaatgaatctctgatttctggaatctgctcaacaagtgcaacgcatcgtctgaaatcggctgcgtcatgtggagcaccgaagctatgaccatagatattctttttcaggccacatgcgattgaggcaagagttgcgctactgatgccgacatcgccagtcgattgccatttcaaaaccttcatagccaaatctgacatttcttgtctccataaaacaaaacccgccgtagcgagttcagataaaagaaatccccgcgagtgcgaggattgttattcacctttgacggcaagttgcaggttagccacggttaactccttgctgtgtggcgtcgagtaataaatcccacaaccgctgagagcaatttccgcatgtacagcgttgacccacaacgtttatcgcgttgctgatttccggcgttacctgtttaggaaccataacccaaccatccggagttaccggaagcgagaacggcagcacatctctgtgaacaagtttttgctgtgacaggttatccagaactttctgtactgctgcatcaccgaatacaccaagcgcatctgccataactcctacaacctgataagcctcagcgcataccgtggataaaccatccggagttaccggagagttgccgggttctttaatgtgcaagcgaggctcaccatcttttggctcaggccactggcgctccatgttgatcttcaatttatcttccatagcagcggtaatttcagcatcgctgatgccggcacggcgctgtgcatcccacaacagaaactgcatatcagcccactcgctaagatcgtctggttcggctgcggcttccagagcctcttttgagaggtgtttcagtggaccaatggggccaacgcagccaaatgtggagtcagaccatttggcatgctcgtggcgaatctgttcgcgttccagtgaggcgagagcgattttaaatgctgtaagcatgtgtgcttgatcgttgtcgagtccgaatggcatttcatctcgtgctgactcaatactggtaatcgtattttgtagccattctttggtaaaagtgctcatcgtaaaatatcctctatactggtaagtccttcattatttagccagatcatggcgtcatccggcaacttgctgtctggtttggcgtttttgagagaggaactcagtcgcttaatccacattgtcacctcagtaatgcgcctgtctttgccttccagctcaacacgcagcttccctaccgttagcgcaatttcctcgctctcttggtcgcgtgatttgatgtattgctggtttctttcccgttcatccagcagtgccaagacggtagcaggattggctgcggcgatgaattcagcattggcctgctgttccatttggaaatcttcatcgaaaccgctttctggatgcgctccttcaattctgcaaataggaatatatccagcaacttcacgatgaattagcgcatcatcaccatcaaatcggctctctccatattcgagcgaccgctcaccacacgttgctttttctgccgcctcacgcagtgcctgagagttaatttcgctcacttcgaacctctctgtttactgataagctccagatccttctggcaacttgcacaagtccgacaaccctgaacggccagacgtcttagttcatctatcggatcgccacactcacaacaatgagtggcagatatagcctggtggttcaggcggtgcatttttattgctgtgttgcgctgtaattcttcaatttctgatgctgaatcaatgatgtctgccatcttccattaatccctgaattgttggttaatacgcttgagagtgaatgcgaataataaaaaaggagcctgtagctccctgatgattttgcttttcatgttcaccgttccttaaagacgccgtttaacataccgattgccagacttaagtgagtcggtgtgaatcccatcagcgttaccgtttcgcggtgcttcttcagtacgctacggcaaatgtcatcgacgtttttatccggaaactgctgtctggcttttttgatttcagaattagcctgacgggcaatactgcgaagggcgttttcttgctgaggtgtcattgaacaagtcccatgtcggcaagcataagcacacagaatatgaagcccgctgccagaaaaatgcattcagtggttgtcataccaggtctctctcatctgcttctgctttcgccaccatcatttccagcttttgcgaaagggatgtggctaacgtatgaaattcttcgtctgtttctactggtattggcacaaacctgactccaatttgagcaaggctatgtgccatctcaatactcgttcttaactcaacaggagatgctttgtgcatatcgcctcccgtttattatttatctcctcagccagccgctgggctttcagcggatttcggataacagaaaggccgggaaatacccagcctcgcttcgtaacggagtagacgaaagtgatcgtgcctacgcggatattatcgtgaggatgcttcatcgccattgctccccaaatacaaaaccaatttcagccagtgcctcgtccattttttcgatgaactccggcaccatctcgtcaaaacccgccatgtacttttcatcccgctcaaccacgacataatgcaggccttcacgcttcatacgcgggtcatagttggcaaagtaccaggcatcttttcgcgtcacccacatgctgtactgcacctgggccatgtaagccgactttatggcctcgaaaccaccgagcctgaacttcatgaaatcccgggaggtaaacgggcatttcagctcaaggccgttgccgtcactgcataaaccatcgggagagcaggcggtgcgcatactttcgtcgcgatagatgatcggggattcagtaacattcacgccggaagtgaattcaaacagggttctggcgtcgttctcgtactgttttccccaggccagcgccttagcattaacttccggagccacaccggtgcaaacctcagccagcagggtgtggaagtaggacattttcatgtcaggccacttctttcctgagcggggctttgctatcacgttgtgaacttctgaagcggtgatgacgccgagccgtaatttgtgccatgcatcatccccctgttcgacagctctcacgtcgatcccggtacgctgcaggataatgtccggtgtcatgctgccaccttctgctcagtggctttctgtttcaggaatccaagagctttcactgcttcggcctgtgtcagttctgacgatgcgcgaatgtcgcggcgaaatatctgggaacagagcggcaataagtcgtcatcccatgttttatccagggcgattagcagagtgttaatctcctgcatggtttcatcgttaaccggagtgatgtcgcgttccggctggcgttctgcagtgtatgcagtattttcgacaatgcgctcggcttcatccttgtcatagataccagcaaatccgaaggccagacgggcacactgaatcatagctttatgccgtaacatccgtttaggatgcgactgccacggccccgtgatttctctgccttcgcgggttttgaatggttcgcggcggcattcatccatccattcggtaacgcagatcggatgattacggtccttgcggtaaatccggcatgtacaggattcattgtcctgctcaaagtccatgccatcaaactgctggttttcattgatgatgcgggaccagccatcaacgcccaccaccggaacgatgccgttctgcttatcagggaaggcgtaaatttctttcgtccacggattaaggccgtactggttggcgacgatcaacaatgtgatgaactgcgcatcgctggcatcgcctttaaatgccgtctggcgaagagtggtgatcagttcctgtgggtcgacagaatccatgccgacacgttcagccagcttccctgccagcgttgcgagtgctgtactcatccgttttatacctctgaatcaatatcaacctgatggtgagcaatggtttcaaccatgtaccggatgtgttctgccatgcgctcctgaaactcaacatcgtcatcaaacgcacgggtaatggcttttttgctggccccgtggcgttgcaaatgaccgatgcatagcgattcaaacaggtgctggggcaggcctttttccatgtcgtctgccagttctgcctctttctcttcacgggctatctgctggtagtgacgcgcccagctctgagcctcaagacgatcctgaatgtaataagcgttcatggccgaactcctgaaatagctgtgaaaatatcgcccgcgaaatgccgggctgattaggaaaacaggaaaggggttagtgaatgcttttgcttgatctcagtttcagtattaatatccattttnnannngcnnnnacggcttcacgaaacatcttttcat

SEQ ID NO: 67 - DNA, 116 bp, Escherichia coli
  Strain O55:H7
  modified_base (2)..(3): a, c, g or t
gnngcgatagtgaatttagtctggatagccataagtgtttgatccattctttgggactcctggctgattaagtatgtcgataaggcgtttccatccgtcacgtaatttacgggtga

SEQ ID NO: 68 - DNA, 50 bp, Escherichia coli
  Strain O55:H7
  modified_base (4)..(5): a, c, g or t
gggnngccagcaacaggccaccctgcaatggcatattgcatggtgtgctc

SEQ ID NO: 69 - DNA, 43 bp, Escherichia coli
  Strain O55:H7
acataacgaaaaacgcctcgagtgaatcgttattggtatgcat

SEQ ID NO: 70 - DNA, 127 bp, Escherichia coli
  Strain O55:H7
  modified_base (48)..(49): a, c, g or t
cctcacattggagggcaaagaagatttccaataatcagaacaagtcgnntcctgtttagttacgagcgacattgctccgtgtattcactcgttggaatgaatacacagtgcagtgtttattctgttg

SEQ ID NO: 71 - DNA, 24 bp, Escherichia coli
  Strain O55:H7
ggcagccttgtttttctgtttgcc

SEQ ID NO: 72 - DNA, 44 bp, Escherichia coli
  Strain O55:H7
cattgccgtagttcgtattgcccatttatcgacatatttcccat

SEQ ID NO: 73 - DNA, 69 bp, Escherichia coli
  Strain O55:H7
  modified_base (2)..(3): a, c, g or t
  modified_base (7)..(8): a, c, g or t
gnnaacnnttcttcaggcttaaccatgcattccgattgcagcttgcatccattgcatcgcttgaattgt

SEQ ID NO: 74 - DNA, 34 bp, Escherichia coli
  Strain O55:H7
tagtcgtagtcatacggatagtcctggtattgtt

SEQ ID NO: 75 - DNA, 49 bp, Escherichia coli
  Strain O55:H7
  modified_base (2)..(3): a, c, g or t
annctcttcgaactcttcaaattcttcttccatatatcaccttaaatag

SEQ ID NO: 76 - DNA, 27 bp, Escherichia coli
  Strain O55:H7
aaccatgtatatgatcgttatctgggt

SEQ ID NO: 77 - DNA, 17 bp, Escherichia coli
  Strain O55:H7
  modified_base (15)..(16): a, c, g or t
attttcgctagcaanna

SEQ ID NO: 78 - DNA, 1 bp, Escherichia coli
  Strain O55:H7
c

SEQ ID NO: 79 - DNA, 76 bp, Escherichia coli
  Strain O55:H7
  modified_base (2)..(3): a, c, g or t
  modified_base (28)..(31): a, c, g or t
  modified_base (33)..(34): a, c, g or t
  modified_base (56)..(56): a, c, g or t
  modified_base (65)..(66): a, c, g or t
cnntttaagctaagaaaacgcattaagnnnnannacgataaagtgcgatcagtaantcaaaaccnnacagaagagc

SEQ ID NO: 80 - DNA, 46 bp, Escherichia coli
  Strain O55:H7
  modified_base (11)..(14): a, c, g or t
  modified_base (21)..(22): a, c, g or t
atggttttgtnnnnagccctnnatgaaggcaggaagtatgtggtta

SEQ ID NO: 81 - DNA, 44 bp, Escherichia coli
  Strain O55:H7
  modified_base (36)..(37): a, c, g or t
  modified_base (41)..(42): a, c, g or t
gccaaggccaatatctaagtaactaggtaagagganncganntt

SEQ ID NO: 82 - DNA, 38 bp, Escherichia coli
  Strain O55:H7
  modified_base (32)..(33): a, c, g or t
actgcatgttatgccgcgttcgccaggcttgnngtacc

SEQ ID NO: 83 - DNA, 130 bp, Escherichia coli
  Strain O55:H7
  modified_base (3)..(3): a, c, g or t
  modified_base (41)..(44): a, c, g or t
  modified_base (46)..(47): a, c, g or t
  modified_base (53)..(54): a, c, g or t
cantacgttgcaggttgctttcaatctgtttgtggtattcnnnnannactgtnnggtctatcggatttagtgcgctttctactcgtgatttcggtttgcgattcagcgagagaatagggcggttaactgg

SEQ ID NO: 84 - DNA, 35 bp, Escherichia coli
  Strain O55:H7
accccaaccaacaggggatttgctgctttccattg

SEQ ID NO: 85 - DNA, 886 bp, Escherichia coli
  Strain O55:H7
  modified_base (10)..(13): a, c, g or t
  modified_base (331)..(333): a, c, g or t
  modified_base (852)..(853): a, c, g or t
cgtgtttgtnnnnccatctggattctcctgtcagttagctttggtggtgtgtggcagttgtagtcctgaacgaaaaccccccgcgattggcacattggcagctaatccggaatcgcacttccggccaatgcttcgtttcgtatcacacaccccaaagccttctgctttgaatgctgcccttcttcagggcttaatttttaagagcatcaccttcatggtggtcagtgcgtcctgctgatggtttaaaattacaagaaagattgtatgctgtaaacaagaaatattgtaaaaagaggtatacaaaacaaactccattgtttttaaacggaannnagtttgttttttggttattgagattgaggtggggattactggttgcaggttccgactacatcaccaacaaaggatttggttgatgtaagttgttgcatgcctgggatattcattactttggagtaaagagcttttttgtctgtagtgattgaccaagtttcaacagttattcctcctcctgactggtattcccctaccatagtgttcgatgacaaagcagtgtatttcatctctggatagacgccagagactgattcataaaccgatgatttatcgccattaattgttacgtggaaaacggaatcttccgtgctgtcttttgtaaatccgtaacgatcgccattcattgccccgtacccgtgcaggtttgtgacaatccagcattcagaattggcgctggtagttaagagtattgtgagtagcgctgcaatcctgatcatacgaattttaccctcgcttctacgacaacaccgataatcttgcagttcccgttgatgggagtcataggccatgaagganncaggcctttcaggtacttctgaccgccatcaat

SEQ ID NO: 86 - DNA, 199 bp, Escherichia coli
  Strain O55:H7
  modified_base (59)..(60): a, c, g or t
  modified_base (62)..(64): a, c, g or t
ttttgaatgttgcttcgttcgcgtcagtcagtttggctacaacaaggcttccattcacnngnnnacgtccagtatctactaacaccatatgaccttcagggatgctttgacctacaggtgaggtcatggaatcaccttcaaccttcagccaaaatccatcgcctaataagttcacgtcactgtcataccattcatcaat

SEQ ID NO: 87 - DNA, 26 bp, Escherichia coli
  Strain O55:H7
cgtagggctcacaagcttcacaccac

SEQ ID NO: 88 - DNA, 26 bp, Escherichia coli
  Strain O55:H7
agctctaaccatgctaatcaatggat

SEQ ID NO: 89 - DNA, 37 bp, Escherichia coli
  Strain O55:H7
  modified_base (31)..(32): a, c, g or t
cgaatcagaggtgccattgagcagccagtcnncactt

SEQ ID NO: 90 - DNA, 23 bp, Escherichia coli
  Strain O55:H7
gacgcaagttctggtaaaaagcg

SEQ ID NO: 91 - DNA, 21 bp, Escherichia coli
  Strain O55:H7
  modified_base (11)..(14): a, c, g or t
  modified_base (17)..(18): a, c, g or t
accttttgagnnnnttnngcc

SEQ ID NO: 92 - DNA, 44 bp, Escherichia coli
  Strain O55:H7
  modified_base (5)..(7): a, c, g or t
  modified_base (23)..(24): a, c, g or t
  modified_base (26)..(26): a, c, g or t
  modified_base (30)..(30): a, c, g or t
  modified_base (33)..(34): a, c, g or t
tcttnnnaagaaaaactgtattnnanaaanaanntacattgtat

SEQ ID NO: 93 - DNA, 32 bp, Escherichia coli
  Strain O55:H7
gcgatatgcaaactctttctgaacgcctcaag

SEQ ID NO: 94 - DNA, 23 bp, Escherichia coli
  Strain O55:H7
  modified_base (14)..(15): a, c, g or t
  modified_base (17)..(18): a, c, g or t
aatgacgcaaaccnnannggcaa

SEQ ID NO: 95 - DNA, 60 bp, Escherichia coli
  Strain O55:H7
  modified_base (6)..(6): a, c, g or t
tggggnacagcagaagacctgaccgccgcagagtggatgtttgacatggtgaagactatc

SEQ ID NO: 96 - DNA, 50 bp, Escherichia coli
  Strain O55:H7
gccagaaaaccgaattttgctgggtgggctaacgatatccgcctgatgcg

SEQ ID NO: 97 - DNA, 35 bp, Escherichia coli
  Strain O55:H7
  modified_base (33)..(33): a, c, g or t
caggacaacttctggtccggtaacgtgcttagncc

SEQ ID NO: 98 - DNA, 40 bp, Escherichia coli
  Strain O55:H7
gcgacaagtggacccagctcgaaatcaaccgtaacaagca

SEQ ID NO: 99 - DNA, 87 bp, Escherichia coli
  Strain O55:H7
  modified_base (80)..(81): a, c, g or t
gaaggtcgtaggttcgactcctattatcggcaccatctcaacttcctcaaacgtccgtattagtccataaaatctctganntataac

SEQ ID NO: 100 - DNA, 879 bp, Escherichia coli
  Strain O55:H7
cttttaagtccatagtagtccgtaaccatccagtagaatccggtactgaatgtgtataggattgtgtatatgttcctgttcggtctggattcctatacacatgcctttaaacgatatgcagattcgccgcgctaagcctgaagctaaagcctatacacttggagatgggctagggttgtcattacttatagaacctaatggaagcaagagttggcggttccgctatcgctatgccggcaaacccaaaatgatctcgcttggtgtttacccaacgatcacccttgccgatgctcgttcccgtcgtgatgaagctcgaaaacttgtggcagaaggaaagaaccctagtgaggttcgaaaagagcaaaagctagctatgcaaacagagtcagagaacgccttcgaaaagatagccagagagtggcatcaacttaaatctgctaaatggtcggcgggatatgcatcagacatcatggaagcgtttaagaacgacatttttccttatgtcggaacaaggcctgtgggagagattaaaccgctagagctgctgaacgttctgcgtaaaattgagaaacgtggtgcgttggagaaaatgcgcaaagtgcggcagcgttgctccgaagtgtttcgctacgcaattgcaacgggtagggcggagtacaatcctgcggctgatctctccagcgctctcgaagtacaccaatccaatcatttcccattcctaaaagctgatgagatacctgattttctacgtgccttagagggttactccgggagtaagcttgtccagatagccacgaaattactgatgattacgggtgtgagaaccatcgaattacgcgcggcattatggcaagaatttgatctggataacgctatttg

SEQ ID NO: 101 - DNA, 1527 bp, Escherichia coli
  Strain O55:H7
  modified_base (3)..(5): a, c, g or t
  modified_base (612)..(615): a, c, g or t
  modified_base (647)..(650): a, c, g or t
  modified_base (654)..(655): a, c, g or t
  modified_base (888)..(889): a, c, g or t
  modified_base (891)..(894): a, c, g or t
ccnnntgaaaggatgaaaatgcgtaggccacatcttgtgcccttatcatctcaagcggtagatttactcaatgaactcaagatcatgacagggaactatcgttatgtttttccagggcggaacgatccgaataggccaatgagcgaagcgagtataaatcaagccattaagcgtattgggtatggaggaaaagtcactggacatggttttcgtcataccctttctacaatcctgcatgagcaaggttttgagagtgcttggattgaaatccagttggctcatgtagataaaaattctattagggggacttataaccatgctcaatattttagtggaaggaagtctatgatggactggtacagtaatttgatatttgaaagactaaaaaggagttaatttgtgtctcaaccactttcggaaatattgacatgggatgataaacaatgggaggtatttgtccatgattggcttattgtctgtaaatcagatgattacccgtggagcgaacgtttgggaggagctggagataaaggtagagacgttgttggatataaatcggatcctaacgtagaaggttattcttgggataattatcaatgcaaactgtacaannnnagtttagggttctctgatgttgtagttgagtnnnnaaannttatctattttactctgaatggtgattatcccatccctcagaagtacttttttgtggcaccctatgatttatctactacattttctaatttattgaaaaataaaaacgagcttaaaaaagcagtccttgattcatgggattcagcaatttcaaaaaaataactaaaaagattgatattccattagatgatgaaataaaaaaatatattgaggattttgattttagtatttttnncnnnntacccttatcattgattttaaatgatattgcaaatacacacctttattttaagtactttaacgagctgtatgtcgtgagaatccctccaaatgaaattccaacatacaattcaaaaaaagagtctgtatatgttaatgcactgcttcaagcctattcagagcatggaaataaaacttatagttctttcttagagcttgatgatccatacagacgacactttaataatagtagaaatgatttttattttgcatcttcgcttgaggtttttgtccgcgaagtatttaaagatgatgtattcaaagcattgaaatgttacatttcatcttcaattgaacccgtcttttatgaagaccataattatgcatttattaggtgtaatgcagtcttgaagcaggctgttctgacaccaattgcacattcagtactatcaaaaatatgtgaagcaaatgataaaaaaggaatatgccatcatttggttaatgatggtgaagtaatttggacggtgagataatggttagaatttataattcaagtttagaagtggcatgtcgaatagcgaaagtgctcgtcgctatttatccttcttcattaagccttgaacggcttatttgttttgattttattttagtaaa

SEQ ID NO: 102 - DNA, 945 bp, Escherichia coli
  Strain O55:H7
ttttacctgaagagattagtcttcatcctccaataccccgtagagatgctcagttagccctaaaacgagagattgttttagaatcattggctttgttgcaaggctatgaactagcctcaaaaatttatacacatcgtggttttgtatataaagcttctgaaaaaacatatgcatttacaaattctctacataatgaatatgttgcgcagatggagcataatataaatttggtggttaagttatatagtgatattcctgatgagcagttgcaatcaattataaaaaataaaattggcaaatatgatatggaatttaattatgaatgacaatttttttacgttcagaaaaataaaggtaaccggattcaataaattagatactataattgaatttggttctaaattgactattttatatggtggttctgactctggaaaaacatacatatattatttgattcgatatttattagggagtgaaaaactaaaaaataaagatatcgatcatgctcaaggttatgatttagcctatctggaatttaattttcaaggtagggtaatgacaattgagaggtctcttcaggatagcgcccattacagattatatgattcgagcattgaaaatgttagtgaagctaatctgttgatggttttttccaaaagtgcttcgtctaaaaagagtttttcatcatacttttatggtaggttgaatttcaaagaggctaaagtaagaacaaacttaagtaatactcttcataaatttaatcttaataatgtttttgaatttttttgtattgatgaattaagaatgttaactgagaagtcgttaattctttctgatattcctagcgaggagacaaaaagaaagtctgaatttaaattccttttaactcagagagatgatactaactccttagcagaaaaaccaaataaaaaagcaagatat

SEQ ID NO: 103 - DNA, 467 bp, Escherichia coli
  Strain O55:H7
  modified_base (2)..(3): a, c, g or t
anntgcaaatatttatgaggaattgaaagcgcaattaatttatcctgaatatgatcaagtcattgtttcaagagaacttgagaaagtagagcaagatattgaatcatcgaaagatatattgaaaggtattgttgatgcacttgatgataagaagcaattattaaaagagttaagtgatgaattatattcaatcagtgacagggaaaaatacttatcattactcattgaaagatttagtcttcttaaagaccaatactttatagatctacaaagaatagatgttgtatcacaggcgaatttctatttaaataattttgcagatatttattgtgagttctgtaatacaccgcaaaaaaaagaaaatgaaatatcatatgatgattgttttttgtcgtgtaatgcagaaaaattgaaaatcaaaagccagctgaaaggattaattgaatcaatcggatctaatgttcgcg

SEQ ID NO: 104 - DNA, 781 bp, Escherichia coli
  Strain O55:H7
  modified_base (712)..(715): a, c, g or t
  modified_base (780)..(780): a, c, g or t
attatgttaagaaaaaatgatgttaatgaaatttatcaagcagaaaaagtgattttaagacgttagaagataaaaatataaaacaatacattcatctcttgaatcactttatgaatataaagacaatcttttaatggatcacacaaaacatagcattctatccttcattacaagataaagaagatgatgttgacgaacttaaatactccgccgaggactttgactccttaacagtagctgatttgtatgatatagaaatagcgatgcaagactttttgaatgatataaattttgaaaattctaaagataacaaagtgcgatttgacgaagatacatatgactttaatatcaatgggaaacgccgaggaatgtttggtaaaggtacccgtgcagtaatgcatgctatatttaccatttgctttgcggaatttttatcaagaaaagggaatccattcattggatttgttgtgcttgatagtccattagtgacgcactttgataaagatagaggggtttctctatcggatgttaatagcgtcagtctcagtgattcattttatcacgcattaatcaaaagggactataatttccagattgtaattcttgagaataaaggtccgacgttccaaataaaaattaatgatgcaaataaaatccataacttaaataagaatggaagctctggtttttatcctgtttaatacattaaaannnnaactgctaattggggtgctcgaaattatatttcgtttcgagcgctcagttcatttctaaataatnt

SEQ ID NO: 105 - DNA, 1995 bp, Escherichia coli
  Strain O55:H7
attattttgggtactttcgcctctacacttccttcgggtggttccacaataatggatctcaccggcgtttgatattttataatctaaccccttagcgcgcgcagccccccacgcctgcccgcttcgcttaacagactggttttcatgcattccgcaaatcgtctcagaagccaccacacaagggctttcgcgtcaaaaatggtgcatgagaatcatgcgttttcatgcgctatagacatgcactcatgcgctctcaggccagccagggaaaaggcgtaaaaaatcccagtactggaccgggattacgtgggctttttttgctaatcagacaggaatttgctgacggcttgacagctttgacgcggagccatagcgattgagagtttgctgttgtttttccggcatttgtgctttctctgattcctgttcattgcgccggggcttcatgattatcgtatccacactttccagtgcggtaaatgtgtaggaacattcaagattctggcactgataccatgagcgtttaaccgatggtgcttcataggcggaggttctggcgtgtgccgtcgtaccgcattcgggacatttaagtgccattaatattactcctgcatgccgttaatgtaatccagacgttgctgaaagcgcagttgttgtgcaggggtgtaagagctctggcaatcacgaaccatcatggggtcaggcatcacaccggattcatccagaatcatacgataatccccggcaatttcaggcggtgttattgccagctggcgaaccagagcattgcgtaatatacgggacgcaacgtcaacccctccgcgccccttcaggaacggagccagtgcagatgtcagggctgctccattcgcctgcataaaattgctgagagcgtcttctgtgcaggcctccatcagttgatgctgcgagtaaatgcattcgcgcgcagcacagttaatttgccatttcagcacatccagatgttcccgctgtaattcgagctgtcgagcataatctgctggtttttccatggcagtgaggagtgattctatctgttgttcaacggcttttcggctctcactatgtccagcccacagaatacgggcatttctaaaactgataagcgcttggtctggagtgactcgggccatcatactgctttctccttctcagcacgttcctgacgaaccttcattttatgcatagctgctggagagagtttattactgaaatccagacgggccgcataatccggggcaactcccgccagtttaaacacggggtcctgttcgggcatcgcatcgttagtcagagccggtctggtgatatgtttatgaataaaatctttcagcagtgtgtccgggtcattaactgaatgcaccacaccgacaactgcgctggcttccctgcccattgttgatttgagcaggcttagtgtctggattagtgcttttccatgcgactgcataaaatcttcccagatttgttttgcgcgaatacccacaagggtgtcgtgcgcgtggatatactttccggctaattccgcagcctcctgcggcaaaagtgcattttcgctttcctgagccgccagcagctcatcaaaatcctcaagcgtttctcgtcccagcgcaatttccgtgcgcagttttttcatttcctttgagactacgccctgactttcacgaaatagcgtgcgccactcctcattcagggcgttcgtcgtggcttccatttcagcgcggcgctggcggattgtcgcaatattatccgctgccgctttttgctgacgacgtgcttcaagccatgcagatttggtggcattcactttctcaagcgcctgttgcgtcgaaacagggatagaaatttcaacgatcgggttattgttctgttctgggattgtcatgtcagcacctagtggtttgtcgtggtgtcaattgtgctgtgatgcatacaaagctgccattgaacgccattgtgcgagcgacaagacaaaga

SEQ ID NO: 106 - DNA, 28213 bp, Escherichia coli
  Strain O55:H7
  modified_base (6)..(7): a, c, g or t
  modified_base (1217)..(1217): a, c, g or t
  modified_base (8078)..(8081): a, c, g or t
  modified_base (9886)..(9889): a, c, g or t
  modified_base (13474)..(13475): a, c, g or t
  modified_base (13479)..(13479): a, c, g or t
  modified_base (13599)..(13599): a, c, g or t
  modified_base (13603)..(13606): a, c, g or t
  modified_base (14345)..(14345): a, c, g or t
  modified_base (15033)..(15033): a, c, g or t
  modified_base (15567)..(15567): a, c, g or t
  modified_base (15760)..(15760): a, c, g or t
  modified_base (17505)..(17508): a, c, g or t
  modified_base (25656)..(25656): a, c, g or t
  modified_base (26596)..(26596): a, c, g or t
  modified_base (27409)..(27412): a, c, g or t
  modified_base (27526)..(27526): a, c, g or t
tctttnngctagccagaaaaggcctcgtttaactaagtctgtttcagacttaccttaactattcactactattcacttaggtaaaaaaaataggtaatacagaaggttataaggtgaagggttggcatggcagtattcatcgactgttcataactgttcacatgggaataaaattatttatggtattttttcataatgggtggtttttttattcctcgtagctatttgttttttgctcctcaccactattcacccttattcaggagtattcaacaggcacataaatagactgcatgtttttgccggggaataacattttcgcctctggccatggtgttgcatttcatactgatttttataaaactagatctgtccggttctttatggattcattcggatatattttacgatttaaggtgatgttatttaatatcaaggtttttatgcaggcccaatgtttataagttggatgcgattcaaaaatatgcccggaaattggggcctgcaatgcaaggcctcgtgtagaagttgtactgccttgctgtattggcggtggggttagcactatcaggtgcaatgacccataggatagtaaaccctgggggaatggtagttcctattaatgctcctgtatttatagtccgcaggcatggtatttattatgtcattttatatggtttaatcgggctttaaattccataaaatcaatatgtgacgctaaataaaaaatgcgtgcgcaggtggtttatatacacataataaggaactacctgaacccggataaattcatccggactgttgtggaaattaaagagggtagataaatgcgtaatatttctgtgtctgcgccagctcctgctgcgccattatttcctgtatcgaaccatcatgagcgatttttacgcctgcctgaggtgatgcacttatgcgggttgtcccgttcgaccgtttacgacctgatcagccgcgatgcgtttccgaagcagatcccgcttggcggtaaaaatgtcgcctgggcacagtctgaggtcagcgcatggatggcggaccgcatcagcgcccgtgggcggggatgtgatgcatgatgatacctgcatacattaaatacctttattctggcttgcttactgttgtcatttccaggtatagtttttccgctgtcgcaaaatcggcagccggaattggcgttccgtataacttattggcgacaattgacnccccttgcgtctttttttacgtcgtagctcaggcacaaccattttcagggctgtggtgtttatgcttacaccatggttctatcgagataatggtagtccgggcggggcagccttcgggctggccggtttccaataaggccggttacgccaaccccgttcgggctgccaccagtgaaattggcgtttccggtggtagcaataaccgctacttattggaggctgccatcatggctacaatcctcaccccgtcacacccgcaatatgtctttgtgtttgccgcaatccgccgtgctgacactcaaccccgcatctgtatgcttcgcactgtctcctgcgatgagcgttccgcgcgccgtttgctagtccgagattatgtactctccctttctgcacggctgcctgccggggaggtgacgctatgaaccagtttgagatttcctacgacgatgttgtaaggctgaaacatttacgcaatgtgggtgagtatgtaactggcatggcagccctgcaggactgttatgaaaagccagcaggtgcccaatgcgaacaactggtttccctcatttatctgatgacagagcaactggatggagtggtgcaacgctgccatgacgacctgatgaatgcggaggtggcctgatgatatgctgtgaatctcttctggcacttcgtgccgctctgtatcgccgtgccgttgcctgtgcctggctggctctaagcaatcatcaggaacgttattccggcctgacgctcgctgaacttgaagatgccatagcccgcgagctggaagggttctatctgcgccagcatgggcagcaaagagggctggaaattgcctgcgcgttgctttcggatctgatggagtcggggccgcttaaagcctgtccggttctctcactgctcggaatgacggtcatggatgaactttgttcccgtcacctcaacaaaccagcgctgcactaaggagggccgcacaatgtcaggaatgaaagttagccaggctgagaaagcagctcggggtcactggtcaagaattttacctgcgctgggcgtaaatgtactgaaaaatcggcaccagccctgcccggtctgtgccgggaaagaccgctttcgatttgatgaccaggaagggcggggaacgtggttctgtaaccagtgcggggcaggtgatggcctggcgcttgtaagtaaagtactggatgtaggcattagtgaagcggcagacagaataaacggcattatcggaaacctgctgccagtatctcagggaatgcttgaatctggttctcctgaaaaagaggacgggagaaaagctgcagcagtgctggctgcccgtttgtttgataagtcccgccagaccactggcaatgcctatctgacgagtaaagggtttcctgcactgccttgccgggaattaaccgctatgcataaagtcggtggtgtggcatttcgcgcgggagatcttgtcgttccattgtatgcagatggagagctggtaaatctgcagttaatcaacgctaatgggggcaaatgcttccttaaaggcggtcaggttaagaatgccttttacctggttgaaggtactgccaaagcagccaaacggctctggatagcggaaggatatgccaccgcacttactatcaactatctgactggcgatgctgtcatggtggccttttcgtccgtcaatttcctttccctggcgagcattgcctgcagtgagtacccaacgcaccagataattattgctgctgaccgcgatctcaacggtgcggggcaaacaaggggcgcagctgttaccggggcctgcaattgcacaatggcgctcccgcctgtgtttggtgactggaacgatgcattcacgcaaaacggcgaagaagccacccggcatgcaattcatgaagtaataaaaccagctgttgccagccccttcgacacaatgagcgaagctgaatttaccgcgctgagcgtcagcgaaaaagcgcagagggtagtggatcactataaaaattcactggcagtagacccgaacgggcagctcctttcacgctatgaggcgggggcctggaaagttatctattacgccgattttgcccgtgatgtcgctgcgctgtttcagcgcctcgacgcacctttttcatccgcgaaaattgcgtctctcgtggaaaacctcaaactgatcgttccgcaacagcagaatccggcgcggcaacttatcggatttcgcaacggtgtgctcgatacccggacaggattgttcagcccgcacgataagaagcactggttacgtacgctgtgcgaggtggattacacgcagcccgttgacggtgagtcactggaaacccatgccccggcattctggcgctggctggatcgtgccgcaggttttaatcctgaaaaacgggacattattctggctgcattgtttatggtgctggctaaccgttatgactggcagctgtttctggaggtcactggccctggcggaagtggaaagagtattcttgctgaaatagcaaccatgctggcgggtgaagataacgcgacctcggcaaccattgaaatgcttgagtcgccaagagaacgagctgcgttaataggtttttcactgattcgacttcccgaccaggaaaagtggagcggtgacggggccggactaaaagccatcactggcggcgatgcggtatccgttgatcccaaatatcagaacgcctattcaacccacatcccggcggtcatcctggctgtgaacaataatccgatgcgcttcactgatcgtagtggtggagtttcacgccgaagggtgatcctgcatttccccgaccagatagccccggaggaacgcgatacccagctcaaagagaaaattgccagtgagctagcggtgattgttcgccagcttatgcagcgtttcagcgacccaatgagtgccaggacattgcttcagtcacagcagaactccgatgaagcgctcaccatcaaacgtgatgctgattcagcttttgatttttgcggctaccttgaggtcctacctgacaccacgggcatgtttatggggaacgctaatattgttccacgtcagcctcgaacttacctctaccatgcctatctggtctacatggaggctaacggctataaaaatacgctcagtctgaccatgtttggcaaggggctaccgttaatgctcaaggaatatgggctgcagtatgagaaacgacggaccaatcaaggaatgcagactaatctggccctaagagaggaaagcaatgctgactggttgccaaaatgcgatgagtttgcagcgaaataactgacctaagaccggctgtgccggtcttaaatccgctacaggaaattatctcaaaatatatatcgataaaatttaaaagttatatgctaaggcgtcagcggaaaatgcatctaattcattgttagatgatgtttatttttgaattgatttaaacatcccatcgagttgtaatttatttatgtcggttttctttatggctttaattaagttttcaataacttccaaagaaaaaattacatctttcttttcaattctaacccccccgtggtggctgcaagcattaaggatgtcctttgtaatttcaacatcatttttcattaatggttcatagtccagagcctcaataacagaaactaaactacctagcatttgctcttggtattgaacgttgtttaaatgcattatacgaatattaacaagcatgagaatatattctaaatatctcctggcagtatttcctttctcttgtaaagaatcacgatcatattcctcaatactcatgacttcattatgtaaagaggctattttgtgctctgctaatgaaatatttatcgcatccatgaggtttcgtgagaagcctgtagatgtaacatgaccatttgcgggccttgttaaaatacatgtagtatagcaatttatatttggggtctggattgtctcatttactcttttaaccgttctataaacgtctaccatataagaacctgagttttcaaatgaacatgaagagcattttgtattatatattctatttagagataactgattgtgatagtatccctttaagaaagcatatatagtgtcattaaactcgacaaacacaacggactcaatatatatatggaatttatcattggggtgccactctaattcaagtcttcttgtagagtcatcaaaggaaaagtttgaaataaaattccagttacctaaatctataaaatcaacgatatttctacctgcaccatggatatttttatttattaaagttgtgattgagttttttataatatcccaatcatgaatttcatgatcgaatttattattgatggtttcttttatttgattggaaaagtttgaataactagtcacttgttagcctcaaaattaataatgagtattaaaatttaattgatattgtctataaaatgtagcgatgcaattttattgcaacgaaatgatttttacaacataccattatcgctaaacaaaatcgcacccatcaaatcaacttacgttacaatcactacaaagcgattgcatttaaattcaaaacagttttctgttgggcgcattttttgttgtactggactaaagagaaaaaatggggtaaggaacaaataccttccgtgctcaaaaattaggtttttatgcacttattaatcagtcaaggtgaacagtaaagtgttcacttcttatcaatcgttaatttcatatctttttgaatattaatgaaaaaaacacaatgagtagtatgaacagttttcccccaaaaaaagttttttctgccttgagaatgcgcggaaagcgaacgccttcaccaatgtgtataggggtgtgtgtagtttaaatcttctattttaatttatgtattaaaatcattgtgttggtggcgattattggttcctattatcgcaccatttaaatcaagtagttaccccatatttaaatacaccacgtttcctcctgtgccgcatttgtgccattgtaaccctggcaattaatcaaaatactgttctgacatcaggcaatgcaggtgcagacatttaagccaattgctgccgccattccttaacgtggtcaatcagagcgcggagctttggtgcaatattgcgacgctgtgggaaatacagatagaagcccggaaattgtggaagaaagtcatcaagcagagatacaagcttaccgctttcaatatacggcctgaaagtttcctgagtggcaattgttattcctccgccggcaagagccagcctcaacatcagacgcagatcattagtcgtaatctgcggttcaatcgcaaggtcgaaagctctcccgttttcttcaaatggccagcgataaggcgcaacctccggggactgacgccagccgatacacttatgattcacaagttcacgcggatgaacaggtgtgctgttggctgcgagataggagggagaggcaacgaccatttcacgctgcctgccggtaaggggcacagcaatcatgtctttttcaatgacctctccgagccttacgccagcatcgtaacctgcggccacgatatcgaattcctcatccgtgacaacaatatcaagcgtaacggctggattggctgctgcaaacgaagcgattagcggacctgaaagaaattcttcagctattgacgtcaccgcgattctgagaagtccgcgtggcacatggtcagaaaccatctcttcgaacgctgcctcaataccggataaaggtaatgacagcgatttatgcagccgttctcccgcttctgtcaaattaactgagcgcgtggtccgcattacaagcattgtcccgaatgcatcttcaaggcgtcttattccctgactgaccgctgaacgggtaacgcccagccgtgcggcggctttactaaaattactctcttctgctaccgcgataaaaatgggtaaaagattaagatcgattttcattgtttaatgccgctaaccactgagtacattgaaagcaggatactggaaccaatcataaagttctattctctctccgaacacatttgaaggagaacgtaatggataaggtcatattaattaccggcgcatcaagtggtattggggaaggtattgccagagagcttggaatgacaggtgcaaaggttttactgggagcacgcagagttgagcgtatcgaagccattgcaaccgaaatctgccgcgcaggaggaattgctaaagcgcgggagttggatgtcacagaccgacagtccatggccgatttcgtgcaagcagcgctggatagctgggggcgagttgatgttcttatcaataatgcgggcgttatgccgctttcaccgcttgcagcaggaaaacaagatgaatgggcgctcactattgacgtgaatatcaaaggtgtactgtggggaattggcgctgtacttccggtgatggaagcacagggttccggtcagataatcaatcttggttctattggtgccctttctgttgtgcccacaggcgcagtctattgtgcatcaaaatttgcagtacgggctatttctgatggcttacggcaggaaagctcgaaaatccgtgtgacctgcgtaaatcctggcgttgtcgaaagtgaactggcttcaaccattacccatgtggaaaccatgaaggcaatggacgcctaccgttctgttgcacttcaacccgcggatattgcccgtgctgtaaggcatattattgaatctcccgaaagcgttgatacaaccgaaattaccatcagacccactgcatctgcaaactgaagaataacttttacattcacgttttattaaataggtcagaaggaatatttatatatccctgtgtttnnnntagcaagatacattatgtattgctcaccccgaaggagatgaaggtttaattacagaaagattatttttcacaggaagtaaacatgactcatgtttaatgtctttatatataaaactcatcctctcaattgtcagggaaattagcgtgaatactatctgttctttaattgttgtggttgcactgtctttattatcattcagtagcgtcgccaaaacgattactgccgtcggttcaaccattaacagcactgaaaaagaaatttctttacaggcagaaaaacaagggaaatcatataaaattctgggcgcgttttttaagaacagagtttatatgatagcaaagttaacaccagtcagtaaaaatgatgcttcataaggctcatggtataatttttaagacatgatcaagaagcacgtctattgactcaaaattgtcatttgtcaggcaatggaatacctgacaaatgacgctatcccaatctattgtaccagtcgttctgctaattctaccgatgcttcggtctggagtggtagagtaatattggacacagttttattttctctctttttcgagggctgtatatcaacaggaagaatacatccctaagcggttaatgctggagtaatcaatagaccagcattaatcacagatgattaccaatcagacagaaatggttaaatcgtcgaattcatatttaatacgttttcttacgccgctgaacagcttgaaaaggatgcatattttaaatatcagtgaaatgaacagtttattgccgttattaatagaaatggagggataaatacgcgtattctactgttgcaacaaaaacaacggtattgatcggttttcataatgaagtaacctgacagatatgaaaatgttgattgaggctaaatgcccggattaaggttgtcgaggggagccaggtggttttttcttttggatgatctccattgctggatagtccccttgtacagataagtccgctctttctcgctcaaagcggcccctggaattgaacgcagagtgactacctgacacaatattgcacagtgaagagtcggtcgttgttaacgttcagattttcaatgtatcaatgaccatccgcagagcgggggagacgttgcgatgagggtaatagagaaacaatccctccattcgcaggctgtaacgctgcaacactctgataagcttaccgtgttctaaatcatccgcgaccagttcaacaggaacataggccaacccgaggcccagccgggcggcttctgcttccatatagctgtcggaaaaggcccattgtccttcgggttgatgagtgatttttttatcatcctgattgagttcccactggtatacgctgccgtcggcaaactgataggcgatacagggatgcgcctttaaatccgccggggtttgcggaaaaccatagcgacgaaaatgttccggagtccccacaattgccatctccatatcgggcgtgatgcgtaccgcgaccatgccctggctgacttcaggccccaggcggacacctgcatcgaatctttcctcgatgatatcgacgaaccggctctcatttatcagttcaagccggatatcaggatatcgctgtttaaataccgccagctttggcagcaggcatttatcaatcgcgtgctggctggcattgatacgcaccgtgccggagggcgtctctcgatagtgcgccagcgtggcaagcccaagatctaacatttcaaatccagatgccgtcttctggtagagctgctcgcctgcttgcgtcagcgacagtttacgcgtggtgcgcnnnngcagctggacgcccagcctttcttcaagctcgcgaacagaacggctgactcctgactgagcaagacccagccgcttagccgctgcggtaaagctgccttcccgcaccacctgcataaacaggtatagctcgttgtagttctccctttttgccattgaaacattccccttcatgccggcaatctcagcattaatttataacaatatggtattaatcttagcattaatcgccccctaatcagcactaattctgctcactataatgaccccatcaaagtaaagcaccgcagcgttgtccgtcggaaacctgtatctctctgttgttttttatggggatttttatgaaagccttcacccgaacgctaaaaaccgcgatgccggtcatgctgcttttcgcatcattaagtggagtcacgacaatgagttatgctgattcaaccaatcctaatgcccctgtgtccatgaccgataaatgggataaaacgttcgccgagagccagaaagtcgatcaccgtaaagtctcgttcccgaaccgatatggcatcaccttagtgggcgatctttacctgcctaaagaccgtggcgatcgcaagctggcggcgattgcggtcagtgggccatttggcgcggtgaaagagcaatccagcggcttgtatgcgcagacgctggcggaacgagggtttgttaccctggcgttcgatccttcttacaccggggaaagcggcggctatccgcgaaacgtcgcctcaccggatatcaacactgaagatttcagcgcggcggtggatttcttagggctgcaaaaagaggtagatcgcaaccgtatcgggctgctcggtatttgtggctggggcggcatggcgctgaacgacgcggcgatggatacccgcgttaaagcggttgctaccagcgtgatgtatgacatgagccgggcgatgggccatggtgtgggggatggcgaagaccgttattctaccgccgaccgtcgtgctgttctgcaatatttgaatgaacagcgctggaaggatgcgcagagcggaacgttcgctcacggtggtcatgatattaatgtcgatagcaacggcaaggtcagtgcgggcgagcgcattctgccagaaacgctgccggcaaatcctcatccggtactgaaagagttctttgactactatcgcatgccgcgcggcttccacgaacgttccgttaactctaccggggcgtggacggcaacgatgccgctgtcatttatgaatatgccgctgttgagctacgccagtgaaatcaccattccgacgctgattgtgaccggtgagaaagcacattcacgctattttgctgaagatgcttacaaggcggttggcagtaaagacaaagagttggtggtggtaccaggggcaaatcacgtggacctgtacgataacgtggccggaaaaatacctttcgcgaagttcgaacaatttttccagaccaaactgaaataaaacctcccctgaattgatgcaaagccaccggtctatggccggtggcttttatcctgatctttgtgaaatttcactatgtcgacactaagccaaacaccatcacctcatcatcagcacgcatactggggcggtatttttgccatgaccctgtgcgtgtttgtgctgattgcttctgaatttatgcccgtcagcctgctcacgccgattgcccgtgacctgggcgtgacggaggggctggcagggcgggggattgctatctccggtgcgctggcggttctgaccagcctgacgctttcaacgctagctggaaagatgaatcgtaagttcctgctgctggggatgacggttctgatggccgtatcggggcttattattgcgctggctaccagttatctgatgtatatggtcggtcgtgcgatgattggtgtggccattggcggattctggtcgatgtcagcggcaacggcgattcgtctggtgccgcagcatcaggtcacgcgtgcgctggcgattttcaacgccggtaatgcgctggcgacggtcgtggccgcgccgctgggaagctatctgggggctacggtcggatggcgaggcgctttcttgtgcttggtgcccatggcggttgtcgcctttatctggcagtgcattagtctgcccagcatggatgcgaataaaagccacacgtcatgtggcgcggtattccgcttatttagccgccgcatggttgtggtcggcatgatagcttgtggcctgtttttcatggggcagtttgcgctattcacctatgtgcgcccatttctggagtcggtgacacgggttaattccttaggcttgtcgttgattttgctgattatcggcgtggccggttttattggcacgctggttgtttcgacatttctcaacagaaaattctaccccacgctgatggccatacccggactgatggccgtcattgccatcggtctgatgcttaccgggcatcacgtctggatggtctcgctgctgttaggactctggggcatgctggccaccgccgcgccaaccggatggtggacatggattgcgcgtacgttgcttgacaacgccgaagccggaggcgggctcatggtcgcggtgattcagctctcaatcgcccttggatcaacggcaggaggcatcgtgtttgaccgccttggctggcagagtacgtttgccatgagtagtgtgctgctcctttgcgcgggcgtactgacctttgttacagcacgccagaaggccggtgcgctttagtccggcgagggcgcgcgttgctgaaaaagttacacaaggcgatgagcaaccactatgggtagggcgctcttttaaacgatttaggtgattttctaaaacggctactgcaaatttttctcttaatttatggtatttcccccggaggtgagaaagcgctttccacgcccggccgcaaggatcaggacgacgggggcaggcatgaatcctcctcctgatggagacgtacagaggcgacttctgccagcacggagagggccagtgtatgcgcattccgggctttggggaatatcccgacgggtgcccggatttgcgctgtctcctccctggaccatcccagctcgtggagcttttgcagacgtaacgtgtgggttcgatagctgcccaatgcgccgagataaaagggttttgcttctcgcgcggcctgcaacactggcagctcccggttgagatcatggcacagcaaaatgaccgccgtatcggtatcgatctgagcgctggctgaggccggaaaaagatcgaagatatggctgtcatagcctgtggctgctgcaagactcgcggttgcctgcgcctcaagagaacgtccgtaaatcatcagcctgacgcatggcctgaaccccacctcaaagccattgagattccagcccgttcgggtttgcgtgggcaggcacaccaacgattgtgcttgcggatcgtagcgcagccccgccggttttctctgttccaggcggttcagcacggcgagcagaggctgtgccgagcgtagtttatggagcgtcagcgtgatcccaccgccgcagggcagaacgatgtcaaaccacggcgaaccttcgccatagnnaatntcgcgatcgcagcctgagcccatcatctccagcgcttcaaaagcggcagcggcctccacgcagccgccagagacaaaaccgcagtaacgaccatcttcgcgcaccaccatctgcgccccnagcnnnngcgccgcgccgccgcgtatctccaccagcgtcaccagcaccgctcctttaccggacattagcgcttctacggcgaagcgcagaatggtccggtggtcatcggtgagaaacgcctgctctggcttatgccagtgttcgtctttatcaaaaagcgggtatgacattgttcctccttaaaccacatccggcagcttatcgagcagcttatccagagtgatgggataatcgcgtacccgaataccggtggcgttatacaccgcgttggcgatagccgcgctcacgccgcacaggcccagctcaccgacacctttggccttcatcggggaggatatggggtcggtatcatccaggaaaatcacttcctgttttgggatatccgcatggaccggcacctcataccccgccatatcgtgattaacgaagtagcccaaacggtcatccaccgccagctcctccatcagtgccgcgcccatgcccatagtcattgcgccaatgacctggctgcgtgcagttttcggattcaggatgcgtcctgcagcacacacagcgagcatacgccggacccgaacttctcccgtcgcgctatgcacgccgacctccacaaaatgcccggcaaaggtcgactgctggtactccttgctcagtgttccgaattcaatgctctcttccgctgtcagtctgccgcctgcggtggcctcatgtagcatggcgcttcgggtaccgttggtaatcttgccgtnggcaaactgcgactgctcaggatcaaacccgactgccgaggcaatcatttcgcgaagcttcacacaggcggcgtaaacgccggaggtggaggtattcgcgccccattgtccaccagaacccgcagaaaccgggaaactggaatcgccgaggtgaaccgcaacctgctccagcggtacgccaagcatttccgctgccgtctgggccagaatggtgtagctgccggtgccaatgtcggtcatgtccgtttccacggtaacggtgccgtttggttcgaggtgaacccgagcccccgatttttccagcagattattgcgaaagcccgccgcgacgccgtggccgactagccactccccgtcgcgcacctgtccgggtgtggcgttgcgctgcttccaaccaaatttatccgctccggtgcgcaagcactcgataagctgacggcgagagaagcggcgcgtcgggtcggcggggtcaacctgagtgtcattcaggatgcgaaactcgacgggatcgatgcccgctttttccgccagttcgtcgatcgcgatttcgagcgccatcagaccgggggcttcgccgggcgcacgcatggcgttcccttccggcaaatcaagcgtggcgagccgcaggccggtatgacggtttgccccggcgtagagtaattcgctttgctgtaccgccgtttccggngtgccgccgggcaggtttccagaccagctttcatgtgagatagcggtgattttcccgctctggtcggcaccgatacgcaagtgctgaagggtggcggggcggtgcgtggtgttattgggaatagaggggcgggggagcatcactttaaccggacgtttcaccgctcgggcggcgagggccgccagcagcgcatcgcttctcaggaacagcttgccgccaaaccctccgccgatatacggggagataatacgcacattctccacgggcactttcagcgtttttgccagatcggtgcggcaccagtcaatcatctgatttgaggtccagagagtaagcttatttccatcccagacggccatcgaggcatgcggctccatcgccatatggctctggtccggggtcgtgtaggtagcatcaatcttcaccgcagcggaggagaaagccccgtcaaagtcaccgacgttcttgtcgggcgtgtcttccggcggctgactgacggcctgtttttcgtccgccagggagtaagctcctttnttacggcgatagtgcgcctgcaccagcgaggccgccgctcgcgcctgttcgaaggtctcggccactaccagagcaatggcctgatgatagtgctcaatagtggggccgcctaacagcctggcggtgtttttgtcgcctttactgagtgccccggcgttactggcggtaatgacaggcagtacgcccggcgctntttgcgcggcgtccgtatcaagggcggtgaggcgtcctttggcaatggcggaaccgacgatatagccataggcggcgttgggggattcttcatgccattcgtaggcgtagcgtgccgtgccggtagttttcagcggtccgtcgatgcggtcatggggacgaccgacaaccttcagctgatcgatcgggttttcccctgcgggtttatcaaatttcatgcttgtgccctcgcttcagccagtacggaggcaagcgttcgcttcgccaacaggagtttaaaggtgttttcagcggtgggatgggcgctggcgaacagcgcgtcatatacggcctgcgccccctgggatagctgagcatccgcagcctcaatgcgccagggcttatgtgctactccgcccagcgcgacgcgcccgctgccgtcaggctgaataatcgccgcgaccgataccagggcaaaggcgtaggaggcgcgatcgcgcaccttacggtagatatgttttccgccgagcggcggaggtaacgtcaccgcaacgataagctcaccgggaagcagggcggtttcaatgtgcggcgttttccccggtgggtgataaaaatcagccagtgtgatactgcgagtctttccctccggcgtgatggtttccaccaccgcatccagcaaccgcattgcgaccgccatatcgctcggatgggtggcaatgcaggcttcgcttacgcctaccaccgcgtgctgacggctaaagccttcaagcgccgcgcagccgctcccgggcaggcgcttattgcagggctgattggtgtcgtaaaaataggggcagcgcgtgcgctggagcagattacctgctgtggttgcctgattgcgtaactgaccagacgcgccagcgagcagggcgcgggagagtaccgcgtaatcacgacgcacgcgctcgtgagccaccaggtcggtgttccgtaccagtgcgccgatgcgcagcccacccgcgtcggtcacttcgatcttatcgagcccgagcccgttcacatcgataaggtgggtgggcgtttcaatttccagcttcatcaggtccagcagattggtcccgcccgcgataaattttgcgccgggtacgcgctgagcgctaagtgccgcctcggcgggggggttcactcgttcataggtaaacgccttcatgattttatctcccccgcagcgtcttcaatggcggcaaggatgttagcgtatgcaccacagcgacagatgttgccgctcatacgttcacggatctcatcggcagttctttctggaggggaaaccaaatcgaccgtgacgtgactgggaatgccgtcctgaatctcttttagcaccgctactgatgagcaaatttgcccggaggtgcagtagccgcactggaagccatcatgcttgataaaggccgcctgcatggggtgaagattatctggtgaacccaggccttcaatggtggtgatctcggccccctgatgcatgactgcaagcgtcaggcaggcattaagcctgcgaccattgaccagcacggtacaggctccgcactgtccgtgatcgcaacctttcttggtaccgatcaaatgcagattttcacgcaaagcgtccagtagcgtggttcgggtatccacctcaagctgctcggttttgccgttcaccttaagtgtcaggggcattatctcaggcgcgggtgtagctgccggaacgcttgccgcaagcgtagaatgaggataaaccacggcggnnnncgccgttgcggcgctcactttaatcagatcgcgacgggtcaaacttaaatcgtgcggctcatgcttcccaacccgattatcttcggggtattcgccttggttgctcataccaggcctccggtattctaaaggggaaaataagagtgcgttgcgagagtgctgatgcttttttaaacgttaagcatagtcggcgacagcaggaggattattcttaaaacgcgaatgcagctatgagcccggctaataaattcatgttcgccgggatgttgatgatgatgggagctggtttattgctttagttgtacgatgcaaaaaccgataaggaaacctgtgattgtcagctctgcatcaccctgcaaatctatgtcacttctaatataaaaatagggagaaatgatggtgcttatattctttggtgattagacaaccatcttgttatacaaaacaatacagttctttacatttaccttgttttatgaatactcctaaagaggtgtataacataatggtacaagcagggtagatatgaatatatttgaacaaactccaccgaaccgcagacgttatggtcttgctgcattcattgggctgattgctggcgttgtttccgcatttgtgaagtggggggctgaagttccattgccgccacgtagcccggtggatatgtttaatgcagcgtgtggcccggaatcattaatcagggctgctgggcaaattgattgctcgcgtaattttctcaatcctccgtatatttttcttcgagactggctggggctgacagatcccaatgcggctgtttatacctttgccgggcatgtctttaactgggttggtgttacgcacattatcttttcgatagtgtttgctgtcggttattgtgtggtcgcagaagtatttccaaaaattaaactctggcagggcttactggcaggtgctttagcccaactttttgttcatatgatttcattccctctcatgggactgacaccacctctgtttgatctcccgtggtatgagaatgtttctgaaatttttggacatttagtctggttctggtccattgaaattattcgcagagatttacgaaacagaattactcatgagccagaccctgagatccctttaggctcaaacagataatgcattgaatgataaaaatggcgcaaatacagcgccatttttataggttaaaaacattgctttttatattctgattcagatagtcagtgagtatatcgcgctacttcaggatgatgtagatccgaagaacgctacagaagagaggcattgttgctggcaaatagaagaagtatcggggtttgttacccctgaaaaacgaagccccgctattacagctggcggggcagtgcaaataattattgtatatttataacggtgtcagcccgtatttagcccttgcacgattgcaagcctcattgacgactccgttctcaccagacatggcgaattctctgcatgtggacgatcgatttttatatatcgtgcagcaggcatttttgcccggggttcctgcaagggcaatacatcgggggtttttctgattagttccgctcatgcatcggtgaaaaggggatatttgttcagtgagcctggcgggaatagtgccgccagcatcgtcggcttcggcccagtagaaagagacgcggaaaaatgcacaacaggcaccacacgtcatgcatggattcagattgctcataattcaccagtacagctataaatcgtaaagagaactgcggtacgtcgtatgcagggacgtatcgcggttggctggtgtactttcgatagtgtgagtattgaatgatttccagccgttaccgattttacgtcctaattagtgaagaaaccactcgttagcaggccgcctggtacctttccgtgtctcctgaacactgtggtgtgcatatgagaaagcctatcgttacaggtgatattgacgatcgcttccacatcatttaaacgatttttgagtctctgaggtggaattcttccctcgaccgatggataagtatcagtccgccgaagggggcttagccggacaggaatcgctaatcttaatgaatttgtcgttatagaccagatagtgattccccggctgacgtaactcaggctgatgaaccacgtctcccggacgtagataccaggcatcgccttcctcttcggtcgaatcacatcctggtttaatcagtagcttaaaccacgtgttgccggtgttacttaccgttccggtcacctgatcgaaggaccatttaaactgaacctgacgtggtcgtactaccagaatggtatccatcaccaccaccggctccgtgctaacctcaccgccggtagggctgcgttttgtcaggttacgagtggggacctcgcgaaatgagacccggtagtagcgctcgcggttatcctgtggcccatgatagtaaaatttaaaatactcgctctcaccagcctgcaacgccagctggcggggggcgaaaagcagttcaccatccaccggtcgggtgcgtaattcactgctgcccgggctatcgatagcactgatggcaatacggtatatccgcgcgcttttgttgttattcactacacgtttgctgacaaagtcagtctcggacggcagtgaaaaagtcagattgccgaccgaaatcgcctgtgtcaaaggtgccgccagcatacagaccgctgtcagcagggccttagttaatgttacgccacgtcgcctgaacatgaatttctcctgaagcgctgacttcgccaaaccagccgttatcatctaccgtacgcagagaaatggcgttatccattggaatcgaaaatttgactgtggtcttatccatctgccccacttcgccagagatatcagtccacggtgtggtcaaccacagcgcatcggtcatatcccgccagctatcatcgcacccggcatcgtaggtttttgtagctccgttgcgggtaataaaggaaagcgtcgccgggaacggtactttcgccttaccgtcatcggagctgaagacacaataggagcgcccgccaatcacctgcgcgggtccggtcaccttgatcagcacttcgtcggcagctgttttaccgctggtggttacgatatagccgaaatcgagtgccgactcgccgctgccgacatatccctcccgcgacggtgtctgagtatattcatcggagataatactgatgctgaaatcacggggtttgataatcagcgtgttggaggtagaaaattcataccagccagactccggtgatgtggtgttctgaaagcgaaagttgaatagatctttggtgttgatatcgctgattccctggttcaccatctgcttaaagaagttgctcgagaagaaaacatagatcgagtctgcgctcttcatctcgttgaaggtgtagtaataggcagtattgctcaccggtttccatgaactgccattcagactgaactgcatatcgtacgccccgacggccgaggctaacgacgagttggcgatcgccgggaatatatggattgaggtgttgctgagtccgtttgtttgcagggtatagttaaccatcttacaacttaatcctgaacggctgccgatggtttgcgtccggcagtcggtgttcccttcgcccagagtcggtactccgtcgctgttgataaatacttccgccagcgagtgggtatttatcaaccgtagatttgctgctttcgtatgggtgacgttgcgaacataccagttgccggaggcctgatccttacagcgtgcgccgctgctggcgtcatagttcacagaggtctggcaggcattgatggtcattgtaaagctgctgccgacgggcatttgttgcagatactggtaaaacgcgtctgacaacatgccgtgcatccacttcgcgccgccgctggtcaccgtcgcgccataaaatccactggtgtcggtggtttgcggcaggataagactggtggtcatattacacccagcgtaccagttgatgcagcgcaagccagttaaaggagatgaaactggtgaattttccagccacatatcaaacttccagttggtataaaggccggtgttgtaaccgttatcaatgtagccgaggctttgctgatagatggttcctgaaccattgtattttaaaccggtccagcggttggcaccggtcaggcgcggatccagcgccccgccaggagtgacgaaaaagttgtcgtctgagttgttttcgacaaacacaaactcgcgtgccggtgcatccgcccaggttgttttgctcactgccgctctgagcgcagttactggccagattagcgcaaagattatcatcgctatcagtaggttaactctcattctcttctcctgtctgcgtcaccgccgcccacgatgagaggccgctgcagaccacatcaccgacccagacggcaccgcgcgcctggttgagttccagtgccacttcgcaggttttattgccactgtagcgaaaatcgatagtggggtatttcttatccacgtccatgacaaactcgccgttttcatcggttcgggttcggccgatatggttgttaatccgtgcgttagccagcagtgtgccgtcttccgcacggatacgaccggagacggtaaccatctgcttcacctctggctcaatgacagcgacattgcctggatagagagtcagatgacttttgcgaccgctgacgatatcgtaactgtcgagtgagtttttgctgttctgtaactccacctcatatcttccatagggagagagcgggagatagttacgcttgccgttaagcgggaaaatccgcccgttgattttggcgctgatctgaccgtcgtcctccagcccggtgttgaatatcaccccagcgttgccatcagtccgcccgctggcagcaatgtttttaccctgccagccgacgctgccattggcggttaaattggtattgacgtagccgtccgccgcgctattgacgttcagcgttccgctggcgtagcgagcgtcgaactgtgcatacgccccaccactgagagttttgtcatcaccggtatcgccggagatggctcgtgacagattggcaccaacagtgcgaatggtcccttcatcaaactgcttgcgtgctgacaggtttgccatggtgtagccgttttgatgagtcatccctgcgctaaaccagttgcccagtggtagcgagagatcgagagcgatatatttccctgtattggcgttgctgtcgccgttgttatagcgctgaataccggcccgcaggccaagcgaaccaaaggtaccgctgtagacattttgatagtaatctgccgtgtaataatggctgttgtaacggcggtcatcattgtagctgatgctgaatgtgcccagcttcgaccacagtgagttcaggttgagtgtgccgccgatagcacggttgtcggcatcgctacgtcgcaattgattgccaatgcgggttttttcctgattaacccacagcgaactaaagcctcccggtagagtggcgctgatgctgccgatgctgctccatgagctgtcactggccagcatattttgcaggttaacgttgatcgctcccccaagcggcagcgtcagacgggtttcacccaccgcctgattatcgtatccatatcccgttgccgcccagctaagcgtactcagtgagccggaggtcgaggcacctgccagccaactctctttagctggtcgcgtctttttcccgttttccgaccagcgatccatatgaaagctaccgccccatacctgccacgccagtggtgcaccgacgccgcgcccccggctaaacagcttattgacccgctgggtgcgtttgctgatcacgcgaccgttaacgatcacctcaacttccacatcgtaaataccgtatggtagaccccgggtatccacttcatgattgcccatggtgaagttctgaacgcttagtaaccgcccatcacgggtgagatgtacttcacccgccgccggtaaaaaggcgatcactggcgtggctgactggctgctgtcgaagatggtggagctggcctggtttccccaggaaaggccgtaaatcttccctgctgaaatggcggtcatcggccctaaggactgcaagttccaggtgtcgagcgttccaccggcaaatcggtgaccggcaaaatcgcgttcatacatcgctttatataattcactgtcctgttgaccgctaccgatcccgtacagcgagccgtcgagcaccacatgatgttcgcgcagtgcagtaacgttattcagcgacagatagctggatgtgttgctcccgccgttacgcaactggttgttatagatgccgaagttatagctcagattactgctgagggtgttaacactggactgcccgatgtcttcgctacgtgagcgtagtacagtgcccagcgcttcgcgcttgaccaccagctgcagcagcagttggcgcaagctgagatccagctgcgcgttgtcagtcagggggatggtaagggcctcattgaacggggcgttcgccagagccatcagctgctgtcgagtttgttcgctgacactggcgttatcttcactctcttccagctgtattttccggatgcgtagctgtccatcatccaaccagataaaagcgctgccgattcgctgatcgtcctggcgaccctggctaccggcgagatgaatatagagcgggacgctcatgccgtcctgaagcgcctgactgaaggcctgcggaataatcaccccacctatttgctgcgcacttatgtcagcagcgctggcatcgggctgaacgaacaaaaagaccatgccgaaggcaaactgggctttcagtcctggggagaaccgtcgtaaaggcattgtcgttatccatctgcacagctatctatttcacgggaatgaacttatcaccctgccaaagtgcaacccgtcctttgttatccgccgtgtccacgcgggtaaaacgacgcgacttgcccggcatcaggtagtaattctctttacactctttaccattggcggctttcaggcaggggccgtaggcgaggatccgcagcgtcgcatttcctgtatttgtcagggtgccgttggcgtactgaaagtggtagtttgcctggcggggggcgacgaccagaatggtgccgatgcgggcggaagcagtggccacagcgctgcggttggcattatcgcgctgcgcatcactgagggcctgatcaaaccagacaatgcggtagtagcgctctttttcatctgctggtcccttatagaagaagcggatcacttcgctggcttgggcgggtagcagcaagctggcgggagtgagtagcaactcgtccggcttgtccattgagataacctgcccgtcgtcaagcggtgaagagagccgttcgagacggatattgataaggcgaccactgtcggtactgtttttgatcgttttgctcagcgtgctgctgtcactgttcataaacgatgatatatcgccgacatccagcgcctgggccggagatattccggataacagcagagcgagaagcagaaggtgctttttcataacaattccgtccaggaataaagcaggggggctacccctgctggtacatcagagagattaactggtccaggtcgcgtcgaactgtacgctaacgtcgccgctccagatgccttccggtagagtgctgtaatcggttactgcggtggtaccattggtggtgccgctgatgatggagaaagtgaaaccatcctgtgcggtggtacgattgctggcattgtaaccgtttgccagcgggctaaggttgccgcccagtacgccgttggcggtatcgatcatcacggtatcgccagttttttcgactgccgcgccgttataatccacgcccacattcagtgtggaacctgaggtatccaactgggttaatgtgttggtgataagacgtgaggtcagtttaaaggcggtagccgttgagtcaccctcgatagccacgtcaaatagacctttctgtgagttaaaacctttaatgccttcggcatactggaacgccaggctaccgagtggcgtcacaaccagcttactggtggtgtcttttttggctgttgccgaccaggtcgctacagcctgagctgttacgtcagcagcctganccacacccatgccggtaaacaccgttaccagagctattgccagaaccttttttttcattgtatttcttcccgagttgaattgaggacgtgatgtcccagtgagtcattttttaaaactaacttgcctggagtttactgaaccaacttatataattttgagtacagcttggcctctgcattacgccgatgggtatacactgtctttacactacaattttcaattctggcaatcgatttaggcagcattccctgagccgtcatgcggataatttccatttcccggtcagtgattttatctttcttaatatcttttctcaggaacctgccattaatcacataggccagttcttttctaatatcacgactcagtccagcgtataccacgcccctaatattgctgttgtaataccaataatttgctaaggcttctgactttctggccgcaatcaatacgacctgtttcccctttaccgcggataaccactcattatcacggtttataaattcagttaaagaatccgtattgagattgataaacacgaaatcttttctgattttctccagcgatagataaattaatctgtcgatatccacaatcagttcagatagtcctttatagaagtaggcgtcatggggagaccagatgtatttatcagaacggttttgacattccatatggttttcaacctcatagtccctgctgtaatcattttgccatgtcactactttccaaacctgtaatttttacaggtacattcagtttctttagtaaatcggaagtaaataagatacgtagcacatatcaatataggttaaacgagattaagttttaattatttcgattaggtttaaatttatgtttttttcctgatgagtgtcaatatgtgaacagaaaatgaattccatggttaagtcaatatttacaaaaaatgaaaatatngcttttttgataagaagaaaaagacattcagtttcataaggttattggcaatataacgttcaattcttacttgcattttatattagccaggaactttgccctgaggtgttaggaatagtcttaatgtgttgtgtaatggactagtaaaaaaacaagtctaaatgataagaaatagaatataaaactatcatgagtcataattaaagatgatttgccaatcagtaaggtgttttaatggattaacatgccgcacaaaatggttatgggtgttcatcccaataagtgatgaaaaattaaacaggtgtaagtacgtcatctgtccggtaagccccctaagagccagattaagtgaagttaaacgaagactgccagttgtcaccggaacgatggcctctttgccagggcactgcattcagtcatctgtgcgcgttactctaactggcactcgaacgtcggcgacggggttaccggtggatcaggccgttcctgtggcgtaaacgtttttatgtcagtaccaacagatttaccacatttatcatcttaacagtttgagtgtaaatgcaggctgcgtcgcaaagggaggaaactgagtggcgtgttcagtctaaaagagggttgatgccagcatacaggggcgaagctggtcaacaagtcaacattaatataatggaatattcggagagaaacgtcaggcagttgaccttaaatgaacaggaagatacatccccaggaaaattaatgctggtgtaataaatacaccaacattaatccggtctgattattaatcagacaaatatcgttaattcgtcgaannnnaaatcaacgttttttcttacgaccctgaacggccttaaagcgtggattagatttacaaatcacatatagccgtccttttcgcttcacaatctgacagtctggatggcgttcttntgcggtacgcagagagttaaggactttcatcacgccccctttttcgtgctaacaaaacgaccaaaacgttgggtgaatcgtgcaacatttccttctgatgccactgttctcagcttccctgtatagaacgggtgcgatttcgaagagacatcaattgttacgtacggatacgttacgccatccagctcaatctcacggtctgttttgatagtcgagccgattttaaagtactcatcaacactggtgtcgtggaacaccacagtacgatactcaggatggatattgggcttcatcatttttacctgttatgttataacataaccacaaagatacatgctcatccggatcatttcaacacccaatccctgtgaccattagtggtatgtggaatttcctcaacggggaagtctggcattgttaacagccattggcgacgctcccataaacgcctggatgagtgattgatgatagtttcgctgagagtatggatttttcgagaatggaggttatctccactttactggccgatgatttatcgcagtatgattgattacctgacagcgtgtattcctctcccacggatataataattacttacaaaaagggagaggatgcatattttaaatatcactgaagtgaacagtttattgccgttattaatagaaatggaaaaataaataggcgtat

SEQ ID NO: 107 - DNA, 1703 bp, Escherichia coli
  Strain O55:H7
aaacaacgatattaatcagtttatgactgatttgttgtactttattctctttcattggtacttcctcgctttaaaaaagagcgcacttcgtaagtgcccttatataaataacgagtttggtcaaccaattttttgacatgtatcacaaatttgaatagatgtattacatcaggcatcttttattgccccaacgtcattgatatatgtcgcctgaagtcagttccgggaatgagtctgatctcaagactggcccagtcctggcgttgattggcgctgaggagcatatcgcatctcatcataatgtcgtatctcctggggtgttatacaagatatcgttgttggtaacctgggcgaggaattgagctctattaaaccgtcaactatgccggatacatactagattacactgcaggcacgccttatgagagaacgtgccgcagtgacgggttaattatctgaaagaatttgtgaggctgtatcggttactcattgatttgatagttttactctcgggagagtaatagatatttaatccattaacggaaaccagccagttcctttcgatgcctgaatttgatcccatagtttatccggaatggttaattcaggaacaagttgtggattaagggttgtttgaatttcatggcctctacctgattcagctaaagtcacccattctggatttatcaccagccctttaccgatcgcaacaagtggcaggccagtggaaattgcttcttgagcctgagacggtgtgcgtattttacctgcagcgattaccggcactctgcctgcaatatgatttaaaatcaattcaatagttcgggggccatttggcgactcaacagggtagctatcgttaatactgaccagcgaggtatgtatatacgaaataccggatgaaatgagccgatcaaggagtttataagtatcctctatccgcagcccccctgttgcagattcttcaggagatattctgtaaccgatggcaaagggctttgtcgcatattcatagactacattttttacttcctgtaatacggccagcgggaagcgcatacgtccttcgagatctcctccccatcggtcattacgctggttaaatagaggggagaaaaaattctgtagaaggaatccgtgcgcaccatgaagttcaatgccatcaaaacctgctttaatcgccctttttgtgacatctccgaatgctctaatggtttcctgaatttcgttttcagtcatttccctgctttgtaccactctcttcataaagtcaccagattttacgcttgatgcgctggcactaataacatcgttatttggtacaagctccgggatggctttattaccggcgtggaaaatctgcaaaatagccggagcaccgccacttttggctgccgctgctaacttttcaaggctgttaatgaaacggtcgtcatacgcggcaaattcatgagtaaacccaatgccgcttggcgtgacataggtacatcctgttattactaaaccaacattttgtgagcgacgtttataaaattcgagttcttgctcagagatggttccatcaggattcgctgaccaggtcgtcataggagccataacgatacgattacgtagctttattttttctgtcagcataaaaggagaaaacaatgatgggtgtttatttgtcataacaatacctcaaatgtttatctgattttgat

SEQ ID NO: 108 - DNA, 114 bp, Escherichia coli
  Strain O55:H7
  modified_base (111)..(112): a, c, g or t
atgttttaactggttagttgttgccagctttggaaccaagagttctggctttatttataatccctttaaagggtttctaataattgagttgctgcttttttgttttttaannaa

SEQ ID NO: 109 - DNA, 14041 bp, Escherichia coli
  Strain O55:H7
  modified_base (3381)..(3381): a, c, g or t
  modified_base (3758)..(3761): a, c, g or t
aattttattattgttgtgtagtcaataaaggataaatgtcagggagataagggatctccctgtaaaattattacaaatgtgttttataaaaaggaattaatttatcgagtgcctgtttcacaggttctggcttatcatacaggtcgtaatgtgaataaccttcaaccacgaccagctctttatgttttgaagcagcgcggccaataatttcgcagccgtcacggtaggcaccaaatgcgcccactctatcgcccaccacaaccattattggttgagttaacagcacttctgcaagatgaaatgcatcccaacccacggcaacagtctgatgtgagaatagcgaacgatttaccccattaggtgcatagcctcgtggcgaacgataatattctgtggcttcaaaaaggtctatttctgttagtcccgcttcaagagctgcatccggagaagaggggagtaaatcatctacgcgaagttttgcgccgttagcttcgtctgttctttgttgcgccattgcttcaagtgctccgataggattaaacgctgtaaatccctcacgcataagacgcccgtagtttgcacccgtgacagtaccaatagctttaattcggcgttctgtcattgcggcattaatggcatatccacctccaccacaaatacccagtacaccaatacgcccggcatcaacgtaaggtaagctggtaaggtaatcaacgacaatgctgaagtcttttactcgcattgttggatcttccagataacgcggttccccaccgctgcttccctgaaaactagcatcaaaagcaatgacgataaagccagcttttgccagggcggcaccatacacactacccgatgtctgttctttgcagcttccaattggatgggcgctgataatggcaggatgctttttttcactattaaaatcgtcagggaaatagatatcagcagctatatcccagtaagtgtgttttatcgaaacagttttcatttcaagctccggggatttgcctaaacagatttaaatatcatttctattatccgcaactggcatttgtgttcatatcgagaacggcgtaatagtatgacttgtattggttatcatcaatggtctaatatctatcacagtgttaagttaaggtttacaatgatgaaaatagagccttcaattttgccttctcttgcctggtttgcgctgattgttcgtgccggcagtttttccagagccgcttctgaaatgggtattacgctggccgcattgtcccagaatttaaaatctcttgaggaacgtcttaacaccaagctgatataccgtacgacccgcaatatgtcgcttactgaggaaggacagcgtctgtatgaagtgctggtgtcggctttggggcaaattgatgatgctttgaaagatgttggtgatacccaacttgaacctacaggcctgttgagaataaattcctcccgtgttgcagcacggatgcttgttgagcctcatattggcgagtttcttactcgttaccccaaaacaaagatagaactcattatggatgacggtttatctaacattattgcggacggctgtgatgtgggcatacgtcttgagcaaggactggatgagcatatgactgccgttcctgtttctccgcttattaaactggttactgtggcatcgccagattatttaaaagaacacggtattcctgaaacgcctcaggaactgagtaaccataattgccttcggttgcggcataaaagtagcggtgcactctctgcatgggagttttctaaggttgtggggggtaatgaagagttcgaaatagaggtttcaggtaagtatatttctaatgatgacgaaagcatgatacgaatggcgctgaatggaacgggtatcattcaacatctggattttgcaatcgctgaacatatcaatgcgggcaagttacagccgattcttgaggattgggctgtttcatttcctgggttttatatttatgtttcatcacgggtgagaatgccctctaaagttcgtgcttttattgattttatggtggagaaaagagtaaaactcgaaaattgatgatatgtgtaattgatggttgctctgggcgaatatcggtaagaggaataacgtaatcattaggatgcgtttacataataaagtttctgataattaatacttattttctatacggccataatatcaattatcattatcaccagtaatgtggttaaaataatagtatctatgaccgctacggttaacggtggttattttgggaggcgttaacacgtagcggcttgtagttgtaagtcttgaacaggtacaaagcctgaaatcaggaggatatcgctatcaaacttcctttatttcttctcgcagtttcgcatcttatagaagaatcctgtatttccatcttccacgatgaagcgatcgttaaaagttggacgacgaataaatgtcactccacctattgttgctttttgttttataccatcatcaacattttccagatctggagagtacaattgatctccatttggcatttgaacgatgaaattgtttccattatcgagaactgttgcggattttgacagaatttgagtagcggtatccaggctggaaatcctaatgtcacaaacatatttgcctggccccagatcttcttctgcaaatacaggtaaggaaaataatgcaaatgcgaggatgagattcttattcatgcaaactccaggaagatcaataaaagcaatatgttacataaagagcacgtaaatgaaaagagcgattggttaatgagtaatgctattaatccccgcatggcctacttttcattggctgcggtgttgaacctcattgaatatgggcaagactctgactgagtgaccgacgtaaataggtagatgcataatcgcttaccgccctgtaactgcaaacggtgcccaggcttctggctgaataccacggctttgcatccacggaacggcgtgtagctgctgattgaaagggttaacttcaacctggtttaccgctggaacgacgttattaaaggcgataaggtcagccagtcggtcaggatggaagttactgacgccaatagcgcgaattttaccggcctgttgcagctcttccatggcacgccaggcaccgtggacatcaccgtaaggctgatgaatcaaatacaggtcaacgtaatcaagttgcagtcgattcagagagcgttcgaactgggctttggccccttcgtaactggtatcctgcaaccagagtttcgtggtgacaaagagttcgttacgggcgataccgctttgtttcagtgcgttcccgacctggggttcattttgataggaggcggcggtgtcaatcagtcgataaccggtgttaanagcgtcaatgaccgctctttcgcattcggcggcatcggtcatctgaaatacaccaaagcccagcaggggcatttcaataccgttattcagttttactttttgcatggtgttatccttccgttatcgttcatgagaagcataacgtaaagagaagagctcgattagacggcaggatttgtcaggggttatgaacgaaattcataaatctgtttgagtgttgcgatgggtagtgcaagttcgatatctccgcaatttacagtccgatgaaggaaaatgaatatccataaaaaatatatcggtttatcctggcgtatatacctacttcgacgtatttccaatagttgctaattaaaggcaggtcattattattcactctnnnnaatgaattattcactgtccgcagagtaagaaatataacttaagtatctatttaatgacttgcacaaaaagctaaattttcacccataaataaaaatataatcccgcgcccaaccacctgatgagtggctacaggcactggatatattaggtggcggtgtactttcttacataaaggtatttccttttctgcggaaaaggaaaccgggaaatccccggtttttctgacaagcagacgccattatttgtgtctgcctatgttcgttaattcgttcatcaggaaattatctcaatgtcacgttataaaacaggtcataaacaaccacgatttcgttattcagttctggcccgctgcgtggcgtgggcaaatatctctgttcaggttctttttccactcgctgtcacctttaccccagtaatggcggcacgtgcgcagcatgcggttcagccacggttgagcatgggaaatactacggtaactgctgataataacgtggagaaaaatgtcgcgtcgtttgccgcaaatgccgggacatttttaagcagtcagccagatagcgatgcgacacgtaattttattaccggaatggccaccgctaaagctaaccaggaaatacaggagtggctcgggaaatatggtacagcgcgcgtcaaactgaatgtcgataaagatttctcgctgaaggattcttcgctggaaatgctttatccgatttatgatacgccgacaaatatgttgttcactcagggggcaatacatcgtacagacgatcgtactcagtcaaatattggttttggctggcgtcatttttcaggaaatgactggatggcgggggtgaacacctttatcgaccatgatttatcccgtagtcatacccgcattggtgttggtgcggaatactggcgcgattatctgaaactgagcgccaatggttatattcgggcttctggctggaaaaaatcgccggatattgaggattatcaggaacacccggcgaatggttgggatatccgcgcagagggctatttacctgcctggccgcagcttggcgcaagcctgatgtatgaacagtattatggcgatgaagtcgggctgtttggtaaagataagcgccagaaagacccgcatgctatttctgccgaggtgacctatacgccagtgcctcttctgacactgagcgccgggcataagcagggcaagagcggtgagaatgacactcgctttggcctggaagttaactaccgaattggcgaacctttggcgaaacaactcgatacggatagcattcgcgagcgtcgggtactggcaggcagccgctatgacctggttgagcgtaataacaacatcgttcttgagtaccgcaaatctgaagtgatccgtattgctctgcctgagcgtattgaaggtaagggcggtcagacactttccctggggcttgtggtcagcaaagcaactcacggactgaaaaatgtgcagtgggaagcgccgtcattactggctgaaggtggcaaaattaccggtcagggtagtcagtggcaagtaacgctcccggcttatcgtccaggcaaagacaattattatgcgatttcagcagttgcctacgataacaaaggcaatacctcaaaacgcgtgcagacagaggtggtcattaccggagctggtatgagcgccgatcgcacggcgttaacgcttgacggtcagagccgtattcaaatgcttgctaacggtaatgagcaaaaaccgctggtgctgtctctgcgcgacgccgagggccagccagtcacgggcatgaaagatcagatcaagactgaactaactttcaaaccggctggaaatattgtgactcgttccctgaaggccactaaatcacaggcaaagccaacactgggtgagttcaccgaaactgaagcaggggtgtatcagtctgtctttactaccggaacgcagtcaggtgaggcaacgattactgttagcgttgatggcatgagcaaaaccgtcactgcagaactgcgggccacgatgatggatgtggcaaactccaccctgagcgctaacgagccgtcaggtgacgtggttgctgatggtcagcaagcctatacgttgacgttgactgcggtggactccgagggtaatccggtgacgggagaagccagccgcttgcgatttgttccgcaagacactaatggtgtaaccgttggtgccatttcggaaataaaaccaggcgtttacagcgccgcggtttcttcgacccgtgccggaaacgttgttgtgcgtgctttcagcgagcagtatcagctgggcacattacaacaaacgctgaagtttgttgccgggccgcttgatgcagcacattcgtccatcaccctgaatcctgataaaccggtggttggggggacagttacggcaatctggacggtaaaagatgcctatgacaaccctgtgaccagcctcacgccggaagcgccgtcattagcgggtgccgctgctgaaggttctacggcatcgggctggacaaataatggtgatgggacgtggactgcgcagattactctcggctctacggcgggtgaattagaagttatgccgaagctaaatggacagaatgcggcagcaaatgcggcaaaagtaaccgtggtggctgatgcgttatcttcaaaccagtcgaaagtctctgtcgcagaagatcacgtaaaagccggcgaaagcacaaccgtgacgctggtggcgaaagatgcgcatggcaacgctatcagtggtcttgcgttgtcggcaagtttgacggggaccgcctctgaaggggcgaccgtttccagttggaccgaaaaaggtaacggttcctatgttgctacgttgactacaggtggaaagacgggcgagcttcgcgtcatgcctctcttcaacggccagccagcagccaccgaagccgcgcagttgacggtcatcgccggagagatgtcatcagcgaactctacgcttgttgcggacaataaggctccgaccgtcaaaacgacgacggaactcaccttcaccgtgaaggatgcgtacgggaacccggtcaccgggctgaagccagatgcaccagtgtttagcggtgccgccagcacggggagtgagcgtccttcagcaggaaactggacagagaaaggtaatggggtctacgtgtcgaccttaacgctgggatctgccgcgggtcagttgtctgtgatgccgcgagtgaacggccaaaatgccgttgctcagccactggtgctgaacgttgcaggtgacgcatctaaggctgagattcgtgatatgacagtgaaggttaataaccaactggctaatggacagtctgctaaccagataaccctgaccgttgtggacacctatggtaacccgttgcaggggcaggaagttacgctgactttaccgcagggtgtgaccagcaagacggggaatacagtaacaactaatgcggcaggtaaagcggacattgagcttatgtcaacggttgcgggagaacacaatatttccgcttcggtgaatggtgctcagaagacggtcacggtgaaattcaacgcggatgccagcaccggtcaggcaaacctgcaggtagacgccgctgctcaaaaagtggcaaacggcaaagatgcctttacgctgacggcgaacgttgaggataaaaatggtaaccctgttccagggagcctggtgacctttaatctgccccggggtgtcaagccgcttacaggcgataatgtctgggtgaaagccaacgatgaggggaaagcagagttgcaggtggtttcagtgactgccggaacgtatgagatcacggcatcggcagggaatagccagccttcgaatacgcagactataacgtttgtagccgataaggctaccgcaaccgtctccggtattgaggtgattggcaactatgcactggcggacggcaatgccaaacagacgtataaagttacggtgactgatgccaataacaacctgttgaaagatagcgaagtgacgctgactgccagcccggcaaatttagttctgactcccaatgggacggcgaaaactaatgagcaaggacaggctattttcaccgccacgaccactgtcgcagcgaaatatacactcacggcgaaagtgagtcaggccgacggtcaggaatcgacgaaaactgccgaatctaaattcgtcgcggatgataaaaatgcagtactcaccgcatcatctgatgtgacttctctggtggcggatgggatatcgactgcgaagctggaggtgacactgatgtcggcaaataaccccgttggggggaatatgtgggtcgacattaagacgccagaaggggtgacggagaaggattatcagttcctgccgtcgaaaaatgaccatttcgtgagcggaaaaatcacgcgtacatttagtaccagcaagcctggtgtctatacgttcacatttaacgccctgacgtatggcgggtacgaaatgaagccagtgacggtgaccattaccgcggtggatgccgatacggcaaagggcgaggaggcgatgaactaatattaagaatatgaaagtaacattctaataaacaataatggcgttgacatcttcaacgccattatttattgaattgcctgacagtagtctcgttataagttcatttagatatagcgacagctaaaccggacgaacagggataaatatttcgcaaacaacatcattgctatccttttctacgaaatcttcattgtaataaaaccgctcaatatcactgccgttcactctggctaaccccctggcgggtaattccatcagatagaggtttcgcgcccattcagggtagtgctcccactcaccttcatagcggaaagaggcatacagtcctcggttaattgtccactctttcggcatctctgaatcggtttgtttgcataccgtaccggcaaaagtttcaactgtgagtaaatagaccgattttgttgacggttcaaacgtggagacgaaatagatatccgtcttaaaattcttcatacatctggctaaatgatgacgtcgcagtttgacttcttcatccggtgatttattcgacacttcaatatcatatttaaatgaattgccaaaaataggtgtctcaggaaagttgactaatctacactccgtcttttgctgttgacgtattaaaaaagaagggaagatatttgcgagatcccaataatcacggtggcggtatacacggggagagcagccgaataactttttaaattcgcggctgaatgactgctgtgaatcaaaatgcaaagagattgcaatatcaagcatagatttcgcggtgagccggacaagaatggcggcacgacaaagccttcgtttgcgaatgtattctcccaaaggcacatgcatgaaatttcggaacagaagctggatgttgcgtctgctgtagccagatttctgtgcgatatcttcgattgaaatagggtgctcaagattgcactcaatccactccaggagctgctgtagaatcttctgcctgatcatcacattctccgttaattctttgtcatatcgcacattttcgttatgccctgggccctaagtgtatcaaaaacagcaagggcgaaggcaaaagcactggtagcgtctgcttcgttgtccccgaaaatagagaggtttcagtcctacattattaatgaattttttgcataagtgatatcaaaatccacatactaatttgaggttacgttttaacgtagactcattgttcatgcctaatggagggactgacagtggaattttccgtattaagtaacaatctgaaaatgccgatgatgggatttggtgtttttcaggttaccgataaaaacgtgtgcaaacagtcagtgttgaacgctatccgcacggggtatcgactcatcgacactgcagcggtatacggtaatgaagatgccgtcggtgaagccgttcgtgaagctatatccgaaggtttatgtacccgagaagagttatttataacgtctaaattgtgggtgcaggatatgttgaatcaggatacggcagcagcaggtattgaagcatcattaaaaaaatcgggactagaatacttcgacctctatttattgcatcaggctatgcgcgattatttcagtgcgtggcgtgcactcgaagatgcctatgaagagggcaaattaaaagcgattggggtttccaatttctatcctcatgttctggcgaacttttgtgaaacggtaagagttaaaccgatggtcaaccaggtcgagttgcatccctattttgcccaaccagaggcgctggcaaccatgaagtattataacgtgcagcctgaagcatgggctccgttaggtggtggacgacataaaccctttgaaaataatctgcttcagagtattgcagatgcccatcaaaaatcgatttctcaagtcattctgcgttggaatattcaacggggagtggtcgttattccgaaatcgacacatcaacagcgtatcgaagaaaattttgctatctgggatttctcactgacagagaaagaaatggcacaaattagttcgcttgatttgggttatgttggggagtcggtaaaacattttaatcctgaatttgttcgtggttgtcttgctgtaaaaatacatgattgatattaatcatgtattttacctgagacgacaagaatcttttaacaggggagtgatattgatcttcactctgtcatatctccggtaatatggcgtcaggcttcatcatcagaaagggggcctgacgcctgaaaaagtgaacaacagacagtgttcggattatcaatattcagtttttaacgttgaactggattcattactgcgttgtttaagaatttcccgcgccgaatctgccattatcatgacagcacctgccagcatcagagtatctttcaataccagacgaccagcaccggataaataagggaaaccatgatgagcgtcacccaatgcgggtacccatgcctccggggtggtgattaaaaatgagagtgttaccagcggtgtggtaaatgccatcagccctcccaataaacctaaccagcgattgacaggattagccaaaaccagcagagcaataatcacctccacgacgccaagaccgttggaaaaaccataggtattattggccgattgccatgcccttgcttctggtttgtattcgccttcgtgagtcagatactgtttatagtcttccgggtgttcataaaagaacgacattagtggactgtttgcgacgaatggtgtaatgctgtctgcctcgtaagggacaaactttaataacccaatccacataaaaacaatcgcaatactcagacgaatcaatgtcaggccaattttatctccccgacttaacaggtgcaggtatttttccattgtgaacatccttatttatacaatactgctgttgcggttgaattattatcaattcgcatcgatgtgactttccaggatgaagcattatattttctggctatatcagcaatggcatcctccagaactgtcggtgatgctgatactgacgagacgctgatatgtttcagaattattttatcatctgcattggtggaaaatgccataacgccagataatagtgttgcaaataaaacgggttttttaaacatataaaataccatcaatgaagtgattaagaagttatagagtaacagggaattaataagattcttttctctgagacgccagaatatttgttctggcgtctgattttgagtttatttgactaatgaaaatagatcattgagtgattcgctcatcgacggatgagtaaatatctgatcgcgtaatatgctataaggcagcccggcatccatcaccattttcactatattaatcatctcgtgggagtcaacacacagcagtgatgcccctaatatacgttgggttttattatcaacaatcgcttttaataccccacgggtatcgttcatcactctggcgcgcggaattgcagctacaggcaatgtcaccacctgaatatcagcaccactctctctggcttgttcttctgtcataccaaccctggacaggggcggtgtcataaatacggaataaggcacatttttccgatcatcagtactacgtttgccttcacccagtaactcatcacgtacaatgcggtaatcatccagtgatatgtaagtaaattgcagcccgccggtaacatctcccatcgcccaaatattgtctgcggtggtatgtaatcgcttgtcaacgacaattgccccgcgctcgtttactgcgataccggcattttctggatgtaacgaagcggtagccggttgacgaccggaagctattaacagtgcatccaccgccagttgggcgtgctcgctatgcacttgcacttgattttcatggtgactgattcgctccacatgggcattgaggataatatcgacgccctgatcgcgtaaaatcgtcgcgatattatcagcaatatcccgttcttcccgaggcaaaaacagcgaagctgcttctaaaatggttaccttgctgccaaaattagcgaacatagaggcgaactcaacgccaatatatccgccgcccaaaatacctaaatgcccaggcaattcttttagattaagtaatccggtgctgtcatatactcctggcgtggtggtaattccaggaattggcggaaccacggtttgtgcaccggtattaataaaaattttctcgccatgaatttccagatttccctcaggccgatgaacacgcaggctatgattattgataaactccgcctggccgttgatcacgtcgatattgggcatatctgcaagattatgaaaattcttattacgtaaaaaattaaccacttcatttttacgctgtatggctcggacaaaatctgtgtgctgctgtgcgtcatgaaccaatgttttggttgggatgcagccgatattaatacaggtcccgccatacattgcatttgattgttcgatgagagccactcgccaacctgcttttgccagcgtgacggctaatgtttttccagccttgccaaaaccaataatcactgcctgatatttattcatgatgatttcctgtcgaaacgcgttcatttgacatcatgactatagacgcaaaagagcaaataacatttcttcacaacgcttgatattttgtcttatcgtctggtattttctttttcttaatcagaatcacaaaacaaaaatcatgattaactatttgatggtattagattagttgtttactaagattgttggtgtttgtaatcaaaaaccactcaggagtctgatatggatgcccttagccgtttgttgatgcttaacgctccacaaggaacgatcgataagaattgcgtgttaggaagtgactggcagcttccacatggtgccggggaattatcagttattcgttggcatgcgttaacgcaaggagcggcgaagctggaaatgccgacgggagagatttttacattacgcccgggaaatgtggtcctgctaccacaaaattcagctcatcgcctgagtcatgtcgataatgaatcgacctgtattgtctgtggtactcttcggctgcaacattcggcacgttattttttaacgtctttgccggaaacgctgtttttagcaccggttaaccacagcgtggaatataactggctgagggaggcgatcccgtttttacaacaggaatccagatcggcaatgccgggagtggatgcactgtgtagccagatctgcgctacattctttaccctcgcggtgcgtgagtggattgcacaggttaatactgagaaaaacattctcagtttgcttctgcatccacgtcttggtgcggtaatacagcaaatgctggaaatgccaggacacgcctggagcgtcgaatcgctggccagcatcgcccacatgtcccgggcaagttttgcccagcttttccgtgatgtttccggaaccacgccgctggctgtattaacaaagttgcgtctacaaatagcggcccagatgttttcccgggaaatgctccctgttgtggtgatcgctgagtcagtaggctatgccagtgaatcatcttttcacaaggcgtttgtccgcgagtttggttgtactccgggagaatatcgggaaagggtcagacagcttgcaccctgaataaaaccgccagaaatcagggcaaagataatccgcattccgggagttgtgagcctttcaactatttctatttccaacggtggtttgggctttatatatttttttctgatggactctagctcagt

SEQ ID NO: 110 - DNA, 37 bp, Escherichia coli
  Strain O55:H7
  modified_base (35)..(35): a, c, g or t
aaaaaatgcaaactaaattgcttcaattaaataanat

SEQ ID NO: 111 - DNA, 74 bp, Escherichia coli
  Strain O55:H7
attacttgatacgtgattattgtcggtgatttttttgtataccatcagtgtatatctcaataacccctgaataa

SEQ ID NO: 112 - DNA, 86 bp, Escherichia coli
  Strain O55:H7
  modified_base (63)..(64): a, c, g or t
  modified_base (70)..(72): a, c, g or t
gtataagggatgtagccatttttaaatggatttcttatgccaaaaatgatcgtcgatttcccnntaaaannngagcgatgccgaaa

SEQ ID NO: 113 - DNA, 110 bp, Escherichia coli
  Strain O55:H7
  modified_base (47)..(48): a, c, g or t
  modified_base (74)..(75): a, c, g or t
tattgcatttgaagtttggatgaaagattatcatttgtcatacaaannaggggtggtatgttgctagccaattnnaaaagaacgccatatttattgatgattgatccccg

SEQ ID NO: 114 - DNA, 32 bp, Escherichia coli
  Strain O55:H7
  modified_base (2)..(5): a, c, g or t
tnnnncaattaaataaaatcccgactattact

SEQ ID NO: 115 - DNA, 59 bp, Escherichia coli
  Strain O55:H7
  modified_base (3)..(3): a, c, g or t
  modified_base (8)..(9): a, c, g or t
tcngtganntttttgtataccatcagtgtatatctcaataacccctgaataagtagctc

SEQ ID NO: 116 - DNA, 46 bp, Escherichia coli
  Strain O55:H7
  modified_base (33)..(34): a, c, g or t
atgtagccatttttaaatggatttcttatgccnnaaatgatcgtcg

SEQ ID NO: 117 - DNA, 36 bp, Escherichia coli
  Strain O55:H7
atgccgaaagaaataaaattagttattgcatttgaa

SEQ ID NO: 118 - DNA, 28303 bp, Escherichia coli
  Strain O55:H7
  modified_base (29)..(30): a, c, g or t
  modified_base (36)..(36): a, c, g or t
  modified_base (4845)..(4845): a, c, g or t
  modified_base (6948)..(6948): a, c, g or t
  modified_base (7192)..(7195): a, c, g or t
  modified_base (7211)..(7214): a, c, g or t
  modified_base (9378)..(9379): a, c, g or t
  modified_base (9381)..(9382): a, c, g or t
  modified_base (9479)..(9479): a, c, g or t
  modified_base (10224)..(10224): a, c, g or t
  modified_base (12286)..(12286): a, c, g or t
  modified_base (12289)..(12289): a, c, g or t
  modified_base (12292)..(12295): a, c, g or t
  modified_base (13185)..(13185): a, c, g or t
  modified_base (16075)..(16075): a, c, g or t
  modified_base (16356)..(16356): a, c, g or t
  modified_base (17283)..(17283): a, c, g or t
  modified_base (21087)..(21088): a, c, g or t
  modified_base (24660)..(24660): a, c, g or t
  modified_base (28165)..(28165): a, c, g or t
  modified_base (28169)..(28170): a, c, g or t
  modified_base (28174)..(28175): a, c, g or t
  modified_base (28263)..(28263): a, c, g or t
caaataaggggtggtatgttgctagccanntaaaanagaacgccatatttattgatgattgatccccgggtggggggaaacatcgggaataaatgggcatgaagtaatggagtattagttgtgaatgtcaatttctttgtcacctgtattggtgacgccctgaaatcaagaatggcacgagactccgtgctgctactggaaaaactcggctgtcgcgtaaatttcccggagaaacagggatgctgcggtcagcctgcgatcaatagtggttatatcaaagaagcgattccagggatgaaaaatctgatcgccgcactggaggataacgacgatcccattatttcaccggctggctcttgcacctatgccgtaaaaagttacccgacgtatctggcggatgaacctgaatgggcatcacgagccgaaaaggttgccgcgcgtatgcaggatctcacctcttttattgttaataaattaggggtagtcgatgtaggtgccagtttgcaagggagagcggtgtatcacccatcttgtagcctggcccgtaagctgggggtgaaggacgagccacttacgctgctgaaaaatgtgcgtagactggagctgttgacctttgctgaacaggatacctgctgcggatttggcggcacgttctcggtcaaaatggccgaaatatccggcgagatggtgaaagaaaaggttgcgcacctgatggaagtccgccctgagtatttaattggtgctgacgtgagttgcctgctgaacatcagtgggcgattacaacgggaagggcagaaagtcaaagtgatgcatattgctgaagtgttgatgagccgctgaggatataaagatgttgatcaaaaccagtaatacagattttaagacacgcatccgtcagcaaattgaagatccgatcatgcgcaaagcggtggcaaacgcgcagcagcgtattggggcaaatcggcaaaaaatggtcgatgaattggggctctgggaggagtggcgcgatcgggccgcccagatacgtgatcatgttctgagtaatctcgacgcttatctgtaccagctctcagaaaaagtgacgcaaaacggcggtcacgtctattttgcaaaaaccaaagaagacgctacccgctacattttacaggttgcccaacgcaaaaatgcccggaaggtggtgaaatctaaatcgatggtgaccgaagagattggtgtcaatcatgtgttgcaggatgctggcattcaggtgattgaaaccgatttgggtgaatatattctccagctggatcaagatccgccctctcatgttgtggtcccggcaattcataaagatcgccatcagatccgtcgagtgctacacgaacgtctgggctatgaggggccggaaacgcctgaagcgatgaccttattcatccggcaaaaaatccgcgaagatttcctcagtgctgaaataggtattacgggctgtaatttcgcggtggcagagacaggttcggtatgcctggtgaccaatgaaggtaatgcgcgaatgtgtaccacgctgcctaaaacgcatattgcagtgatgggaatggagcgtattgcccccacgtttgccgaggtagatgtattgatcaccatgctggcgcgcagtgccgttggtgcacgtttgacgggatacaacacctggctgacaggacctcgcgaagcggggcacgttgatggtcctgaagagtttcatctggttattgtcgataacgggcgttctgaggtgctggcctctgaatttcgggatgtgctgcgctgtattcgctgcggggcttgtatgaatacttgtccggcatatcgccatattggcggtcatggatatggctctatttatccagggccaattggtgcggtgatttctccgctacttggcggctataaagattttaaagatttaccctacgcctgctctttatgcacagcttgtgacaacgtgtgtccggtgcgtattccgctgtcaaaactgattttgcgtcatcgtcgggtgatggctgaaaaagggatcaccgcaaaagcagagcaacgggcgataaaaatgttcgcttatgccaatagtcatccaggattgtggaaagtcgggatgatggccggtgctcatgcggcaagctggtttatcaatggcggcaaaacaccactcaaatttggcgcgattagcgactggatggaagcacgcgatcttcctgaagctgacggagagagtttccgtagttggtttaagaaacatcaggcgcaggagaaaaagaatggataatcgaggcgaatttttgaataacgttgctcaggcactgggtcgcccgctgcgacttgaaccgcaagcagaagatgcgccgcttaataactatgctaacgagcggcttacccaacttaaccaacagcagcgctgtgacgcgtttattcagtttgccagcgatgttatgttgacgcgctgtgagctgaccagcgaggcgaaggcggcagaagctgcaatacgtctgtgtaaagagctgggagatcagtcggtcgtgattagcggtgacacgaggctggaggaattagggattagcgaacgtttgcagcaggaatgcaatgccgttgtttgggatccggcgaaaggtgccaagaatatctcgcaggcagagcaggctaaagtgggtgtcgtgtatgctgaatatggtttaaccgaatcgggaggcgtggttcttttttccgccgccgagcgtgggcgttcattgagcctgctcccggaatcatctctttttatcctgcgtaaaagcactatcctgccgcgtgtagcgcaactcgcagaaagattgcatcagaaagcgcaggccggtgaacgcatgccgtcatgtattaacatcatcagtggtcccagctcaacggcggacattgagcttatcaaagtcgtcggggttcatggtccggtgaaagcggtgtatctgattattgaggattgctgagagaggtatgaagtctggacataaacctgaagaaggcatacgaggttgaaaatagcgttaaggacaacctgacttaaccccgttccgtcatggttatgctcctcttctgtaaatatcctggcattactaatgccaggatatttacagtgaaaaagacaggcatccattcctgaaaacgggttcccttcccggtcattgtcacttcagctttatacaggcactctctatcagaatgctgtttattactgcccagagttttgttggtattcatctaccatttttttgacaagacaaaacattacagaaattacaatgcttagaaaaaatcccagagccaggcaaatggcagcagggtatttattttttatttctggtgagcttatagttacacagccatcaccgttcggatacaatgaccagttcctggtcaggtatatcatttttgtataaagctcactgttaattgctgaaggcgtttgtatctcatcgagaacttacctgccattatggtattctgacgcataccatttgataatagacgcctgcacgcgagatatttccgcttcagcagttggtaaatctctcttatctcctgaccattccagctttatttctctgttcttgacatctgggctggtgtgaaaaaatgtagtaattcgctgaataacatcttcagtcattgtggtctgacaggcaaagttattattgctatcacagttaacaagtatgccgggtgttgtctgatttatttttaggctgtaactcacttttatattatctttattgatatacagaaataaaagcaccattgccatacagatagctataataaaaaggataacaagaatctttttcttcagataaaataaaatctcaatcagatcgatatcctgtttgatttgttcactcataatatatccagaaaataaaatctgccgcagataaatgaattaatagtctatatcaggaatgttcgggttaaatatcagcaaaaagccagcatcatgaatactggatatttatagcctgcaggcagcatactgctgcctgcagggggtataacagtcgacaggggaaccgactgctttattcttaccaggtcacattgataccaactacaccctgtagcggattctcaatgtcgtcacctttggtgtagtcaaggcttgcatatgctcccatgtttttggtgatatcagcctgtacacctgcacccacgcggaatgctgcaccgtcaatgctggcattgacagactcatcacccagacggactttgttgccatcagagaattcgttcagtgcggccagattcagataaggtttaacgctcgcgttgcccacagcgaagtcataacccacgcgcgtaccggcctcacccaacacagagttatagctgtcagaatgaacgtccacgccgttgagctgataatccacaccttccagagtcagcgcagacagtttggcatatggctgaataaacaggccattaccgtcttcctaggtgtaaccgcctttaaccatcgcaccgaaaccattggtgttaaagtcagctttgatggtaccgccaccattcatcaggcgaacatctgccgtgttgctgtagtgaccaaactgtgcagcagtatcaatgaagataccgttgttatactggcggctcaggtaagcgtggaagctgtaaccttcagtgtcgcctttgctctgcatggtggtcatgtcacctttcgcagaagacatcgccacaccggccagccagctaccatcttcagtcatgaagcgggtatcaccacccagcattacaccgtttacatccaggtcataggatgcatttcccgcggtggtatgtttctgtttaccaccaaagtactgaatccatacgccncccttgtcattttcgctcagacggacagcatcctgacgggctgagagcgtgtcagcctgcagattagcaacgttagccggagctgctgccattgcctgaatcacggagctggcgttggatgctttatgcgtgttttttacgaaataaaagttaccatcagctccctgtgtcaggtcatattgatacagaccaccttccgttgtgcctgtggcttttagagtgctgtctttgccggtagaaataaatgccgtttgttcattgataagatccaatgaacccgcactgtaaacacgcaagtcaccgctcgctttaccgctgatatccagagtgttttcagaagaggcatcaacaatcagagtgccgttttgagaagcaaacgtgccagtattgactgtagccttcgtgatattaaccgtactgtcttttactgccagagcatcaacagttgaggatcccgtaacattccagacagactcgttttgcagagatacactggcatttcctgcccctgaaactttgcctttccagactgaactatcggaaagatttatatccagattactacccgctttatcgccgctattgaaagtataagcattaccttcccagtaagagcgggcaacgttcatgtttacatttgttgtggtagcggctgaattctcgctttcagaaagggccaggacatcagagtagatggttgaatcagcaacagacaaatttaaattttgcgttgctgaacctgtgccttgtgccgaagcagaggcataaattgtttgtttattattagccgccccaattactgagccatccttaatattcaggttgactgtatgaattcccgtcttattcccggcagtaactattgtttcaatccgaccattaataatatttgagccagcaagggtaatgttgtcggttgcatcaccttcaaaactattcaataagctacccttttgagcaaaaattgccgtggaggcgttgctggaactcttattaccttgagcatttatggttgtgccattaagcgtgacattatttcccttggccccttccagagatatccctgtcgcactacctttttcattttttgcaacgaaattaccgccattaacaacaacatcgccagttgaatcaatgaccattgcagtccggacataggtgccttcaccttgagctgtgatggtggagtctgtagcattaatcacaacatttttgttaccactaacttttacaccttcaacgaattttttgtctgccgttgattcagcagtaatatcatgaccagcaaaagcaacattaaggtcttcatctgccgcattaattgttacggctgtaatctgtttgtctgctgtattgctaataacaacatcttgatccagagtcgtcttatctttattcagcgtaaccgaatcagttgataccgcgttatcagcagcgaatgctggtgcagaaagagccataacaatagctgtcgctaatgcgctgcggtaaaatgccttactgtttttcatgaagaaattctccattctggtaactaatttcaatttcccacttatttatatttatgcagagataaaacctgcgtccctgcatttaccaccacggaatacctgttggtatttccgttttcacgcaatgtcatggcattcgttttttccaatgcatttccatcaccgtgaaatttattgctgctcagcagcagggcttcccgcaatgacatgctgtccggtattccccaacgcttttttagcgactgctcggcaagccatatctgtcttatccccgttttgagaaactgcgcactgtattcccagctgtgtccggcaagaagcaacgacaacaccttcttttgcttttccgggaagcgttctgacatgacgattgtctttgtgcggttattcacctctttcataaagacagagtaactgtccataactggcaaattttctgcatgtttcagccctgataacccaccagaggaatttgcaatactgatgacatgctctactgacattcctggtttcagtaacctcaggtttttgagaacgccagaaatactcacatccggtggcagaaaaaatggcgcgacgcacaacaccaccncgaatgagtgatcccgataaaatcggaaccacatttcagcgcattcggcaggtcgccctgccgatatcacgacactctgtggcctgtgccgcaatttattgcgtaactcctcttctgttccgatgcaggtaacattgccgacagaaccggttgatagagctgcgaactgcgctggtacaattcctgagggacagaaaagaacgaaacgcatccttccctcacagatgtcagtacgccagcacgnnnnacaggctgtacagcgnnnntcccaatcctgcagcccagagcagtagaaatattttggcccctacactgtagcgagtccgtacgcgccgcagtggggggtagtaacaacgctgttgtgtcataacaatcctggtctttttttagaaatattttttctttgtccgggaagtacttttccggaaatggcgtcagaatttattgattcaccaacggcaactttctctggataaagaattccggataccatgttctgcacatactgagtgagtcgatgagcggaatgttgtccgacatatcttgcatgtagccgtatattccgtttcactctgctgtcaccgcatcccgtatagagcagcctgaaatcgctcagagttcccagtccaagtttcattaatgcccgtgtggcaatcgcatgcagggtctttgaactgcgttgttcataacgggcaatctcactgaaactcatgccctgcatcagaatcttaagcacgctcaactcccgtgcagtcaggagccagaaatcgctcatatcgccgggcaaaggacgtagtaaccagcggataatttgattctgataacgactcgctgtcagcatggtgccgatgcgtgggaagccgttatacagacttgcagcaggagcattatcgaaccagtcggagtcaccggtcaggcagacctgccattgcccggcatcactccgcaagcggacaagacaagccagaagaactaactcccccgaaggaagcgaagggatatcagccaacagatagccacaggaggtctttaaaacgaattcaacctctgtagtgacgttgctgtacacccgcacgatatacctgtccgctgggatgagagactccagtgccagcctggtaaactgacaggcactgataataaccagaggcttcttcattcagactcgtccacgccatagctacaaaacctgacattttgattcaaaatgtcaggtttggtttaattgcctgaatatttaattttcttggaatataaatctaatttgtttgatttttattgtttttaatttggttgcatttaacaacatgagtgaaagttaatcactggtatgaccttggcggttaatcatttcaaatcatggggttattttactttagcgagaaatatcaacatgttatgtgttttattgaattgaatgggctgtttttttatggaagaattgaggaaaacgtaggaatctgacattttgaatcagaaggtactgttttaaagaggcttttttttccacacccctttaaatcgagcagcattactggctgtgtatctgacagtatgctggatatttcgatgacccagataatcctgaagtagtcgggtatcgacaccattgtcagccagagcaaaaccacaggcatgacgtaacatatgaggatgtgcttttacagctaatcctgcacgtcttccagcctcacgaatgatagaaaaaaatgttgtctgctgatagggcggcgtttccgggagagaaaaagccagtctccttcaactccgttttcaattaacttcctctgcttaagccacaacttgatcaaattatattcatcaggaagaagaggatgtgttgtcgagaaaccatttttaatccgccgaatattaagttgttttcctgatgcatcaatatcggataaacgtaaatcaagaagttcactggccctaaaaccgtgaatgaaagccatcataattagacagcgatttctttcaggaaaggacatgctctgggctgcatccatcagcctgtagacttcatcctgtgtgagatattttctcgtcatacgccaccgtgtacagttgtaaaaaagagaggcacacccagataagtatgcctgcaatcagaacgttatcgatgtaatctcattatctcattaataagattttttgaatagtagttctacgcaatagactaaatatgaactatttattgtgctgcttttctacaagccatttttaatgcgtgtttttatctacattgatgtgaaaaaataaatataaaagctatgaattacagggcgtgggggatgtgtgttacgtctaatgttttagtgatgtttagtagttttgagatatttgacgttatttcttataaggttgtttttattattcatcttattgattttatatgcattttgtcgttcaatgaagttattgtgtacnnannaaaaatttaatattgttcccgttaatttacaataacacattgttgtaagatattttttagtcgtaagtaaatcattactgatgggttctgctaatanattaaagattttctcttaaatagtttttttttgctttttttgtaaatatcaatttgtttatttttgattcatttgctggagagtatttcaacaatttttattttttttgcataaacttattaacaactttttattatcaattggaaatcaatgtaagctaaaatgttagcgaagcgataactttgtgctaaaaaatatttaagcatgatgattaattaaagaagagtaaaaataaatcactgctaataaattatacgaattgtgtttaaagctccacgttgttttggtctgacttatttttgtcctcgttacaagaacccttttcgtatatgctaaccgtgagcgggagtgaacaagtcaccatagccaggaacactagcggcgtaattcttaagctgagtggcatttcacctgcggtttatcagtgcattcatagtaccttcatcagcgagattgaacgagtcagcttagaatttgctggcgaggttgtcactatgaagcatgagagttacccctatgttttatataacgattctgtccccatacctggaacggtaactctcaatctgatcggttcctgagtcagttcaaatcacgactcatttttttcgctcttactggcatcccatttgccacaaaatatcccgccgtgctcctcggcaacgcttccttcccgcgaatcatatccgccattttctcgccaatcataatcgtcgtggcgttcaaattcccggtgataatctgnggcataattgacgcatccaccacgcgcaggccttccagcccatgcacgcggccttcgccgtcaaccacggacatctcgtcgtagcccattttgcaggtaccgcacggatggaaggcggtttcggcgtggttacgcacaaactcatcgagctgctcatccgtctgacattccgtgccggggctgatttcgcggccacgatactgatccagcgcgggttgatgcatgatctcgcgggtgatgcgaattgcgtcgcggaattcctgccagtcctgttcgtgcgacatgtagttaaacagaattgccggatgctggtgcgggtcgcgggatttaatccgcacatgcccacggcttggcgagcgcatcgagccgacgtggcactggaagccgtgctctttcactgcattcgagccgttatagttaatcgctaccggcaggaagtgatactgaatattcggccacgcaaattcctctcggctgcgaataaatccgcctgcttcaaagtggttgctggcaccaacgccggtgccgccaaacagccactccgcaccgattttcggctgattccaccactgcagggcagggtagagggaaaccggttctttgcactcatattgcagatacatctccagatgatcctgaagattttcaccgacgccgggtaaatcatgcaccagcggaatatcaaactcggccaacagttcagcgttgccgacgccagagcgttgcaggatctgcggtgaggcaatcgcgcctgcacataacagcacttctttgttcgccgtcgcgcgggtcggaatggtgctgtcgccttccagccactcgacgcccaccgcgcgtttacagtcaaaaataatgtgatcggtcatggcgtgagtacgaatggttaggtttgggcgcgatttggcctgatcgagataaccgcgcgcggtgctggcgcggcggccctgcggcgtgacggtgcgatccatcgggccgaaaccttcctgctgataaccgttgagatcgtccgtgcgcgggtagcccgcctgcacgcccgcttcaatcatcgcttcaaacagcggattgacgccgggtttggaggtggtgacgctcaccgggccgtcgccgccgtggtagtcgttctcgcccacgtcgcgggtctcggccttgcggtagtagggcaggcaatcgagataactccagttctccagaccgggttcttttgcccagttgtcgagatccatcgcgttgccacggatatagcacatgccgttgatcagcgacgatccacccaggcctttaccgcgtccgcactccatgcgacggttattcataaacggttcaggttccgtctcgtaagcccagttgtagcgtttaccctgtagcgggaatgccagggcagcgggcatctgggtgcggaagtcaaagcgatagtccgggccgcccgcttcaagcagcagcacggaggtattcggatcttcagtcagacgggtagcgagaacgttgccggctgagccggcaccaataatgatgtagtcaaattgcaaataaacctcctggttagaatatggactggaatttagccatctcaacctggatggacttcacctgggtgtaactctggagcgtcatcacgccgttctcgcggccaataccggagtgtttgtagccgccaacgggcatctctgccggggattcgccccaggtgttgatccagcaaatacccgcttccagctgatgaatgacgcgatgcgcgcggttcaggtccgccgtcacgatacccgccgccaggccgtagtcggtatcattggcgcggcgaatgacttcgtcttccgactcgtaggtcagaatggacatcaccggcccgaagatctcttcacgcacgatggtcatctcgtcgctgcaatcggtgaacacggtcggtgcaacccatgcgccgttatcgaggccatcgcctttcagtacatcgccgccgcacagtacgcgcgcgccttcctctttgcctttggcgatatagcgcagcacgttatcgcgatgcgggaagctgaccagcgggccgaagttagtttgcggatcgaaaacntcnccnnnncgaatgcgctcaacgcgcgccagaattttctgctcaaatgcggcgttgcatttcgccggaacgaagacgcgggtgccattggtacacacctgaccggagctgaagaagtttgccatcatggcgatatcggcggcgagatcgagatccgcatcgtcgaaaacgatcagcggtgatttaccgcccagttccatggtcacttctttcagggaagaggctgccgagttagccatcacttttttgccgctggcgacgccgccggtaaacgacactttggcaatgcccggatgctcggtcagatattgcccggtctccgcgcccacgcccggcaacacgttaaatacaccgtccggcaggcccgcttcgctgtaaatttcagccagctttaacgcggtaagcggagtgacttcgctcggtttgaaaatcatcgcattacccgccgccagcgccggggcggatttccacagggcaatctggatcgggtagttccatgcgccaatccctgccaccacgcccagcggttcgcggcgagtgtagacaaatgatgtctcacgcaacgggatctggctgccttccagcgacgggatcagcccggcgtagtactccagcacgtccgcaccggtaacgatatcgacggttgaggtttccgaatacgcttttccggcgtcgagggtttccagtttggcgagttcatcattgcgctcgcgcagaatatcgacggcccgacgcagaatacgcgagcgttccatagcggtcatcgccgcccagattttttgcccctgttgggcactcttcacggcgcgatcgacatcctcgcgcccggcggcctgcacggtcgccagcacgttaccgttggccgggttaatggtctcgaaggtgcgaccgctggtggnggaggtataaccaccatgtatataaagctgctgttctgccattcgggacatcacgtctcctcggttaatcggtgggtaaatgctgagtaataaagtgacgggtcagcgagtgtgcgagaggtttatccagcggtttgccgctcagtgccgcgcgcagccataacccgtcaatcagcgcggcaaggccgtagcccgcttcctgtgcctggtggcgcggcaattcgcggcgaaactcgctcaccagattcgacagcaagcggcggctgctgacctgctgtaaacgatagagcatcggctgatgcatactgctggcccagaacgccagccaggctttcatcgccgcactgctcacctgcgtttcatcgaagtttccgccaacaatcgcctgtaatcgctgctctgcactgccctgcggaagtgcatgtaatcgattcaaaaccgcgtcacgcagctgactggtgatatcgcgcatggttgcttccagcagaccatttttgtccctgaaatagtggctgatgatccccgtagaaacgcctgcacggcgggcgatctgcgcgatcgttgcatcgtgcatgcccacttcatttattgcttccagtgtggcgtcgatcagttgtctgcgccggatcgactgcatccccaatttgggcattttcgccactccattcatcagcgttgtttatctattaaagcggttattgattggacgttcaatataaaatgtgtcttaattgttacgaatttgattttaaatggtaacaataacagtggggatactggatgacagacctttcacacagcagggaaaaggacaaaatcaatccggtggtgttttacacctccgccggactgattttgttgttttccctgacaacgatcctgtttcgcgacttctcggccctgtggattggccgcacgctggactgggtttctaaaaccttcggttggtactatctgctggcggcaacgctctatattgtctttgtggtctgtatcgcttgttcgcgttttggttcggtgaagctcgggccagaacaatccaaaccggaattcagcctgctgagttgggcggcgatgctgtttgctgccgggatcggtatcgatctgatgttcttttccgtagccgaaccggtaacgcagtatatgcagccgccggaaggcgcgggacagacgattgaggccgcgcgtcaggcgatggtctggacgctgtttcactacggcttaaccggctggtcgatgtatgcgctgatgggcatggcgctcggatactttagctatcgttataatttgccgctcaccatccgctcggcgctgtacccgatcttcggtaaacggattaacgggccgataggtcactcagtggatattgcagcggtgatcggcactatcttcggtattgccactacgctcggtatcggtgtggtgcagcttaactatggcttgagcgtactgtttgatattcccgattcgatggcggcaaaagcggcactgatcgccttgtcggtgataatcgccactatctcggtgacatccggtgtcgataagggcattcgcgtgttatcggagcttaatgtcgcgctggcgctgggattgatcctgttcgtgttgtttatgggcgacacttcgttcctgcttaatgcactggtgctgaatgttggcgactatgtgaatcgctttatgggcatgacgctcaacagttttgccttcgaccgcccggttgagtggatgaataactggacgctcttcttctgggcatggtgggtggcatggtcgccgtttgtcggcttgttcctggcgcgtatctcgcgtgggcgtaccattcgccagttcgtgctgggcacgttgattattccgtttaccttcacgctgttatggctctcggtgttcggcaatagcgcgctgtatgaaatcatccacggcggcgcggcatttgccgaggaagcgatggtccatccggagcgcggcttctacagcctgctggcgcagtatccggcgtttacctttagcgcctccgtcgccaccattactggcctgctgttttatgtgacctcggcggactccggggcgctggtgctggggaatttcacctcgcagcttaaagatatcaacagcgacgcccccggctggctgcgcgtcttctggtcggtggcgattggcctgctgacgctcggcatgctgatgaccaacgggatatccgcgctgcaaaacaccacggtgattatggggctgccgttcagctttgtgatcttcttcgtgatggcggggttgtataaatctctgaaggtagaagattaccgccgtgaaagtgccaaccgcgataccgcaccgcgaccgctggggcttcaggatcgcctgagctggaaaaaacgtctctcgcgcctgatgaattatccgggcacgcgttacactaaacagatgatggagacggtctgttacccggcaatggaagaagtggcgcaggagttgcggttgcgcggcgcgtacgtggagctaaaaagcctgccgccggaagagggacaacagttggggcatctggatttgttggtgcatatgggcgaagagcaaaactttgtctatcagatttggccgcagcaatactcggtgccgggctttacctaccgcgcacgtagcgggaaatcgacctactaccggctggaaaccttcctgttagaaggcagccagggcaacgacctgatggactacagcaaagagcaggtgatcaccgatattcttgaccagtacgagcggcaccttaactttattcatctccatcgtgaagcgccgggccatagcgtgatgttcccggacgcgtgattgttattgcataaaaccgcgccatgtctgcatatggcgcgggaatcattgactcgctgtaaaaaattatgcatanattatatatgattgtcatgtcatatcctgaaattcctcttgtatcacttcatgattttatattttattaattaacgattttattttgtattagctgaatggattcagtcctatagggttatatatttattaataagacgattcttatatttggatacctaataagagttaccacttttaccggctgtatattaaatgtatttctcctgcttttgtttatattttgagttgatttgagttcccggatacatataatgcgcaggtattagagactgggggggnatgtaatgataaagttaagagtgttaacttaaaataagtttttagtagtaacttgctattttattaccctctgaactacatactcagatatgtggttgccaatgctatgcaaaatttttgaatttttatatgcgatgaacagtaaccggaatggcatttaatgcgttgctgtttatgcaatcttggttttatttggatgtattgctggagattgtgatgaataaaatatatcggctaaagtggaacaggtcccgtaactgttggagcgtctgctcggagctggggagcagagtaaaaggaaaaaagtcccgggctgttttaattagcgcgataagtttatattcatctctggtattcgccgatgatgtcatcgtaaaccaggataaaactattgattttggcaaagagaaccagagcatcgattaccgtattacggtgacagacaatgccaatctggtaatcaatgcgacagatacttcccgtccgcgtctgactctcgcttctggtggtgggttggatattaccggaggaaaggtaacaatcaatggcccacttaactttttgctgaaaggtacggggttcctgaatgtctccaatgctggcagcgagttatatgctgatgatttgtatgaatcaaactcaggcatgagacacgatcgcggctattttaatgtctccaacggcggcaaaatccatgttaagggcaccagccgtctgacctatttgcagggaaatgtcagtggtgaaggtagccaggtaaattccgaaaccttctttatgggcgtttacggcagttacggtggtaatcagtacctgtcagttaataacggcggtgaagttaatgccaggaagcaaattagcctgggctattatgatcaagtctccgatacaacacttgctgtttcggaaggtggtaaaatttctgcncctactattagtttaagcaccaactctgagttagcgttaggggcacaggaaggaagcgcagcgaaggcagcagggattattgatgccgaaaaaattgagtttgtgtgggcaaagacatccgagaagaaaatcaccttaaaccacacggataaagacgcgactatttccgcggatattgtcagtggcagcgagggcctgggctatatcaatgcgctcaatggcacgacttacttaaccggtgataactctgcctttagtggtaaagtcaaaattgagcaaaatggcgctttagggatcacccaaaatataggtacagcagagatcaacaaccgcgggaaattacacctgaaggctgacgatagcatgacctttgccaataagatctctggcaacggtacaataagtatcgacagtgggacggtggagttgaccggcaataactatgcattcagcggatatattgatgttgcttctggtgctgtcgctgttatttctgaagacaagaatatcggtcgtgcagagctggatgtcgatggcaaattgcaaattaatgccaacaaagattgggtatttgataacgatcttgaaggtagaggcattgttgaaataaacatggggaatcacgaattctccttcgatgagtttgcttatacagactggttccagggttcactggcgttccagaacacgacatttaatctggaaaagaatgctgagtttctgcagaaaggcgggatcactgcgggtcagggaagcctggtaacagtgggtaagggcgctcactccattagcactttgggattctccggcggaaccgttgattttggtgccctgacagcaggtgcacagatgacagaagggacggtcaacgttagtaaaacgctggatttgcgcggcgagggtgtgattcaggtttctgacagtgacgttgtccgctcagtatctcgtgatattgactctgcgttatcgctcactgaagtcgatgatggtaacagcaccattaagttggttgatgcgcaaggtgcggaagttctgggcgatgcgggcaatctgcaattgcaggataaaaatgggcaaatcctctccagcagcgcccaacgtgatattcagcagaatgggcaaaaagcggccgtcggcacttacgactatcgtctgacgagtggggtaaacaatgacggtctgtatattggttacggcctgacccagcttgatttacacgctaccgacagcgatgctctggtgctgagctctaacggtaaaagcgagaatgccgccgatctcagcgcaaagattaccggcagtggtgacctggcattcagcagccagaagggtcagaccgtatcgctttctaacaaagacaacgactataccggtgttaccgatctgcgcagtgggacgcttttgttgaataacgataacgtgttgggtaatacccatgaactgcgtctggcggcagagactgaactggacatgaatggtcacagccagaccgtgggcacgctcaatggcagcgccgattcactgctgagcttaaatggcggcagtctgacggttaccaacgggggcacttcaaccggttcgttaacggggagcggagagctgaatattcagggcggcacgctggacatcgcgggcgataacagcaacctgacggcgaatgtgaacattgctaattcggctaatgtcctggtaagtcatgcgcagggattgggtagcgcaaacgttgagaacaacggtaccctggcgttgaataatagcgctgaaaaaagagcggctgcgtctgtgaattacgccctgggcggcaatctgaccaacaacggtacgctgatgaccggaatgtcaggacagcaagctggcaatgtgttagtggtgaaggggaactaccacggtaataacggtcaactagtaatgaatacggtactgaatggcgatgactcagtaaccgataaattggttgtcgagggcgatactagcggcacgactgccgttacggtgaataacgctggcggtacaggtgcgaaaacccttaacggtatcgaacttatccatgtagacggtaagtctgagggcgaatttgttcaggctgggcgtatcgttgcgggggcgtatgactacactctcgcgcgtggacaaggggcaaatagtggtaactggtatctgaccagcggcagtgattctcctgaactgcagccggagccagacccgatgccgaatccagagccaaacccgaatccagagccgaaccctaacccgacacctacgccgggtccggatctgaatgtggataatgacctgcgaccggaggcgggtagctacattgcgaaccttgcagcagcgaataccatgttcaccacgcgtctgcatgagcgtctgggtaatacgtactataccgacatggtgacgggtgagcagaaacaaaccactatgtggatgcgccatgaaggtggtcataataaatggcgtgatggcagcggccagctgaaaacccaaagcaatcgctatgttctgcaactgggaggcgatgtcgcgcagtggagccaaaacggcagcgaccgctggcatgttggggtcatggcgggatatggcaacagcgacagcaaaaccatttcctcgcgaaccggttatcgtgcaaaagcgagtgtgaacggatatagcacaggcctctatgccacctggtatgccgatgacgagtcgcgtaatggcgcgtatctcgacagttgggcgcagtacagctggtttgataacacagtgaaaggggatgacttacaaagtgaatcctataaatcaaaaggatttaccgcttcactggaagctggatacaaacacaaattagctgaatttaatggcagccagggaacgcgtaatgaatggtatgttcagccgcaagcacaggttacctggatgggagtcaaagccgataagcaccgcgaaagcaacggaaccctcgttcatagcaacggtgatggcaatgttcaaacccgacttggcgtaaaaacctggctgaagagccaccataaaatggatgacggtaaatcccgcgagttccagccgtttgtagaagtgaactggctacataacagtaaggatttcagcaccagtatggatggcgtgtctgtcactcaggatggagcccgaaatattgctgagataaaaaccggggtggaaggacagctaaatgccaacctgaatgtctgggggaatgtgggcgttcaggttgccgataggggatataatgacacctctgcaatggttggcattaagtggcaattctgatctgaataatgagtaaaaggagagagagccgaacgggagataattcggctctctgtgtcattttcttgcagccagctttatccgtcagagtgaagactcgcagatttagctggcgcacaagatttaatcaaggtgtgttcaatggcttcgcatgatttgagtgtttttttggaagagttcggggcaacggtgaatttgacgttgcctggtatcgtgtccgaaaaagaacggcttttactcaagctgctaatggagggaatgtcggttacagaaatctcacagtacagaaatcgcagtgcaaagacaatttcacatcaaaagaagcagctgtatgaaaaactaggcatccagagtgatattaccttctggcgggatatcttttttcaatatcatccgcaagtcattagtggcacgggaaataaaaataatttttatatccctgataaccgttgtcaccatatcgtcacgcctgaagccatcagtctggcgttggaaaaccatgaatttaaaccgtggatccaaccggttttnngcgcgcagactggggtactgacgggctgtgaagtgcttgtccgctgggaacatccacaaacgggaatcatcccgccggatcagtttattcctctggcggagtcatccggtcttattgtcataatgacccgccaactgatgaaacagactgcggatattctgatgccggtaaaacatttgctgccggataatttccatattggtatcaacgtctcggcgggttgttttttggccgcgggatttgaaaaagaatgcctgaacctggtcaagaaattaggaaacgataaaatcaaactggttctcgagctaacggaacgtaaccctattccggtaacgccagaagccagagcgatatttgacagccttcatcagcataacattacctttgcgctggatgactttggtacgggttatgcgacctatcgttatctgcaggcgtttccggtcgattttattaagatcgataagtcatttgtgcaaatggcgagtgtcgacgaaatatccggtcatattgtggacaatattgtcgaactggcgcgtaagcctagtctgagtatcgtggcggaaggggtagaaacccaggagcaggcggatttaatgatcggtaaaggcgttcactttttgcagggctatttgtactctccgccagtaccgggtaataaatttatctctgaatgggtaatgaaagcaggtggttgatgtaaaccgctattcacagcgcatcgggaggttggcagcgattaattctcccgatgcagtaaatcctgatagatccccgttaatatgccatttggcgcaaattgttttttaatccactgcgtcacctgacccgtagcagaatgctgagtcgccagtaacatgcgtgaatcctggcgcgggttatggatttgtcgggtaaccagcagggattgcgccatcgcctcacggaccatgtaatctggcaaaaaaccaatcccttcacctaaaatctggcactgacatttggtgttgaaatctggcaccagaattgactcctgcccgtgcagcaaccagcccacttttttattaatcgtatgcgcggtgtcctccaccataatattagggtagagacgcagttggctttcggcgatggttccggcacaaaggctaacgggtgatccggggcgatagcaaaagcccagcgaatcgcgccaatttcagtgtaatcaataccgccgccgtccagcagcgtgtcgggtgcgccgatagcgatatttgcctgattattaataatcgcatcccagacgccgttatacacttcggtggtgacggtaatctggcaggtaggaaactgctttttcagcacctgtaataagcgtgcggtgtgtttgggcgtataaagcaactgattaatacaaatgcgcacacgcgcttctatgccctgcgaaatagtatcgatgctgcgtttgatggcgtgaaaatcattcagcaggtcggtagctttgcggaaaaaataacgcccggactccgttaactcaatgctgcgggtactgtgagtgaacagcaccacatccagccctgtttccattcgcttgatggtgtagctaatggcggaagtggttaaacccaactcttctgcggctttactgaaactgccaaaacgcgcagcggtagtaaatgccaacagattctcttcggtaaaaattgagttcattaaaccattcccgccattatctaatatgaatttctccaggcataactgtagaggtatcaattagagatgggtaatcatttttgaataacttttaatacccgtcgcgtttagtcgtcgcttcgcttaatttttgtccgccatattctgaaattatccccacgcagttacccgccagaaaacccagtaacgtcaccgtccagttcatcccgctggcaaaaaacagcgtcatgccgagaaagccaccgggaataaatgacagtaaccagaaacgcccttgccagaccaccaccgccgagaagggtacggtagtaattacgctcgcccagaacgcggacagtccacttacagaggccagccaaccggcagccagcgcggcgaaaaacgcccacaccatcccggaataattaaccgacagacttctgataaaccccgatttaccgccgcctgcggcataaaaactgcaaaaggcgacgaagccaatggttcctaataattcctaataattcctaataattcccatccctgagagagcccgacatgtgaagacactaactgccaaagccctgcacaaataccgacggtgacacccgttgccgtgagtccgttcatcttgttcccctctggttagacatggacgaaagctactcttacatgtgcagactatagagaaataaaacctgattgagtgaaagggtatcgggtcaaagaaacaaatattgcactaccgcacactgcgaaaagattgttgaacatcattcaacaaaaaggcgaaatacggcgaattaaatttaagcgggttcttttatcagattatcgttgctattctcaattcatcgaaaacagccacaaaaaccaggggaatgtgaatgagtataaaaaatctacctgccgactatttattggctgcacaacagggtgatatcgataaagtaaaaacctgccttgcgctgggtgtcgatattaatacctgcgatcgtcaggggaaaacggcaattacgctggcaagtttatatcagcaatatgcttgcgttcaggcattaattgatgccggagcggatattaataagcaagatcatacctgtttaaatccttttttaattagctgtctgaacggtgatttaacgctgctacgaattattttaccggctaaaccagaccttaattgcgtcacccgttttggcggtgtcggcctgacgcctgcctgtgaaaaaggccatttaagtattgtaaaagagcttttggcgcatacggaaattaacgttaaccagaccaaccatgttggctggacgccactactggaagcgattgtgcttaacgatggcgggattaaacagcaggcgattgtgcagttattgctggaacacggtgccagcccgcatctgaccgataaatatggcaaaacgccactggaactggcgcgggaacggggctttgaagagattgcgcagttactgattgccgcaggtgcataaaccgggaggcttgctatcaacacaccagaaaaacggtgtgtgtgggcgctaactgcggatgcggattttctggcgcagcgagggcaaggacaggttgaacaggtctttgccagagcggtaaatatcgcactcccggctcgccagcagttgctgacgctgctttgtgaagagtacgacaatgcgccaaacagttgtcggttggcactcactcactttgatgatctgttccggcatggtgataaggttcagtttgacgatcaaggtattacggttggtcaacatcttcatatagagatgagtcgttgtcggcgttggctgtccccaaccttgcaaatgaccgctgtgaattttcgccttatcgcctggcaacagtggcacgacatcattcatcagcacctgggggaaaatgaaaccctgtttaattatcgnggcgataatccgttttatcaggcgttaaataaagaattacatattaaacgacgggcagttatacaggcagtaatcgataaacaaaatatcgcctcagcggtcgccagtatgatgggcttagggattggccttacgccatcagccgatgattatttaacaggtctggcacttattttatttatttccgggcatccggcgggaaaatacaaagaggaattttatctcggcttgcaacgcggcagaaataataccacgttattaagtgccataacgctggaagccgcattacaacaacgctgccgggaaaatattcatcgttttattcacaacattatttatgacatccctgggaacgcaactcaggcaatagaaaaaattaaacatattggctccagttccggctgcgacatgctgtatggcatggccgatggttgtgcgctgagccaaacctacggagggaattatgtcagttaaaatagtcattaaaccgaatacctattttgattctgtctcgctgatgtctatctccacgcgtgcaaataaactcgacggcgtcgagcaggcatttgtggcgatggcgaccgaaatgaacaaaggtgtgctgaaaaatttaggactgctgacgccggagctggagcaggcgaaaaacggcgacctgatgattgtcatcaatggtaaatcgggggcggacaacgagcagttgctggtggagattgaagaactgttcaacaccaaagcgcaaagcggctcgcacgaggcgcgttacgccactattgccagcgccaaaaagcatatcccggaaagtaacctggcggtgatttcggtcaacggtctgtttgccgctcgcgaagcgcgtcaggcgctgcaaaacgatctcaacgtgatgctgttttccgataacgtctcagttgaagatgaactggcgctcaagcaactggcccacgaaaaagggctgctgatgatggggccagactgcggcacggcgattatcaacggtgcggcgctctgctttggtaacgccgtgcgtcgcggcaacatcggtattgttggcgcatccggcaccggcagtcaggagttgagcgtccgcattcatgaatttggcggcggcgtttcgcaactgattggcaccggcgggcgcgacctgagcgagaaaatcggcggcctgatgatgctcgacgccatcgggatgctggaaaacgatccgcaaactgaaatcattgcgcttatctccaaaccgcctgcgcctgcggtggcccgcaaagtgctggaacgtgcgcgcgcctgccgcaagccggtggtcgtttgcttcctcggtcgtggcgaaacgccagtggatgagcaggggctacagtttgcccgcggcaccaaagaggcagcgctaaaagcggtgatgctctccggcgtgaaacaagaacatctcgacctgcataccctgaaccagccgttgattgctgacgtgtgcgctcgcctgaagccgcagcagaaatacattcgtggcctgttctgcggtggcacgctgtgcgatgaaacgatgttcgcggtgatggaaaaacacagcgatgtctacagcaacatccagcccgatccggaattccgcctgaaggatatcaaccgcagcatcaaacacaccttcctcgactttggcgatgacgacttcaccaacggcaagccgcacccgatgattgaccctaccaaccgcatcagccgcttgatcgaagaggcgcgcgatccagaagtggcggtgatcgtgatggattttgtgctcggatttggatcgcatgaagatccggtcggttccaccatcgaggcgatcaaagaagcgaaagcgatcgccgctgccgaaggacgcgagttgatcattctcgcctatgtgctgggtaccgatcttgatacgccatcgttagaacaacaaagccagatgctgcttgatgccggcgtgattctggcgagcagcagcaccaataccggattgctggcgcgtgaatttatctgcaaaggggaggaagcctgatgagccagtcactgtttagccaaccattgaacgttattaacgtcggcatcgccatgtttagcgatgacctgaaaaagcagcatgtagaagtgactcaactcgactggacgccgccggggcagggcaatatgcaggtggtgcaggcgctggataacattgccgattcgccgctggcagacaaaatcgccgccgctaaccagcaggcgctggagcgcattatccagtcgcatccggtgctgattggttttgatcaggcgattaacgtggtgccgggcatgacgccgaaaaccattcttcacgccgggccgccgatcacctgggaaaaaatgtgcggcgcgatgaaaggcgcggtcaccggagcgctggtgttcgaaggactggcgaaagatctcgacgaggcggctgaactggcggcttccggggagatcaccttctcgccgtgtcacgagcacgactgcgtgggatcgatggcgggtgtgacctcggcctcgatgtttatgcacatcgtaaaaaacaaaacctacggcaacatcgcttataccaacatgagcgagcagatggcgaagattttgcgtatgggcgctaacgaccagagcgtgattgaccgcctgaactggatgcgtgatgtgcagggaccaatactgcgcgacgcgatgaaaattatcggcgaaatcgatctgcgcttaatgctggcgcaggcgctgcatatgggcgatgagtgccataaccgcaataacgccgggacgacgctgctgattcaggcgctgacgccggggattatccaggcgggctattccgtcgcgcaacagcgcgaagtgtttgagtttgttgccagtagcgattacttctccggcccgacgtggatggcgatgtgtaaagcggcgatggatgcggcgcacggcatcgaatacagcaccgtcgttaccaccatggcgcgtaacggcgtcgagttcggcctgcgggtgagcggcctgccggggcagtggtttaccggcccagcgcagcaggtcatcggcccgatgtttgctggttataagccggaagattcggggctggatatcggcgacagcgccatcacagaaacctacggtattggcgggtttgccatggcgaccgcgcctgcaatcgtcgcgctggtgggtggcacggtggaagaggctatcgatttctcccgtcagatgcgcgaaatcacccttggcgaaaaccccaacgtcaccattccgctgctcggttttatgggcgtgccgtcggcagtcgacatcacccgcgtgggtagcagcggcattctgccggtgatcaacaccgccatcgcccataaagatgcgggcgtcggcatgattggcgcgggcattgtgcatccaccattcgcctgcttcgagaaagccattcttggctggtgcgaacgttacggcgtttgacctacctgttcataccggatgcggcgtgaacgccttatccggcctacgaatggcgcaagaatctgtaggcctgatnagcnnagcnnatcaggcatttgtcaccattgccggatgcggcgtgaacgccttatccggcctacaagtggcgcaagaatttgtaggcctgataagcgnagcgcatcaggcatttatcaccattgccggatgcggcgtg

SEQ ID NO: 119 - DNA, 48 bp, Escherichia coli
  Strain O55:H7
  modified_base (45)..(46): a, c, g or t
ccggcctacgaatggcgcaagaatctgtaggcctgataagcgtanngc

SEQ ID NO: 120 - DNA, 77 bp, Escherichia coli
  Strain O55:H7
tccggcctacgaatggcacgagaattgtaggcctgataagcgtagcgcatcaggcatttgtcaccattgccggatgc

SEQ ID NO: 121 - DNA, 3336 bp, Escherichia coli
  Strain O55:H7
  modified_base (2)..(2): a, c, g or t
  modified_base (818)..(818): a, c, g or t
  modified_base (1663)..(1665): a, c, g or t
  modified_base (1667)..(1668): a, c, g or t
ancgccttatccggcctacgaatggcacgagaatttgtaggcctgataagcgtagcgcatcaggcagtctggcgttggtcataaccccatcaccctctgtagcggacataacaacatgaaagaacttgtggtcgttgccattggtggcaacagcattatcaaagataacgccagccagtcgattgagcatcaggcggaggcggtgaaagccgtggccgatacggtgctggaaatgctggcttccgattacgacattgtgctgacccacggtaacgggccgcaggtcgggctggatttacgccgtgcggagattgcccacgagcgcgaagggctgcccttaacgccgctggcgaactgtgtggcagatacgcagggcggcattggctacctgatccaacaggcgctgaacaaccggctggcgcgtcacggcgagaaaaaagccgtcaccgtggtgactcaggtggaagtggataaaaacgatccaggttttgcccatcccaccaagcccattggtgcattcttcagtgaaagccagcgtgacgaattacaaaaggcaaaccctgactggcgttttgttgaagatgccggacggggctatcgccgcgtggtcgcctcgccggaaccgaaacgtattgtcgaagcacccgccattaaggcgctgatccaacaaggctttgtggtgattggtgcgggcggcggcggaattcctgtggtgcgtactgacgcgggagattaccaaagcgtggacgcggttatcgacaaagatctctctaccgcgctgctggcccgtgaaattcacgccgacattctggtgatcnccaccggcgtcgaaaaagtctgtatccactttggtaaacccgagaagcaggcgctggatcgggtggatattgccaccatgactcgctatatgcaggaaggacatttcccgcccggcagcatgttgccaaaaatcatcgccagcctgacgttcctggaacagggcggtaaagaagtgattatcaccacgccggaatgcctgccagcggcgctgcgcggtgaaacgggcacccacattattaaaacgtaaggacgtaagatgaaagaaaataatagccgccgtgaatttctgagccagagcggtaagatggtcaccgccgccgcgctgtttggtacctctgtgccgctcgcccatgcggcggtctctggcaccacaaactgcgaagcgaacaacaccatgaaaatcactgacccgcattactatctcgacaacgtgctgctggaaaccggttttgactacgaaaatggcgtggcggtgcagacccgcacggcgcgccagaccgtggagattcagaacggcaaaattgtcgcgctgcgcgagaataagcagcacccggatgccacgctgccgcactatgacgctggcgataagctgatgctgcccaccacccgcgacatgcatattcatctcgacaaaacgttttacggcgggccgtggcgctcgctcaatcgcccggcaggcaccaccatccaggacatgatcaaactcgagcagaaaatgctgccggagctgcaaccgtacactcaggagcgggcagaaaaactgattgatttattgcagtcgaaaggcaccaccattgcccgcagccactgcaatatcgaaccggtttccggcctgaaaaatctnnnanntttgcaggcggtgctggcgcgacgtcaggcgggctttgagtgtgaaatcgtcgccttcccgcagcacggtttgctgctgtcgaaatcggaatccttaatgcgtgaagcaatgcaggcgggtgcgcattacgtcggcgggctggacccgaccagtgtcgatggcgcgatggaaaaatccctcgacaccatgttccagattgcgctggactacgacaaaggcgtcgatattcacctgcacgaaaccactccgtcgggcgtggcagccatcaattatatggttgaaacggtagagaaaacgcctcaactgaaaggtaagctgaccatcagccacgcctttgcgctggctacgctcaacgagcaacaggtagatgaactggcgcatcgcatggcggcgcagcaaatttctatcgcctcgacggtgccgattggcacgctgcatatgccgctcaaacagttgcacgacaaaggcgtaaaagtgatgactggcactgacagcgttatcgaccactggtcgccttatggtctgggcgacatgctggaaaaagccaatctctacgcgcagctctatattcgtcctaacgaacagaacctctcccgttcgctgtttctagccactggcgatgtattgccgctgaatgaaaaaggcgagcgtgtatggccaaaagcgcaggatgacgccagctttgtgctggtggacgcctcctgttccgccgaggcggtggcgcgtatctcgccgagaaccgcaacgttccataaagggcaactggtgtgggggagtgtggcaggttgatgcgcatttgaaacgcctgcaacggtgaatagtaagagatttaagccccaggaagtggggcgggaatggtttgctaatgaatgatcctgaactttataatctcccggcataatttccaggggattatttgagagaaatacacaaaagtgagttttaacaaaggtatttatcaggccataaatgtgacctgcttcggataaaaaagattcagtatcgaaaaaccaatgatactcttgctgatggttaccaacagtaattaagatgtgatttgtttttccgtaatcgcaaaaatattgccatgaccataaaagaaaaattctcacaaaaatatccccatgcttccttttgtacttttggcgattcagccgcgttggccgatcacctcgcaacgttgattgcgactggtgttaaaacagcttcctgtggttcgctggcgggatgtattgaagacaacgcatttccgatgattggtgagtataagattgtagaaaatagccgtggtgagcctgtatgtgttatcagagtgattggcctgcatttactgcgcttttctgatgtcaccgcggagcttgcccgtaaggaaggtgaaggtgacctcagtcttgaatattggcgtaatgaacaccgtcgttttttccaggcagaaggaagctattcaccagaaatggacgttatctttgaagaatatgcccttattgacgttgtgtagataactatttatctacatgaaataagctcacaaacataaaatatcgctaattttgtttattttgctgttttttacgtgatgaatgtcacacttattattgctgcccgttttgtccatatttataaccatatttttaatagctgcctgaaatagagctgtttattctgca

SEQ ID NO: 122 - DNA, 16203 bp, Escherichia coli
  Strain O55:H7
  modified_base (27)..(27): a, c, g or t
  modified_base (1345)..(1345): a, c, g or t
  modified_base (5191)..(5191): a, c, g or t
  modified_base (12511)..(12511): a, c, g or t
  modified_base (12828)..(12831): a, c, g or t
attcgaaaattcttattctctccagcncgctaatttgggcgaacacttcctgactaccctgcaatgaggctgaaatgatgaataaacgttttgttatcaatatggtgtcttcgctgttattaggcgctgcgctaatttctgcgccgctccaggcagcggaaaaagtcgtggtgaatatttctaaagtcgatggtatgccgtggtttaatcgcatgggcgaaggtgtggttgaggcgggtaaagcctttggtgttaatgcctcacaggtggggccttcaagtactgatgctccgcaacaagttaaaattattgaggatttaatcgcccgtaaggttaatgcaattactatcgtgccaaacgatgccaacgtgctggaaccggtattcaaaaaagcgcgagatgccggaattgtggttctgaccaacgaatcccccggtcagccaagtgctaactgggatatcgaaatcattgataacgaaaaatttgccgctgaatatgttgagcatatggcgaaacgcatgggtggcaagggcggctatgtgatttacgtgggtagtttgaccgtgccgcagcataacttatgggctgacttgctggtgaaataccagaaagagcattacccggatatgcatgaagttacccgccgcatgccggttgccgagagtgtggatgtctcacgtcgtactacactggacctgatgaaaacctatcctgacttgaaagcggttgtctcctttggttcaaacggtccgattggcgcgggacgtgcggtgaaagagaaacgggcgaaaaataaagtcgcagtctatggcatgatgatcccttcacaggcggcatcactgattaaaagtggtgatatcaccgaagggattacttacgatccggcctctgcaggttacgcactcgcagccgtcgccagcacgttgctgaagggtgaagagatcaagcctggattagaaatgcagaatctgggtaaggccgaggtagatatggataagcgaattatccgtttccataaggtattactggtcaacaaagacaatatcgactcactttattaatccatttcttcggggcgaaagccccgattcttattgccaggggatgttatggaaaccttcctttcccttcgtcatatcaacaaaacgtttcatgccacgcgagcgctgcgcgatgtttctctcgactttatgtcgggtgaagtgcactgccttgccgggcaaaacggctgtggtaaatcgacgttgattaaaattatgtccggtgtttatcgcccggatgagggagcggaaattacgcttggtgggaaaaactggtcaaagctgacacccgccgcttcggtggngcaggggattcaggtgatttatcaggacctctctttatttcctaacctgagtgtctgggagaatatcgccgtgaatcactatcaccacggtctgtttgttaaccgccgtcgtctgcgtgaggtggcgcaggcggcaatgactagtattaacgtcacattgccactggatacgctcgtttctgagctttcaattgcccgctgtcagctggtggcaatttgccgtgcactggcgcaggacgcacggttgatcgtgatggatgaaccaaccgcttcgctgacccatcaggaagtgcaagggttattacaggtggtgcatcaattgcgtgaacgcgggatctgcgtggtctttgtcagtcatcgtctggaagaagtgatggaagtttccgaccgtatttcagtgctgaaagatggtgagctggtcgggacttttccggctgcagagatgaccacaaaacaactcggtttcctgatgaccggccaggagtttgaatatcaggtgcgagagttgtggcagggaaaatccagccccccggtgctggaggtgcgtaatttaagtcgtcatggggaatatctaaatattaacttgcgggtggaagcgggcgaagtggtatcgattgttggcctgcttggtgcggggcgcacggaattatgtctgagtctgtttggtatgacccgaccagatgctggcgagatcctcatcaacggccagctggttacactgcatagtaaccaggacgccatccgccacggtattggttatgtttcggaagatcgcatgtcgcgcggtttggtgatggcgcaatctattgaagacaacatcattagcactgtttttcacaaggtaaaagatcgcttcggctttctgagtgaaactaaagtgcgtgacctggtggacaggctaatcaaggcattgaccatcaaagtctctgatcctcatcttccggtgaatacgctttctggtggtaacgcgcagcgagtatcgatcgccaaatggctggcgattgggccacgactgttgattctcgatagcccgacagtcggtgttgatatcgccaacaaagcaggaatatacggcattatcagcgatctggcggctcatggcattgcggtattgatgatctgcgatgaaattgaagaagcgtggtatcaaagccaccggattttggtaatgcaaaaaggtcagatcacccatagcttcctgcctgacagcagttctcaggccaggattgcggaggtggtaaatggctgaactgaaaaaacgccatgaattctggctggcattactgattgtggtgctgtttgttggccttgcctggcgcagcgacgagtttctgacattcggtaatttgtacgatctcgccaataactatgccatgttgactattctcgcctgtggtttgtttgtggtgttgatttccggtggaattgatatttcgtttccagcaatgaccatcattgcgcaatacggcatggtgctgttgctgcaaaaaattggtggcaacttcgctgtcgcgtttgcactggcaggctgcatcggcattttacttggcttaattaacgccttactggttaatcgcctacgggtgccttctatcatcatcactatctcgacgctgaatattttctatggcctgctgttatggttgagtaaaggtgtgtggctgtacgactttccgccgtggtttgagcagggggttatgttgttcaagtacaccgatgctgatggctatgactatggccttggtctgccgctgatcgccatgattacggtggtgctgctgacagcgtttatcatgaatttcaccagtgtagggcgcaaaatttatgcccttggcgggaaccgcgaatcagccagtcgcatcggctttagcgtgctgaaactgcaacttttcgtctacggctatatgggattgatgtctggcgctgcgggtgtagtgcagtcgtggacggtgatgactgtcgcccccgattctcttctgggttatgagctgacagtactggctgcggtggtgcttggcggcactagtttgctcggcgggcgcggcacgttaactggtactttgctcggcgtggtgttgttggcagtgatgcaaaacgggctaaatttattgggagtctcgtcttactggcaaacattgatcaccggcatcatcatcgttgccagcattagcgccacggcgtggagtcagcatcagaaccggagcctgctatgaaaaaatcgtggcgtaataacgttgagttttacttgatcggcctgctggtgctaactgttgccgcgttcagcattactatgccggagattttctggtcgataagtaatttccagtccgtcgcttcgcaaatgcccgtgctgggcattctggcgttggctatggcggtgaccatgctttgcggtggcattaacttgtcaattatagccactgctaacgcctgttcactggtgatggcgtgggtggcgactcagtatccaccgggtattgctacggttgtcgctacgttactggcgggcgctggcgcggcggtgataatcggtttatgtaacggcgtattgattgctggtattcgagtgtcgccaattcttgcaacgcttgggatgatgacgttgctcaaagggataaatattctggtgacaggtggtagcgccattgccaattatccctcatgggtgctgtggttgaatcatgcgcaatggttcggtattccgctaccgatgtggttgtttgccgcagtggcactggggctgtggatattgctggagaaaacgccgctcggtaaagccatttacctgattgggtctaacgaacgagcaacactttactccggcattaacactcgtcgggtgctgatttgggtttatgtcatttccgccttgctttgtgcggtagcggcatttttgatgatgtcgaaactcaactcggctaaggcctcttatggcgaatcgtacttgctggtgtcaatcctcgcggcagtactcggcggggttaatccggacggcggcagcgggcggataattggtatggtgctggcgctgtttcttctgcaaattattgaaagcggcttcaatattctcggtataagcccctacctgacgatggccttatggggaacgttgctgctctgtttcattcaggctcgcggcatgttggggctggatcgggtggtttaaatattggctatattcaatggacgcgttttgccgcgatgacatatcaggcgtcgccaaatacacatagctaatcaggagtaaacacaatgaagatcaaagctgttggttcatattccgctaaacaaccacttgaaccgatggatatcacccggcgtgaaccgggaccgaatgatgtcaaaatcgaaatcgcttactgtggcgtctgccattccgatctccaccaggtccgttccgagtgggcggggacggtttacccctgcgtgccgggtcatgaaattgtggggcgtgtggtagccgttggtgatcaggtagaaaaacatgcgccgggcgatctggtcggtgtcggctgcattgtcgacagttgtaaacattgcgaagagtgtgaagacgggctggaaaactactgtgatcacatgaccggcacctataactcgccgacgccggacgaaccgggccatactctgggcggctactcacaacagatcgtcgttcatgagcgatatgttctgcgtattcgtcacccgcaagagcagctggcggcggtggctcctttgttgtgtgcagggatcaccacgtattcgccgctacgtcactggcaggccgggccgggtaaaaaagtgggcgtggtcggcatcggcggtctgggacatatggggattaagctggcccacgcgatgggngcacatgtggtggcatttaccacttctgaggcaaaacgcgaagcggcaaaagccctgggggccgatgaagttgttaactcacgcaatgccgatgagatggcggctcatctgaagagtttcgatttcattttgaatacagtagctgcgccacataatctcgacgattttaccaccttgctgaagcgtgatggcaccatgacgctggttggtgcgcctgcgacaccgcataaatcgccggaagttttcaacctgatcatgaaacgccgtgcgatagccggttctatgattggcggcattccagaaactcaggagatgctcgatttttgcgccgaacatggcatcgtggctgatatagagatgattcgggccgatcaaattaatgaagcctatgagcgaatgctgcgtggtgatgtgaaatatcgttttgttatcgataatcgcacactaacagactgaaaaaattaataaatacgctgtggtttaacatattaacttcgctctccacttaactttttagttaaggagagcgaaataatatcaaagtagcagtaaaacctataacgtaaattcaaattgttaaattaactccctccagtacctaatacttcacacgttagttatgagcgatttctgatagtgcctggtttaatcagagctttattatctgcgacgtttatttttatttaagagagatcgcgatgatatcattaaaagctccgcacaataatttgatgccatatacgcaacaaagcatacttaatacggttaaaaacaatcagttaccagaggatatcaaaagctccctggtttcctgtgtcgatatattcaaggttttgattaaacaatattatgattatccttatgattgtcgtgatgatttagtcgatgacgacaaactcattcatctcatggctgccgtacgagactgtgagtggtcagacgataacgcactcaccataaatgtgcagtttaatgatttccctggattttatgactggatggattaccctgatcacccggttaagtttgtttttcgcatacttgaaaatcaaaaagggacagtttgggtatatgaccaggatgatgcgtttcttgatattaaagcaaatgtgcaggctggacgctttaccgggcttaagaaattagtgcagtttatcaattcagtgcgaacagattgcaaatgtattcttcttgaacaccatatgcctttgctgagacttttccctaaagggaaagagtgtatgcatgtggaaaaatggcttcgcgaaatgtcgtctattccggagacagacgcgcccattaagcaggcgcttgcgcatggattattattacacttaaaaaatatctaccctgtttttcctgaatcactggtgatgttattgctctctgttctggacgtaaaaacatacagagatgatgcacgattaaatgaatggatatctaatagagtccaggaattaggtgacagatattatcctgtaaataagcacgttaaaatccgctacactctttagttcagaaagggttccacctgcaagttgttattccacctgagagtgaatcgcaatgcaggtaatcatttcatctgtatatctgtatgccaactggcattccatctcttttttcgccgatattttgttgcgatcggcgacacttcgcttaaaaaagcaccagcagtggtttcgcagccatgcggtgtataaaaaaaaatgatctcatgcagatgttttgtgaatgtgtgggttgacattcatatgaaaaaaatcataattccatcatgtttgtgtggggtcttttctgtatcttacgcatcgcactcaagcctgacagaaaatatgctgtaaggctcatatcaaaaaccgccattagctcatcaggaagagcagacgacaaccaggattgttgtatggtacggggttcgaggcctcgatggcggtccaacttttcaaaactcttctgaattagatccccttattatcatccctgcaaagtggaacattgccattgtttggctattcaggacgggtcagaccaatgaaaaaagcccacacaggggagagtgggctgaaatgggaagctaaagactcaagtaaacttatcggaaataaggaccacgcattacgggggctatcatcgccgatggtcgggattcggcaaatcaggttgattacgtagagagtaaattatctgctcaccgctgtgtcaccccttcgtaaatcaggcgtagcgcgaatacaccaataattgcaccaataacccgactggcaacgcgttgcatacgcccataagcacgacgcacagcgggcaaagaaaacgcctgactaagaaaaactcgccagataattgatgcgagcacaatccccgcccaggccattaaacgtgcccatgttggtgtttcggcatttaatgttactgagaaaatactaataaaaaataaaacggtttgtgggttagagagatcggtaattaatctacggcgaaaaaagacataccagggggcgttaatcggttgttgtagtgtgctcatttgcggtgttgactggcggcgcatgctgcaccacgcaaaccataagagataagcgccgccgacgattctgataagcgaaaaaatctcctcacactgcgtaattagcgttgcaagaccaaacaaacccaacccggaataaaatgcatcgcccagcgccacgcccagtccggtcagcactcctgcgcgtcgaccggaagccaggctggtttgtactaccacaaaaagattggctcccggattaaaaaaagtaatcacgaacagtcctacggtcaggtaaacggcatgcaaaggatccatagtgatttcatccataaataagtgaactaactgcatcatatttctaccaaaaataatcgggtgcgagagagagcacaaagtgtcttatttccggttactggcgtttatgccctgactgaactaattattaatcaacccaataatgtcggtgggtgatagtgtgataacaactctggagccgtaatatgaaaataatctctaaaatgttagtcggtgcgttagcgtttgccgttaccaatgtctatgccgctgaattgatgaccaaagcggaatttgaaaaagttgaatcgcagtatgaaaaaataggtgatatttcaaccagtaatgaaatgtcgactgcagatgcaaaagaagatttaatcaaaaaagccgatgaaaaaggggctgatgtgttggtactgacctccggtcaaactgacaataagatccacggcacggcggatatttataagaagaagtaattctgaatcctatgtaaacatccccgatgcgtaagtttatcggtgatcatctattgaaatttatgccggataaagcgttcgcgctgcattcggcagttcagcttttcagccgccgccagaacgtcgtccggctgatgcctaaataattcgccgctgctgttttatcgccattaaatttctccagtgcctgttgtggtgtcagcaagcgtggagcgggaattttcgccgactcgcgcgccagttccggcagtagcagctgcaaaaactgcggcgttaaatccggcgtcggttccacacttaaaaatagcgccagtcgctccatcatattgcgcagttcacgaatattacctggccagtcgtagtgcaccagcacggtttcgcttgcctgtaatccctggcgtaatgcggcagaaaatggggcggagagcgccgccagagacactttcaaaaagctttccgccagcggaagaatatctgccacccgctcgcgcagtggtggcaattgcagacgcaaaatactcagccgataaaacagatcacggcgaaactgcccttgccgcatatcttcttccagattgcagtgagtggcgctaatgacccgtacatctaccggaacaggctgatgcccgccgacgcgggtgacctctttttcttccagcacccgtaacaggcgagtctgcaaaggtagcggcatttcgccaatctcatccagaaacagcgtgccaccgtgggcaatttcgaacagcccggcgcgatctccgcgtcgcgagccggtaaacgccccttcctcatagccaaacagctccgcttccagcagcgattcggcaatcgccccgcagttgacggcaacaaacggatgcgactttttgccctgtcgcgcatcgtggcgggcaaaatattcccgatgaattgcctgggccgccagctctttgcccgtccccgtttccccctcaatcaacaccgccgcactggagcgggcatacagcaaaatagtctgccgcacctgctccatctgtggtgattgaccgagcatatcgcccagcacgtaacgagtacgcagggcgttgcgggtggcatcgtgagtgttatggcgtaacgacatgcgcgtcatatccagcgcatcgctgaacgcctggcgcacggtggcggcggaatagataaaaattccggtcattccggcttcttctgccagatcggtaatcagccccgcgccgaccaccgcttcggtgccgttagcttttagctcgttaatctgcccgcgtgcgtcttcttcggtaatgtagctacgttgatcgaggcgcaaattaaaggttttttgaaacgccaccagtgccggaatagtttcctgataagtgacaacgccgatagaagaggtgagttttccggcttttgccagtgcctgtaacacatcgtagccgctcggtttaatcaaaataactggcactgacaggcggcttttcaggtacgcgccgttagagccagcggcgatgatggcgtcacagcgttcgtttgccagtttcttgcggatgtaggtcactgctttttcaaagccaagctgaataggggtaatgttcgccaggtgatcaaactcgaggctgatatcgcgaaacagctcgaataagcgcgttacagataccgtccagataaccggtttgtcgtcattcagccgtggtggatgtgccatagcgcaccgcaaagttaagataccgaatattgggtttagtcttgtttcataattgttgcaatgaaacgcggtgaaacattgcctgaaacgttaactgaaacgcatatttgcggattagttcatgactttatctctaacaaattgaaattaaagatttaattttattaaggcaattgtggcacaccccttgctttgtcgttatcaacgaaaataacaagttgataacaaaggatgggctatgtctctacactctccaggtaaagcgtttcgcgctgcactgactaaagaaaatccattgcagattgttggcaccattaacgccaaccatgcgctgttggcgcagcgtgccggatatcaggcaatttatctctccggcggtggcgtggcggcagggtcgctggggctgcccgatctcggtatttctactcttgatgacgtgttgacagatattcgccgtatcaccgacgtttgttcgctgccgctgctggtggatgcggatatcggttttggttcttctgcttttaacgttgcgcgtacggtgaaatcgatgattaaagccggtgcggcgggattgcatattgaagatcaggttggtgcaaaacgctgtggtcatcgcccgaacaaagcgatcgtctcgaaagaggagatggtggatcggatccgcgcggcggtggatgcgaaaaccgatcctgattttgtgatcatggcgcgcaccgatgcgctggcggtagaggggctggatgcggcgatcgagcgtgcgcaggcctatgttgaagcgggtgccgagatgttgttcccggaggcgattaccgaactcgccatgtaccgccagtttgccgatgcggtgcaggtgccaatcctcgccaacattaccgaatttggcgccacgccgctgtttaccaccgacgaattacgcagcgctcatgtcgcgatggcgctgtacccgctttcagcgtttcgcgccatgaaccgcgccgccgaacatgtctacaacgtcctgcgccaggaaggcacgcagaaaagcgtcatcgacaccatgcagacccgcaacgagctgtacgaaagcatcaactactaccactacgaagagaagctcgacgacctgtttgtccgtagccaggcgaaataaaaaacgcccgttggttgtattcgacaaccgatgcctgatgcgccgctgacgcgacttatcaggcctacggggtgaactgtaggtcggataagacgcatggcgtcgcatccgacaacaatctcgaccctacaaatgataacaatgacgaggacaatatgagcgacacaacgatcctgcaaaacagtacccatgtcattaaaccgaaaaaatctgtggcgctttctggcgttccggcgggcaatacggcgctctgcaccgtgggtaaaagtggcaatgacttgcattaccgtggctacgatattcttgatctggcggaacattgcgaatttgaagaagtggcgcatctgctgatccacggcaaactgccgacccgtgacgaactcgccgcctacaaaacgaaactgaaagccctgcgcggtttaccggctaacgtgcgtaccgtgctggaagccttaccggcggcgtcacacccgatggatgttatgcgcaccggcgtttccgcgctcggctgcacgctgccagaaaaagaggggcataccgtctctggcgcgcgggatattgccgacaaactgctggcgtcacttagctcgattcttctctactggtatcactacagccacaacggcgaacgcatccagccggaaaccgatgacgactccatcggtggtcacttcctgcatctgctgcacggcgaaaagccgtcgcaaagctgggaaaaggcgatgcatatttcgctggtgctgtacgccgaacacgagtttaacgcctccacctttaccagccgggtgattgcgggcactggctctgatatgtattccgcgattattggcgcgattggtgcactgcgcgggccgaagcacggcggggcgaatgaagtgtcgctggagatccagcaacgctacgaaacgccggacgaagccgaagccgatatccgcaagcgggtggaaagcaaagaagtggtcattggttttggtcatccggtttataccatcgccgacccgcgccaccaggtgattaaacgtgtggcgaagcagctctcgcaggaaggcggctcgctgaagatgtacaacatcgccgatcgcctggaaacggtgatgtgggagagcaaaaagatgttccccaatctcgactggttctccgctgtttcctacaacatgatgggcgttcccaccgagatgttcacaccactgtttgttatcgcccgcgtcaccggctgggcggngcacattatcgaacaacgtcaggacaacaaaattatccgtccttccgccaattatgttggaccggaagaccgccagtttgtcgcgctggataagcgccagtaaacctctacgaataacaataaggaaacgtacccaatgtcagctcaaatcaacaacatccgcccggaatttgatcgtgaaatcgttgatatcgtcgattacgtcatgaactacgaaatcagctccaaagtagcctacgacaccgcacattactgcctgctcgacacgctcggctgcggtcttgaagctctcgaatacccagcctgtaaaaaactgnnnnggccaattgtccccggcaccgtcgtacctaacggcgtgcgcgtccccggaactcagttccagctcgaccccgtccaggcggcatttaacatcggcgcgatgatccgctggctcgatttcaacgatacctggcttgcggcagagtggggccatccttccgacaatctcggcggcattctggcaacggcggactggctttcacgcaacgcggtcgccagcggcaaagcgccgttgaccatgaaacaggtgctgaccggaatgattaaagcccatgaaattcagggctgcatcgcgctggaaaactcctttaaccgcgtcggcctcgaccacgttctgttagtgaaagtggcttccaccgccgtggtcgccgaaatgcttggcctgacccgcgaggaaattctcaacgctgtttcgctggcgtgggtggacggtcagtcgctgcgcacctatcgccatgcgccgaacaccggcacgcgtaaatcctgggcggcgggcgatgccacttcccgcgcggtacgtctggcactgatggcgaaaacgggcgaaatgggttacccgtcagccctgactgcgcctgtgtggggcttctacgacgtctcctttaaaggtgaatcgttccgcttccagcgtccgtacggttcttacgtgatggaaaatgtgctgttcaaaatctccttcccggcggagttccactcccagacggcagttgaagcagcgatgacgctctatgaacagatgcaggcagcaggcaaaacggcggcagatatcgaaaaagtgtccatccgcacccacgaagcctgtattcgcatcatcgacaaaaaggggccgctcaataacccggcagaccgcgaccactgcattcagtacatggtggcgatcccactgctattcgggcgcttaacggcggcggattacgaggacaacgttgcgcaagataaacgcattgacgccctgcgcgagaagatcaattgctttgaagatccggtatttaccgctgactaccacgacccggaaaaacgcgccatcgccaatgccattacccttgagttcaccgacggcacacgatttgaagaagtggtggtggagtaccccattggtcatgctcgccgccgtcaggatggtattccgaaactggtcgataaattcaaaatcaatctcgcgcgccagttcccgactcgccaacagcagcgcattctggaggtttctctcgacagagctcgcctggaaccgatgccggtcaatgagtatctcgacctgtacgtcatttaagtaaacggcggtaaggcgtaagttcaacaggagagcattatgtcttttagcgaattttatcagcgttcgattaacgaaccggagcagttctgggccgagcaggcccggcgtattgactggcagacgccctttacgcaaacgctcgatcacagcaatccgccgtttgcccgttggttttgtgaaggccgaaccaacttgtgccacaacgctatcgaccgctggctggagaaacaaccagaggcgctggcgctgattgccgtctcttcggaaacagaagaagagcgcacctttacctttcgccagcttcatgacgaagtaaacgcggtggcgtcaatgctgcgctcgctgggcgtgcagcgtggcgatcgggtgctggtgtatatgccgatgattgccgaagcgcatattactctgctggcctgcgcgcgcattggcgctattcactcggtggtgtttgggggatttgcctcgcacagcgtggcggcgcgaattgatgatgctaaaccggtgctgattgtctcggctgatgccggagcgcgcggtggcaaaatcattccctataaaaaattgctcgacgatgcgataagtcaggcgcagcaccagccacgccatgttttgctggtggatcgcgggctggcgaaaatggcacgcgtcagcgggcgggatgtcgatttcgcgtcgttgcgccatcaacacatcggcgcgcgggtaccggtggcgtggctggaatccaacgaaacctcctgcattctctacacctccggcacgaccggcaaacctaaaggcgtgcagcgtgacgttggcggatatgcggtggcgctggcgacctcgatggacaccatttttggcggcaaagcgggcggtgtgttcttttgtgcttcggatatcggctgggtggtggggcattcgtatatcgtctacgcgccgctgctggcggggatggcgactatcgtttacgaaggattaccgacctggccggactgcggcgtgtggtggaaaatcgtcgagaaatatcaggttagccggatgttctcagcgccgaccgccattcgcgtgctgaaaaaattccctaccgctgaaattcgcaaacacgatctctcgtcgctggaagtgctctatctggctggagaaccgctggacgagccgaccgccagttgggtgagcaatacgctggatgtgccggtcatcgacaactactggcagaccgaatccggctggccgattatggcgattgctcgcggtctggacgacaggccgacgcgtctgggaagccccggcgtgccgatgtatggctataacgtgcagttgcttaatgaagtcaccggcgaaccgtgtggcgtcaacgagaaagggatgctggtggtggaagggccgctgccgccggggtgtattcagaccatctggggcgacgacgaccgctttgtgaagacgtactggtcgctgttttcccgcccggtgtacgccacctttgactggggcatccgtgacgctgacggttatcactttattctcgggcgcactgacgatgtgattaacgttgccgggcatcggctggggacgcgcgagattgaagagagtatctccagtcatccgggcgttgccgaagtggcggtggttggggtgaaagatgcgctgaaagggcaggtggcggtggcgtttgtcattccgaaagagagcgacagtctggaagatcgtgatgtggcgcattcgcaagagaaggcgattatggcgctggtggacagccagattggcaactttggccgcccggcgcacgtctggtttgtctcgcaattgccaaaaacgcgatccggaaaaatgctgcgccgcacgatccaggcgatttgcgaaggacgcgatcctggggatctgacgaccattgatgatcctgcgtcgttggatcagatccgccaggcgatggaagagtaaggtattgtcggatgcgtcgcgtggcgcatccgacagttgtgcgcagatgcctgatgcgacgctggcgcgtcttatcatgcctacaggcctgaaccgtaggtcggataaggcgctcgcgccgcatccgacaccatgcgcagatgcctgatgcgacgctgatgcgtcttatcatgcctac

SEQ ID NO: 123 - DNA, 46 bp, Escherichia coli
  Strain O55:H7
  modified_base (2)..(3): a, c, g or t
  modified_base (7)..(8): a, c, g or t
cnncgcnnccgacaccatgcgcagatgcctgatgcgacgctgatgc

SEQ ID NO: 124 - DNA, 104 bp, Escherichia coli
  Strain O55:H7
  modified_base (3)..(4): a, c, g or t
  modified_base (6)..(7): a, c, g or t
gcnnannggcctgaaccgtaggtcggataaggcgctcgcaccgcatccgacaccgtgctcagtgcctgatgcgacgctgatgcgtctcatcatgcctacaggcc

SEQ ID NO: 125 - DNA, 14860 bp, Escherichia coli
  Strain O55:H7
  modified_base (84)..(85): a, c, g or t
  modified_base (87)..(88): a, c, g or t
  modified_base (97)..(97): a, c, g or t
  modified_base (274)..(274): a, c, g or t
  modified_base (1047)..(1047): a, c, g or t
  modified_base (2282)..(2282): a, c, g or t
  modified_base (4393)..(4395): a, c, g or t
  modified_base (10960)..(10960): a, c, g or t
  modified_base (13208)..(13208): a, c, g or t
gctcgcgccgcatccgacaccgtgcgcagatgcctgatacgacgcaggcgcgtcttatcatgcctacaggcctgaaccgtaggnngnntaaggcgcncgcgccgcatccgacaccgtgcgtagttgcctgatgcgacgctgacgcgtcttatcatgcctacccactgtttttacaccgataattttccccccacctttttgcactcattcatataaaaaatatatttccccacgaaaacgattgctttttatcttcagatgaatagaatgcggnggattttttgggtttcaaacagcaaaaagggggaatttcgtgtcgcaagataacaactttagccaggggccagtcccgcagtcggcgcggaaaggggtattggcattgacgttcgtcatgctgggattaaccttcttttccgccagtatgtggaccggcggcactctcggaaccggtcttagctatcatgatttcttcctcgcagttctcatcggtaatcttctcctcggtatttacacttcatttctcggttacattggcgcaaaaaccggcctgaccactcatcttcttgctcgcttctcgtttggtgttaaaggctcatggctgccttcactgctgctgggcggcacccaggttggctggtttggcgtcggtgtggcgatgtttgctattccggtgggcaaggcaaccgggctggatattaatttgctgattgccgtttccggtttactgatgaccgtcaccgtcttctttggcatttcggcgctgacggttctttcggtgattgcggttccggctatcgcctgtcttggcggttattccgtgtggctggccgttaacggcatgggcggcctggacgccttaaaagcggtcgttcccgcacaaccgttagatttcaatgtcgcgctggcgctggttgtggggtcatttatcagtgcgggcacgctcaccgctgactttgtccgctttggtcgcaatgccaaactggcggtgctggtggcgatggtggcctttttcctcggcaactcgttgatgtttattttcggtgcagngggcgctgcggcactggggatggcggatatctctgatgtgatgattgctcagggcctgctgttgcctgcgattgtggtgctggggctaaatatctggaccaccaacgataacgcgctctatgcgtcgggtttaggtttcgccaacattaccgggatgtcgagcaaaaccctttcggtaatcaacggtattatcggtacggtctgtgcattatggctgtataacaattttgtcggctggttgaccttcctttcggcagctattcctccagtgggtggcgtgatcattgccgactatctgatgaaccgtcgccgctatgagcactttgcgaccacgcgtatgatgagtgtcaattgggtggcgattctggcggtcgccctggggattgctgcaggccactggttaccgggaattgttccggtcaacgcggtattaggtggcgcgctgagctatctgatccttaacccgattttgaatcgtaaaacgacagcagcaatgacgcatgtggaggctaacagtgtcgaataacgctttacaaacaattattaacgcccggttgccaggcaaagaggggctgtggcagattcatctgcaggacggaaaaatcagcgccattgatgcgcaatccggcgtgatgcccataactgaaaacagcctggatgccgaacaaggtttagttataccgccgtttgtggagccacatattcacctggacaccacgcaaaccgccggacaaccgaactggaatcagtccggcacgctgtttgaaggcattgaacgctgggccgagcgcaaagcgttattaacccatgacgatgtgaaacaacgtgcatggcaaacgctgaaatggcagattgccaacggcattcagcatgtgcgtacccatgtcgatgtttcggatgcaacgctaactgcgctgaaagcaatgctggaagtgaagcaggaagtcgcgccgtggattgatctgcaaatcgtcgccttccctcaggaagggattttgtcgtatcccaacggtgaagcgttgctggaagaggcgttacgcttaggggcagatgtagtgggggcgattccgcattttgaatttacccgtgaatacggcgtggagtcgctgcataaaaccttcgccctggcgcaaaaatacgaccgtctcatcgacgttcactgtgatgagatcgatgacgagcagtcgcgctttgtcgaaaccgttgctgccctggcgcaccgtgaaggcatgggngcgcgagtcaccgccagccacaccacggcaatgcactcttataacggggcgtatacctcacgtctgttccgcttgctgaaaatgtccggtattaactttgtcgccaacccgctggtcaatattcatctgcaaggacgattcgatacgtatccaaaacgtcgcggcatcacgcgcgttaaagagatgctggagtccggcattaacgtctgctttggtcacgatgatgtcttcgatccgtggtatccgctgggaacggcgaatatgctgcaagtgctgcatatggggctgcatgtttgccagctgatgggctatgggcagattaacgatggcctgaatttaatcacccaccacagcgccaggacgttgaatttgcaggattacagcattgccgccggaaacagcgccaacctgattatcctgccggctgaaaatggatttgatgcgctgcgccgtcaggttccggtacgttattcggtacgtggcggcaaggtgattgccagcacacaaccggcacaaaccaccgtatatctggagcagccggaagccatcgattacaaacggtgatcggctgggctgtgtgttgacaaagcgagcgtagtttatgccggatgcggcttgaacgccttatcaggcctacgtagagcactgaactcgtaggcctgataagcgtaacgcatcaggcaattgtgtcagtggttaccgcgattcattctcgccaacatccgcacattcctccaacgccatgtgcaaaaatgccttcgcggcggctgtctgccagctatttttccgccgcaacaaaaccgccgttctctccagtagtggcggggcaagaggaatcgctttaagcccgtcatgttgtgtggcaatcgctgctggtaacaatgtggaaagggaagtgcggcgaatcagctccagaaccgcgctaattgagttcgcctcaatgaccacctgtggatgcagccccgctttctcgcagtagtggtcaatctgctctctggtggcaaattccgcgctgagcaggaccagtttttcatcatgcaagcgactcaacgccacctgttcacaggcagccagcggatgatgttgcgccacgactaacgctaaactttctgtcagtaaaggaattgcctccagctccggcgaatgcacaggcgcgaaggcaatcccaacgtccagctcgtcgcgacaaagcagatcttcgattttctcctgcgacatttcctgtagctggagcgtgatgccggggtagcgcgcatagaaatccgccattaaggggccgataaagtagctcgtaaaggtgggggtgacggcgatacgcagcgatcctctcgtcagatcggcaacatcatgaatcgcccgtttacccgctcccagttcctgtaacgcccggctggcgtactgtcgccagacttctcctgcatcagtgagatgaatcgttcgcccgctacggtcaaacagcggcacgcctaaactctcctctaactggcgaatctgctgggaaagcgcaggctgagagacgtgcaacgcactggcggcacgggtgaagctgccatgttcagccacggcaagaaaataattgatatgtcgagagagcattcgccaacctataagtaaattcaatagaactcatcataaatgagacttttaccttatgacaatcggcgagtagtctgcctctcattccagagacagatagaggttaacggtgaaagagattattgatggattccttaaattccagcgcgaggcatttccgaagcgggaagccttatttaaacagttggcgacacagcaaagcccgcgcacactttttatctcctgctccgacagccgtctggtccctgagctggtgacgcaacgtgagcctggcgatcttttcgttattcgcaatgcgggcaatatcgtcccttcctacgggccggaacccggtggcgtttctgcttcggtggagtatgccgtcgctgcgcttcgggtatctgacattgtgatttgcggtcattccaactgtggcgcgatgaccgccattgccagctgtcagtgcatggaccatatgcctgccgtctcccactggctgcgttatgccgattcagcccgcgtcgttaatgaggcgnnnccgcattccgatttaccgtcaaaagctgcggcgatggtacgtgaaaacgtcattgctcagttggctaatttgcaaactcatccatcggtgcgcctggcgctcgaagaggggcggatcgccctgcacggctgggtctacgacattgaaagcggcagcatcgcagcgtttgacggcgcaacccgccagtttgtgccactggcagctaatcctcgcgtttgtgccataccgctacgccaaccgaccgcagcgtaaccttatttttaaaccatcaggagatgcaccatgattcagtcgcaaattaaccgcaatattcgtcttgatcttgccgatgccattttgctcagcaaagctaaaaaagatctctcatttgccgagattgccgacggcaccgggctggcagaagcctttgtgaccgcggctttgctgggtcagcaggcgcttcctgccgacgccgcccgccaggtcggggcgaagctggatctcgacgaagacgccattctactgttacagatgatcccactgcgtggctgcattgatgaccgtattccaaccgacccaacgatgtatcgtttctatgaaatgttgcaggtgtacggcacaaccctgaaagcgttggttcatgagaaatttggcgatggcattatcagcgcgattaacttcaaactcgacgttaagaaagtggcggacccggaaggtggcgaacgtgcggtcatcaccttagatggtaaatatctgccgaccaaaccgttctgacagccatgcgtaaccatcaaaagacgttcacgatgctgctggttctggtgctgattggtcttaatatgcgaccactgctcacctccgtcgggccactgctaccgcaattgcgccaggcaagcggaatgagctttagcgtggctgccctgttgaccgctctgccggtggttaccatgggcgggctggcgctggccggaagctggcttcatcagcatgtcagcgaacgtcgcagcgtcgccatcagtttgttactgattgccgtcggtgcattgatgcgtgagctttaccctcaaagtgcgctgctgcttagcagcgcactgctcggtggggtggggatcggcatcattcaggcggtgatgccttcggtgattaaacggcggtttcagcagcgcacgccactggtgatggggctgtggtccgcggctctgatgggcggcggtgggcttggtgccgccctgacaccctggttagttcaacatagcgaaacctggtatcaaacactcgcctggtgggcgctgcctgccgttgttgcgctctttgcctggtggtggcaaagcacccgcgaggtcgcctcttcccacaagacaacaaccattccggttcgcgtggttttcactcctcgcgcgtggacgctgggtgtttacttcggtctgattaacggtggttacgccagcctgattgcctggttacccgccttctatattgagattggtgccagcgcgcagtacagcggttccttgctggcattgatgacgcttgggcaagccgcaggagctttgctgatgcctgctatggctcgccatcaggatcggcgcaaactgttaatgctggcgctggcgttacaactggtgggtttctgcggctttatctggctgccgctgcaattgccggtattgtgggcgatggtgtgtggtttaggtctgggcggcgcatttccgctctgtttgctgctggcgctcgatcactctgtgcaaccggctattgctggcaagctggtggcgtttatgcagggaatcggttttatcatcgccgggcttgccccgtggttttctggcgtgctgcgtagtatcagcggcaattacttgatggactgggcgtttcatgcgctgtgcgtcgtagggctgatgattataaccctgcgttttgcaccagcacgttttccgcagctgtgggtcaaagaggcatgatgcgacgcttgtttctgcgctttgttcacgccggatgcggcctacatagatcactgaatttgtaggcctgataagcgaagcgtatcaggcaatttttataatttaaactgacgattcaactttgtaatctctgaaataatattgcttatcccggtcgtttatttcgcgaataacccgacaaggaacgccagccgccacgacgtttggtggaatgtcttttgtgacgatactacccgcgccaataacagaattatccccaatggtgacgcctggattaataaccacatgacttccgatccagacgttattgccaatcgttatcggaaaagagtacatctcaccgttttttctcaattcatggtgtacagggtgtcccgtaacggaaagagtaacgttgggtgcaatcaatacgttatcaccgattgttaccgtgtagtcatcgacaatggttaaattgaaatttgcataaaaattgcggcctatatggatgttggaaccgtaagagaaatagacggggggttctacccaggcgttttcccctaccgtggcaaacatttctttaatcaggctttctcttttatcaacttctgatggatgcgagtgattaaactcatacattaacgtttttctacgaagtcttttttcaggtaagccttcgcacatatcggtaaatagcttgcctgcttttattctttctgtcatcgacatgttcattgcgatcattccgttatgatatgttggtcggataaggcgctcgcgccgcatccgacattgattgcttaagcgacttcattcacctgacgacgcagtagagaaagcgggccggggccgctaagcgtgaacacggaaattaaggtgaagcccagcgccaccagacccagcaccagataagcgccctggaaaccgatgctttcatacatattacccgctagtacagacataaaaatcatcgccagttgcttaaagaagcagaaacagaccagataaatcgtcgctgaaaaacgcacttcaaactggctggtaatatatttaaagcagcccaccagcaggaacggtacttcaaacatatgcagcgttttcagaataaccacttccagcgctgaggtggcgaacgatgagccaataatacgtacagacataatagtgccagccagcagcagggcatttttcccaccgatgcgattaatgatcagtggcgcaaagaacataattgaggcgttaagtaattcgcccattgtcgttacgtagccaaatacccgcgtaccctgttcaccggtggcaaagaaagaagtaaagaaattagcaaactgttggtcaaaaacatcgtaggtgcaggaaacgccaataacatacagtgacaaaaaccacagttttggctgtctgaacagttccagcgccagtttaaggctaaatgccgaatggttggcacctaccgcattggcaaccgtggcggaagagggcgcatccgttttggcgaaaaagagtaaaatggcgaggatgagtgcacagccagaacccagccagaaaacgaactgattattgatggtgaacatgatgccgacaatcgaggcacacagcgcccagccaacacagccaaacatccgcgcgcgaccaaattcgaaattactgcgacggctgactttctcgataaatgcctctactgcgggcgcaccggcgttaaaacaaaagccaagataaataccaccaacaatcgatcctactaaaatgttgtattgtaacagtggcccgaagataaaaataaagaacggcgcaaacatcactaacatgccggtaataatccacagcaggtatttgcgcagcccgagtttgtcagaaagcagaccaaacagcggttggaataatagcgagaacagagaaatagcagcaaaaataatacccgtatcacttttgctgatatggttgatgtcatgtagccaaatcgggaaaaacgggaagtaggctcccatgataaaaaagtaaaagaaaaagaataaaccgaacatccaaaagtttgtgttttttaaatagtacataatggatttccttacgcgaaatacgggcagacatggcctgcccggttattattatttttgacaccagaccaactggtaatggtagcgaccggcgctcagctggaattccgccgatactgacgggctccaggagtcgtcgccaccaatccccatatggaaaccgtcgatattcagccatgttccttcttccgcgtgcagcagatggcgatggctggtttccatcagttgttgttggctgtagcggctgatgttgaactggaagtcgccgcgccactggtgtgggccataattcaattcgcgcgtcccgcagcgcagaccgttttcgctcgggaagacgtacggggtatacatgtctgacaatggcagatcccagcggtcaaaacaggcggcagtaaggcggtcgggatagttttcttgcggccctaatccgagccagtttacccgctctgctacctgcgccagctggcaggtcaggccaatccgtgccggatgcggtgtatcgctcgctacttcaacatcaacggtaatcgccatttgaccactaccatcaatccggtaggttttccggctaataaataaggtttttccctgatgctgccatgcgtggacagtggtaatcagcaccgcgtcggcaagtgtatctgccgtgcactgcaacaacgccgcttctgcctggtaatggcccgcagccttccagcgttcgacccaggcgttagggtcaatgcgggtcgcttcacttacgccaatgtcgttatccagcggtgcgcgggtgaactgatcgcgcagcggcgtcagcagttgttttttatcgccaatccacatctgtgaaagaaagcctgactggcggttaaattgccaacgcttattatccagctcgatgcaaaaatccgtttcgctggtggtcagttgcgggatggcgtggggcgcggaggggagtgtcacgctgaggttttccgccagacgccactgctgccaggcgctgatgtgtccggcttctgaccatgcggtcgcgttcggttgcactacgtgtaccgttagccagagttgcccggtgctctccagtcgcggtagttcaggcaattcaattacctgtttaccttgcggagcgacatccagaggcacttcaccgcttgccagcggcttaccatccagcgccaccgtccagtgcaggagctcgttatcgctatgacggaacaggtattcgctggtcacttcgatggttcgcccggataaacggaactggaaaaactgctgctggtgttttgcttccgtcagcgccggatgcggcgtgcggtcggcaaagaccagaccgttcatgcagaactggcgatcattcggcgtatcgccaaaatcaccgccgtaagccgaccacggattgccattttcatcatatttaatcagcgactgatccacccagtcccagacgaagccgccctgtaaacgggggtactgacgaaacgcctgccagtatttagcgaagccgccaagactgttacccatcgcgtgggcgtattcgcaaaggatcagtgggcgcatttctccaggcagcgaaagccattttttgatggaccatttcggcacagccgggaagggctggtcttcatccacgcgcgcgtacatcgggcaaataatatcggttgcggaggtgtcggctccgccgccttcatactgcaccgggcgggatggatcgacagatttaatccagcgatagagtgcgtcgtgattagcgccgtggcctgactcattccccagcgaccagatgatcacactcgggtgattacgatcgcgctgcaccattcgtgttactcgttcgctcatggccggtaaccagcgcggatcatcggtcagacgattcattggcaccatgccgtgggtttcaatattggcttcatccaccacatacaggccgtagcggtcgcacagggtgtaccacagcggatggttcggataatgcgaacagcgcacggcgttaaagttgttctgcttcattagcaggatatcctgcaccatcgtctgctcatccatgacctgaccatgcagaggatgatgctcgtgacggttaacgccgcgaatcagcaacggcttgccgttcagcagcagcagaccattttcaatccgcacctcgcggaaaccgacatcgcaggcttctgcttcaatcagcgtgccgtcggcggtgtgcagttcaaccaccgcacgatagatattcgggatttcggcgctccacagtttcgggttttcgacgttcagacctagtgtgacgcgatcggcataaccgccacgctcatcgataatttcaccgccgaaaggcgcggtgccgctggcgacctgcgtttcaccctgccacaaagaaaccgtcacccgcagctcatcgcgcagctcgccgtacatctgaacttctgcctccagtaccgcgcggctaaaatcatcattaaagagagtggcaacatggaaatcgctgatttgtgtggtcggtttgtgcagcaacgagacgtcacggaaaatgccgctcatccgccacatatcctgatcttccagataactgccgtcactccagcgcagcaccatcaccgcgaggcggttttctccggcgcntaaaaatgcgctcaggtcaaattcagacagcaaacgactgtcctggccgtaaccgacccagcgcccgttgcaccacagatgaaacgccgagttaacgccatcaaaaataattcgcgtctggccttcctgtagccagctttcatcaacattaaatgtgagcgagtaacaacccgtcggattctccgtgggaacaaatggcggattgaccgtaatgggatatgtcacgttggtgtagatgggcgcgtcgtaaccgtgcatctgccagtttgaggggacgacgacagtatcggcgtcaggaagatcgcactccagccagctttccggaaccgcttctggtgccggaaaccagacaaattgccactcaccattcaggctgcgcaactgttgggaagggcgattggtgcgggcctcttcgctattacgccagctggmgaaagggggatgtgctgcaaggcgattaagttgggtaacgccagggttttcccagtcacgacgttgtaatacgacggccagtgaatctgtaatcatagtcatagctgtatcctgtgtgaaattgttatccgctcacaatttcacacaacatacgagccggacgcatagagtgtaaagcgtggggtgcctaatgagtgagctgactcacattaattgcgttgcgctcactgcccgctttccagtcgggaaacttgtcgtgccagctgcattaatgaatcggccaacgcgcggggagaagcggtttgcgtcttgggcgccagggtggtttttcttttcaccagtgagacgggcaacagctgattgcccttcaccgcctggccctgagagagttgcagcaagcggtccacgctggtttgccccagcaggcgaaaatcctgtttgatggtggttaacggcgggatataacacgagctgtcttcggtatcgtcgtatcccactaccgagatatccgcaccaacgcgcaacccggactcggtaatggcgcgcattgcgcccagcgccatctgatcgttggcaaccagcatcgcagtgggaacgatgccctcatttagcatttgcatggtttgttgaaaaccggacatggcactccagtcgccctcccgttccgctatcggctgaatttgattgcgagtgagatatttatgccagcccgccagacgcagacgcgccgagacagaacttaatgggcccgctaacagcgcgatttgctggtgacccaatgcgaccagatgctccacgcccagtcgcgtaccgtcttcatgggagaaaataatactgttgatgggagtctggtcagagacatcaagaaataacgccggaacattagcgcaggcagcttccacagcaatggcatcctggtcatccagcggatagttaatgatcagcccactgacgcgttgcgcgagaagattgtgcactgccgctttacaggcttcgacgccgcttcgttctaccatcgacaccaccacgctggcacccagttgatcggcgcgagatttaatcgccgcgacaatttgcgacggcgcgtgcagggccagactggaggtggcaacgccaatcagcaacgactgtttccccgccagttgttgtgccacgcggttgggaatgtaattcagctccgccatcgccgcttccactttttcccgcgttttcgcagaaacgtggctggcctgattcaccacgcgggaaacggtctgataagagacaccggcatactctgcgacatcgtatagcgttactggtttcacattcaccaccctgaattgactctcttccgggcgctatcatgccataccgcgaaaggttttgcgccattcggcggggctgacgccgaagtgagatttaaaatgctgacgccaggtcacaggtgagagaaaacccacctcagccgctatccgctcaacgggcaactgactggatcccaacagttcctggctacggcgtaagcgttcagtaatgagccattcggcgatactcgaaccggtcgctttcataaaatggcgagttaatgtgcggcgactcatcattactcgctgcgccagcgagtcgagatcatgctgttgcgcaatgttttgccgcaggtaatccagcaggaggtttatgcgttcatcatgggtatttttcggcaccggttgctcaataaactgcgcctgaccgccggtgcgatatggcggtacgaccatccgtcgggcaatatggttagcatagtcgctgccaaaatgttgccgaacaatatacaaacagcaatccagcgccncggcagtaccggcagaggtaataatgccgtcatcgtctacgtacaacgcgttaatatccagatgtgtttgtggaaaacgtgcctgaaattcacgctcgaactcccagtgcgtggcggcacgcttatttttcagtaaacctgcatagccgagcacaaacgtgcccaggcaaagcccgacaatctgtgcgccgttatcccgtgcggtcgttaaggcttccagcagtttttgtggcggtttttgtgtaatggttccccagtaaggaattatcacaatatctgcctggatgactgcggtatagtcatgggtggcggttacggaaaacccatcggcagagtccacgtttcccggcttttcagcgcaaataatcacgtgaaagcgttttttctccgccatcttttcactaaacacgataaacggtacggaaaggtgaaaaggactaaaaccggcaacggcgataatggcaacagttagcgggcgcataacactctttatctccgaattagaatgtcaacgtttcaccatcttctggtacgttcacaaattcgataatttgattatctctggcgtattccttgagcgcatcacgcgtcagcaaacagtggtttacggcctccatatgtgtcgcgataatttgcgcttctgggagggtaaaatgtgttttgagaatatcttctgctcccataattatcgcgccatgccccagaacatgcgcaaatccggcattcaacacaaccacttctggttggaaagttagcattgtagcctcgacgtcgtcacgccagagggtatcgccagccagatagagcgttttctctgtcgggtgctggaaaacaacgccgcaagctgcgcctaaacgcttcgccatcgccgggtcggcataggtgcgatcggagccgtgctgccctgtcgttttatgcagagtaatatcgccaaatttagtctcgtcggtaagtacggtaagatgcgtaaatccttgtttattcagtgattcagcatcttgctcattttgcacataaatcagtttatctttagggacgacgcgggaggctgtttcgtcccagtgatcttcatgcaaatgggtcacgattagggcgtcaacgttgagtaacgttgttaaatcgcacggtaattctaccgttggattgcggatttctgcgcgtgccgttccggcaaaacccggataacttcctttaggcgcgagtaacgggtcgataagaaatgttttgccagcgtattggataatttgggtggcattacgaatttgcgtaattttcatgatttgctccacatcacagtattgatgtcattagcgtagcgtgcagcccgtactgtgcatgtgggcaaatgggcgaataacgatgagaatgggccaaattacacattggcgtaactagcgtaaatgcacgccgcttcgccgtccggccaccagaatagcctgcgattcaaccccttcttcgatctgttttgctacccgttgtagtgccggaagatgcttttccgctgcctgttcgatggtcattgcgctcgccatatacaccagattcagacagccaatcacccgttgttcactgcgcagcggtacggcgatagaggcgatcttctcctcctgatcccagccgcggtagttctgtccgtaaccctctttgcgcgc

SEQ ID NO: 126 - DNA, 7136 bp, Escherichia coli
  Strain O55:H7
  modified_base (422)..(422): a, c, g or t
  modified_base (5981)..(5981): a, c, g or t
  modified_base (6651)..(6651): a, c, g or t
  modified_base (7086)..(7087): a, c, g or t
  modified_base (7125)..(7125): a, c, g or t
  modified_base (7127)..(7128): a, c, g or t
  modified_base (7131)..(7131): a, c, g or t
  modified_base (7134)..(7135): a, c, g or t
agaatggcttccagctttaacggttctcgtgccagttgatagtcatcaccggggcgggaggctaacatctcgattaattccttgcgttcttgttccgggcaaaaggccagccaggtcaggcccgaggcggttttcagaagcggtaaacgccgcccgaccattgcccggtgaaaggataagcggctgaaacggtgagtggtttcgcgtaccaccattgcatcaacatccagcgtggacacatctgtcggccataccacttcgcgcaacagatcgcccagcagtggggccgccagtgcagaaatccactgttcgtcacgaaatccttcgcttaattgccgcactttgatggtcagacgaaaactatcatcggagggactacgccggacatatccctcttcctgcagcgtctccagcagtcgccncacagtggtgcgatgcaggccgctgagttccgccagcagcccgacgctggcaccgccgtcaagtttatttaacatatttaataacattagaccgcgggttaagccgcgcacggttttgtattccgtctgctcattgttctgcatattaattgacatttctatagttaaaacaacgttgtgcacctggtgcacattcgggcatgttttgattgtagccgaaaacaccctttctatactgagcgcacaataaaaaatcatttacatatttttaacaaaataagttgcgctgtactgtgcgcgcaacggcattttgtccgagtcgtgaggtactgaaatggcaatacaacaccctgacatccagcctgctgttaaccatagcgttcaggtggcgatcgctggtgccggtccggtcgggctgatgatggcgaactatctcggccagatgggcattgacgtgctggtggtggagaaactcgataagttgatcgactacccgcgtgcgattggtattgatgacgaggcgctgcgcaccatgcagtcggtcggcctggtcgataatgttctgccgcatactacgccgtggcacgcgatgcgttttctcaccccgaagggccgctgttttgctgatattcagccaatgaccgatgaatttggctggccgcgccgtaacgcctttattcagccgcaggtcgatgcggtgatgctggaaggggtgtcgcgttttccgaatgtgcgctgcttgttttcccgcgagctggaggccttcagtcagcaagatgacgaagtgaccttgcacctgaaaacggcagaagggcagcgggaaatagtcaaagcccagtggctggtggcctgtgatggtggggcaagttttgtccgtcgcaccctgaatgtgccgtttgaaggtaaaactgcgccaaatcagtggattgtggtagatatcgccaacgatccgttaagtacgccgcatatctatttgtgttgcgatccggtgcgcccgtatgtttctgccgcgctacctcatgcggtacgtcgctttgaatttatggtgatgccgggagaaaccgaagaacagctgcgtgagccgcaaaatatgcgcaagctgttaagcaaagtgctgcctaatccggacaatgttgaattgattcgccagcgtgtctacacccacaacgcgcgactggcgcaacgtttccgtattgatcgcgtactgctggcgggcgatgccgcgcacatcatgccggtatggcaggggcagggctataacagtggtatgcgcgacgcctttaacctcgcatggaaactggcgttggttatccaggggaaagcccgcgatgcgctgctcgatacctatcaacaagaacgtcgcgatcacgccaaagcgatgattgacctgtccgtgacggcgggcaacgtgctggctccgccgaaacgctggcagggtacgttacgtgacggcgtttcctggctgctgaattatctgccgccagtaaaacgctacttcctcgaaatgcgcttcaagccgatgccgcaatattacggcggtgcgctggtgcgtgagggcgaagcgaagcactctccggtcggcaagatgtttattcagccgaaagtcacgctggaaaacggcgacgtgacgctgctcgataacgcgatcggcgcgaacttcgcggtaattggctggggatgcaatccactgtgggggatgagcgacgagcaaatccagcagtggcgcgcgttgagcacacgcttcattcaggtggtgccggaagtgcaaattcataccgcacaggataaccacgacggcgtactacgcgtgggggatacgcaaggtcgcctgcgtagctggttcgcgcaacacaatgcttcgctggtggtgatgcgcccggatcgctttgttgccgccaccgccattccgcaaacactgggcaagaccctgaataaactggcgtcggtgatgacgctgacccgccctgatgccgacgtttctgtcgaaaaggtagcctgatatgcacgcttatcttcattgtctttcccactcgccgctggtggggtatgtcgacccggcacaagaggtactcgatgaggtcaatggcgtgattgccagcgcccgcgagcgtattgcggctttctcccctgaactggtggtgctgtttgcgccagatcactacaacggctttttctatgacgtgatgccaccgttctgtttaggcgttggagcgacggcaattggtgatttcggcagtgcggcaggagagctgcccgtgcctgtggagctggcggaggcctgtgcgcatgccgtcatgaagagcgggatcgatcttgccgtttcttactgtatgcaggtggaccacgggttcgcccagccgctggagttcctgctcggtgggctggataaggtgccagttctgcctgtgttcatcaacggtgtcgccacgccgctgcccggtttccagcgtacccgcatgttgggtgaagccattggacgtttcaccagcactctcaataaacgcgtgctgttcctgggttccggtgggctttcccatcagccgccggtgcccgaactggcgaaagccgatgcccatatgcgcgaccgcctgttggggagcgggaaagatttacccgccagtgagcgcgaattgcgtcagcaacgggtgattagcgccgctgagaagtttgttgaggatcagagaactctgcatccgctcaacccgatttgggataaccagttcatgactttgctggagcagggacgcatacaggaactggatgccgtcagtaacgaagagctttccgccattgccggaaagtcgacacatgaaatcaaaacctgggtcgccgcttttgccgctatttctgcatttggcaactggcgtagcgaagggcgttattaccgcccaatcccggagtggattgccggatttggctcgttaagcgccagaacagagaactgaatatgcaggagaagatgatgagttatcagccacaaaccgaagccgccaccagccgttttctgaatgtagaagaagcgggtaaaacgctgcgcatccattttaatgactgcggacaaggcgacgaaaccgttgtcctgctgcatggttccggcccgggtgctactggctgggcgaacttcagccgcaatatcgatccgctggtagaggcgggctatcgggtgatcctgctggattgtccgggttggggcaagagcgattcgatcgttaatagtggttcgcgatcggatcttaatgcacgaatcctgaaaagcgtggtggatcaactggatatcgccaaaatccacctgctgggcaactcgatgggtggccatagttctgtggcgttcacccttaactggccggagcgcgtcggcaaactggtgctgatgggcggcggtacgggcggcatgagtttgtttacgccgatgccaaccgaaggtattaagcgactgaatcagctttatcgtcagccgactatcgaaaacctgaagctgatgatggatatcttcgtttttgataccagcgatttgaccgacgccctgtttgaaacgcgcctgaataatatgctgtcgcgccgcgatcacctggaaaacttcgttaagagcctggaagctaatccgaaacagttcccggattttggcccacgtctggcggaaatcaaagcgcaaaccctgattgtctgggggcgcaacgaccgctttgtgccgatggatgcgggtctgcgtctgctgtccggcattgccggttctgaactgcatatcttccgcgactgtggtcattgggcgcagtgggaacatgccgacgctttcaatcaactggtgctgaatttcctcgcacgtgcttaaggaacggtcatgacgaagcatactcttgagcaactggcggcggatttacgccgcgccgcagagcagggcgaagcgattgcgccgctgcgcgatctgattggtatcgataacgctgaagcggcctacgccattcagcacataaatgtgcaatatgacgttgcgcaggggcgtcgcgtggtggggcgtaaagtgggcctgacacatccgaaagtgcagcaacaactgggcgttgatcaaccggatttcgggacattatttgccgacatgtgttatggcgataacgaaatcattcctttttcccgtgttctgcaaccccgcattgaagcggagatcgcactggtgttgaaccgcgatttacccgcaactgatatcaccttcgacgaattgtataacgccattgaatgggtacttccggcgctggaggtggtgggtagccgcattcgcgactggtcgattcagtttgtcgataccgtggcagataacgcttcctgcggggtgtatgtcatcggcggtccggcgcaacgtccggcggggttagacctgaaaaactgcgccatgaagatgacgcgtaataacgaagaggtttccagcgggcgcggcagcgaatgcctgggacatccgcttaatgccgccgtctggctggcacgcaaaatggccagtctgggtgaaccgctgcgcgccggagatatcattcttaccggggcattaggtccgatggtggcagtgaatgcgggcgatcgttttgaagcccatattgaaggcataggttcagttgctgcggcattttcaagcgcagccccaaaaggaagtctgtcatgagtaagcgtaaagtcgccattatcggttctggcaacattggcaccgatctgatgattaaaattttgcgtcacgatcagcatctggagatggcggtgatggtcggcattgatcctcagtccgacggtctggcgcgtgccagacgtatgggcgtcgccaccacccatgaaggggtgatcgggctgatgaacatgcctgaatttgctgatatcgacattgtatttgatgcgaccagcgccggtgctcatgtgaaaaacgatgcggctttgcgcgaagcgaaaccggatattcgcttaattgacctgacgcctgctgccatcggcccttactgcgtgccggtggttaacctcgaggagaacgtcgatcaactgaacgtcaacatggtcacctgcggcggccaggccaccattccaatggtggcggcagtttcacgcgtggtgcgtgttcattacgccgaaattatcgcttctatcgccagtaaatctgccggacctggcacgcgtgccaatatcgatgaatttacggaaaccacttcgcgagccattgaagtggtgggcggcgcggcaaaagggaaggcgattatcgtgcttaacccagcagagccaccgttgatgatgcgtgacacggtgtatgtattgagcgacgaagcttcacaagatgatatcgaagcctcaatcaatgaaatggctgaggcggtgcaggcttacgtaccgggatatcgcctgaaacagcgcgtgcagtttgaagttatcccgcaggataaaccggttaatttgccgggcgtagggcagttctccgggctgaaaacggcggtctggctggaagtcgaaggcgcagcgcattatctgcctgcctatgcgggcaacctcgacattatgacttccagtgcgctggcgacagcagaaaaaatggcncagtcactggcgcgcaaggcaggagaagcggcatgaacggtaaaaaactttatatctcggacgtcacgttgcgtgacggtatgcacgccattcgtcatcagtattcgctggtaaacgttcgccagattgccaaagcactggacgatgcccgcgtggattcgattgaagtggcccacggcgacggtttgcaggggtccagctttaactatggtttcggcgcacatagcgaccttgaatggattgaagcagcggcggatgtggtgaagcacgccaaaatcgcgacgttgttgctgccaggaatcggcactattcacgatctgaaaaatgcctggcaggctggcgcgcgggtggttcgtgtggctacgcactgtaccgaagctgatgtttccgcccagcatattcagtatgcccgcgagctcggaatggacaccgttggttttctgatgatgagccatatgaccacgccggagaatctcgcaaagcaggcaaagctgatggaaggctacggtgcgacctgtatttatgtggtggattctggcggtgcgatgaacatgagcgatatccgtgaccgtttccgcgccctgaaagcagtgctgaaaccagaaacgcaaaccggcatgcacgctcaccataacctgagtcttggcgtggcgaactctatcgcggcggnggaagagggctgcgaccgaatcgacgccagcctcgcgggaatgggagcgggcgcaggtaacgcgccgctggaagtatttattgccgccgtggataaactggggtggcagcatggggccgatctctatgcgttaatggatgctgctgacgacctggtgcgtccgttgcaggatcgaccggtacgagtcgatcgcgaaacgctggcgctgggatacgctggtgtttactccagcttcctgcgtcactgtgaaacggcggcggcgcgttatggcttaagcgcggtggatattctcgttgagctgggcaaacgccggatggttggcggccaggaggatatgatcgtcgacgtggcgctggatctgcgcaacaacaaataatattgactgccgagaacgtgcattttgtatgcccatcccagcacgactgccggatgcgnngtgaacgccttatccggcctacggatggcgcgagaatntnnagnccnna

SEQ ID NO: 127 - DNA, 67 bp, Escherichia coli
  Strain O55:H7
tagcgtcgcatcaggcatctgcgcacgactgccggatgcggcgtaaacgccttatccggcctacgga

SEQ ID NO: 128 - DNA, 3432 bp, Escherichia coli
  Strain O55:H7
  modified_base (58)..(59): a, c, g or t
  modified_base (68)..(69): a, c, g or t
  modified_base (1685)..(1688): a, c, g or t
ttgtaggcctgataagacgcgttagcgtcgcatcaggcatctgcgcacgactgccggnngcggcgtgnncgccttatccggcctacggatggcgcgagaatttgtaggcctgataagacgcgcaagcgtcgcatcaggcatctgcacacgactgccggatgcggcgtgaacgccttatccggtctacatttcgcccgtaggcagtcattaaatagttctgattacgcggctggcaatgtatcagtcgcgattcacctgcacacgcaatgaggttcatcttatgtcgactcgtaccccttcatcatcttcatcccgcctgatgctgaccatcgggctttgttttttggtcgctctgatggaagggctggatcttcaggcggctggcattgcggcgggtggcatcgcccaggctttcgcactcgataaaatgcaaatgggctggatattcagcgccggaatactcggtttactacccggcgcgttggttggcggaatgctggcggaccgttatggtcgcaagcgcattttgattggctcagttgcgctgtttggtttgttctcgctggcaacggcgattgcctgggatttcccctcactggtctttgcgcggctgatgaccggtgtcgggctgggggcggcgttgccgaatcttatcgccctgacgtctgaagccgcgggtccacgttttcgtgggacggcagtgagcctgatgtattgcggtgttcccattggcgcggcgctggcggcgacactgggtttcgcgggggcaaacttagcatggcaaacggtgttttgggtaggtggtgtggtgccgttgattctggtgccgctattaatgcgctggctgccggagtcggcggttttcgctggcgaaaaacaggctgcgccaccactgcgtgcgttatttgcgccagaaacggcaaccgcgacgctgctgctgtggctgtgttatttcttcactctgctggtggtttacatgttgatcaactggctaccgctgcttttggtggagcaaggattccagccatcgcaggcggcaggggtgatgtttgcactgcaaatgggtgcggcgagcgggacgttaatgttgggcgcattgatggataagctgcgtccagtaaccatgtcgctactgatttatagcggcatgttagcttcgctgctggcgcttggaacggtgtcgtcatttaacggtatgttgctggcgggatttgtcgcggggttgtttgcgacaggtgggcaaagcgttttgtatgccctggcaccgttgttttacagttcgcagatccgcgcaacaggtgtgggaacagccgtggcggtagggcgtctgggggctatgagcggtccgttactggccgggaaaatgctggcattaggcactggcacggtcggcgtaatggccgcttctgcaccgggtattcttgttgctgggttggcggtgtttattttgatgagtcggagattaagaatgcagccgtgtgccgatgcctgacgcgccttattaagcaggggcgaaagggacttgcccccaatacacccacggcgtttacaggtatactcgctaaaaattattcagcgggtttggaaacaaagatggcaaaacttaccttacaagagcagttgctcaaagcaggattagtcaccagcaaaaaagcggcgaaggtcgagagaacggcgaaaaaatnnnncgttcaggcgcgtgaagctcgggcggcggtagaagaaaataaaaaggcacagcttgagcgtgataaacagcttagcgaacagcaaaaacaagcggcgttggcgaaagaatataaagctcaggtgaagcagcttattgaaatgaaccggatcaccattgccaatggcgatattggttttaacttcactgatggcaatctgattaagaagatttttgtcgataagctcacacaggcgcagttgattaatggtcgtctggcgattgcccgcttgttggtcgataacaatagcgaaggtgaatacgccattattcccgccagcgttgccgataaaattgctcagcgtgatgccagcagtattgtgttgcacagcgcgctcagtgccgaagagcaggatgaagacgacccgtatgccgacttcaaagtgcctgatgatttgatgtggtaaacatagataagtcgtgcgcagatgcctgatgcgacgctatgcgcgtcttatcatgcctacggcctgcgggcgaaatgtaggcggataaggcgttcacgccgcatccggcagtcgtgcactattatcaacgcatattcagtttattggcgtggtaggcaatatgctcgccaataaaactggagacaaaataatagctgtggtcgtaaccctcgtgataacggattaacgttttgatattcatctcctggcagatcttttcaagattttgagtccgcagctgttccgcgtaaaaatcatcactcaacccctgatcaaccatgatttccgcaacgcgttgaccttgtgaaataagactcaccggatcgtaatccaaccaggcctctttattttcaccaagatatgcggcaaaggcttgctgtccccacggtacttgcgatggggagacaatgggcgaaaacgccgagacgctgacatattcatctgggttacgtaacgccagcaccagcgcgcccagtccgcccatagaatgaccagagatagactttttggccgttgccggaaaatgattcatcactaaatccggcagctcgttgcggatatagtcatacattttgtaatgttcattccacggcgcttgcgtcgcgttcaggtaaaacccggcaccttgcccgagatcgtaacggtcggcatctgcgacatgactgcctcgcggactggtgtccggcgcaacaacaataatgttgtgctcagccgcgtaacgctgcacccccgatttagtaatgaaattctgctcattgcaggtcaggcccgaaagccagtacagcaccggtaatttttcacctgcagcttttggtgggagatagacgccgacattcatttcacatttcagtgatgcggaataatgccgatacacattttgccagccgccaaagctggcatgtttttcaatgagttccatcagtcattatctcacggttaatcccccggacggctgcccggagagagtattaagaaccccgtctgaagtggacggggtaaaccagcgggaaatcagtaacgaattacggttcgaatggatttgccttcatgcatcaggtcgaaggcgtcattaatttcatccaggctcatggtatgcgtgacaaacggttccagatcgatatcacctttcatcgcatcttcaaccatacccggtaactgggaacgacctttcacgccgccaaacgcggaacctttccatacgcgaccagtgaccaactggaatggacgggtggagatttcctgaccggaacccgcgacccc

SEQ ID NO: 129 - DNA, 1906 bp, Escherichia coli
  Strain O55:H7
  modified_base (1565)..(1566): a, c, g or t
gcgcactttccagcgccgcacgcatcacgttgacattaccgatgcattcaaaggtatggtcgataccccatttgttgatatccagcaggacatctttaatcggtttgtcgtagtcattcgggttaatgcagtcggtggcaccgaagcgacgcgccagatcgaatttcttcgggttggtatcgatagcgataatccgtcccgctttcgcctgacgcgcgccctgaaccactgccagaccaatcgcgccaagaccaaacacagcaacagaatcccctggctggactttagctgtgttgtgtaccgcgccaataccggtggtcacgccacagcccagcaggcagacgtgttcatggtttgcttctggattaatttttgccagagacacttccgcgactacggtgtattcactgaatgtagaacaccccatgtagtgataaagcggctgcccattgtaagaaaaacgggtggtgccgtctggcatcaggcctttaccctgggtttcgcgaaccgcaacacagaggttagttttgccagaacgacagaactcacactcgccgcactctgcggtgtaaagcgggatcacatggtcgcctggtttgacgctggttacgccttcaccgacttcaaccacaacgccagccccttcgtgaccgagaaccaccgggaatacaccttccgggtcatcgccggagagggtaaatgcgtcggtatggcaaacgccggtatgggtgactttaatcagcacttcaccttttttcggtggtgcaacgtcaatttcaacgatttccagcggtttaccgggagcaaatgcaacggcagcacgtgatttcatctctcgctcttcctcaatatggtaatagattcagctatttaagataggcacgaaccagttcaatagtgtcgtcaacggattggctgacttcgcggctgtagcagtcatttcggtcaaacgtttcccggatatggctttcaagcacttctgccatcagcccattagccgcgccccgaacggcagcgatctgttggagtatggcacggcattcggcatcaccctccagcgaccgttccagagcatcaatctgccctcgaatacgacgaactcgagtaaggacctttttcttctcttccggagtactgggcatttcgcacctcatcatctgcacgcaatatactataggggggtatgctatatgtcaatgcatacccccctatagtatataacaatggagaataattgttgtccgaagcctaaccaggtgaacggtccctcaagacagatggggaccgtttatgtgctatttttatgccgcatccgctaaaacaaacatcccgtaaggatggatttcgaggtaatagtgctcaccaatatcgggctgtaaacgggtggcgtttacttgtaataaaatctcctgtccatgccactctacggtcacttcgtactgcggccccatgtaggcgacatggcgaataacacaacgctgactctcttcgccgtgattgcttaaggtgatggcttccgggcgaacgccgacggtgccgctaccttgcaccgggaaatgcgccgnncgcggcaggcgataaccgtagatatcgacatactcttcgctaaagttcgccgggaacaggttggcgtcgcccataaaacttgccataaagcgggaggctggctgacgatagagatcctgcggtgagccaatctgcatgatgtgacctttattcatcaccagcacagtgtcggaaaccgcgaaggcctcactttgatcgtgagtcacgtagagcgacgtgatattaaactgcttttgcagctcgcggatcttatcgcgcatgctgcggcgcaggttggcatcgaggttacttaacggctcatcaaacagcagcacctttggtttgaggatcaacgcgcggg

SEQ ID NO: 130 - DNA, 32332 bp, Escherichia coli
  Strain O55:H7
  modified_base (58)..(58): a, c, g or t
  modified_base (66)..(66): a, c, g or t
  modified_base (7385)..(7386): a, c, g or t
  modified_base (8081)..(8084): a, c, g or t
  modified_base (9379)..(9379): a, c, g or t
  modified_base (9382)..(9382): a, c, g or t
  modified_base (11072)..(11072): a, c, g or t
  modified_base (15072)..(15072): a, c, g or t
  modified_base (16443)..(16445): a, c, g or t
  modified_base (17813)..(17814): a, c, g or t
  modified_base (19413)..(19414): a, c, g or t
  modified_base (19518)..(19521): a, c, g or t
  modified_base (20136)..(20137): a, c, g or t
  modified_base (22002)..(22004): a, c, g or t
  modified_base (22321)..(22322): a, c, g or t
  modified_base (22744)..(22745): a, c, g or t
  modified_base (22747)..(22747): a, c, g or t
  modified_base (22913)..(22913): a, c, g or t
  modified_base (23114)..(23114): a, c, g or t
  modified_base (24769)..(24770): a, c, g or t
  modified_base (26567)..(26567): a, c, g or t
  modified_base (27262)..(27262): a, c, g or t
cgcgctgttgctgaccaccggaaatctggtcgacatagcggtcctcgaacccttccanatccaccnttgccagcgcctctttcacccgctgctttacttcgctacgcgacacgccgagcatctttaacccgtagccgacgttttcgcccagcgacatatgcgggaacagagcgtatgactgaaacaccatgcagatatcgcgctgctgaatggaacgatgcgtgacatcttcgccatcaataaagatttgcccttcactcggtttttccagcccggcaaccagacgcaaaatggtggttttgccgcagccggaagggccaagcagcgtcaccatttgcccttgtgggatggtgagattgatattgtcgataaccgtattactgccgaatcgtttagtgacgttgcgcagttccacaaaatttttctgactcatagtgcgctccattacgcctggtttttggctttagaacgggagatacgtgcttctccgatcagccagtcaaagaggaaaataatcgccagcatcaccacgatcagaatcgaaccataggcgatggctacgccatattcgccgtcttcaacgcggttaagaatgtaggcggttgccacgcgggtgtccggcgtgacgagaaagacgatggcgctgaccgtcgtgatggcccgcacaaagctgtagatcagggccgagagaatggccggacgcagcagcggcagtaaaatgtgggttatggttcgcaaggaacccgcgcgcaggctgagtgaggcttcatccagcgatttgtcgatctgccccaggcctgcaatcccggcgcgaatacccaccggaacgttacgcatcaccatcgagataatcacaattgccgccgttccggtgagataaaccggagcgctgttaaaggcaagaatatacgaaacgcccgccaccgtacccggtacggcaaagcacagcatggtggtgaactcgatggtctttttgcctttgaattgttgacgcaccaccacccaggcgatgagcaggccaaagatagcggtaatgggagcggcaatcccggcgtagagcagagtatccagcagtgaaggccacgcgccgtcgctcattccctgaccaaatagcttgataaagttatccagcgtcagggtgtagtccacgccccagttcaccgtgaagctgccgtagaaaatgctgccgtagagcagggcgttaaaggcaatccatatcgcaagtatggcgaccacgctccacaccagggtgaccggaagcggctggacgtcgccacggtaggatttgccggaaaccgtgacgtaagagcgtttaccaatccacatatactgtatgcagaacaccagcagcgagaacagcagcaggaaagcgccaagggtgctggcggcctgataatccagctgcgagccagtaatatagaagtaaatttgcgtcgccagtacgtcgaagttaccgccaagtaccagcgggttactgaaatcagccagtgactgtaccacgacgattaaaaaggcattggcgagcgcgggcttcaacaacggcacaaacacgccgttaaaggtttgccagcggctggcgcgcagggtgtaggaggcctcttccagcgagggatgaatggttttaatggccccgtcgaggatcataaatgccattggcgtgaatgccagaacctgtgccagccagatcccggtaaaaccgtacagccagttggtgttggtcagcccaaaccactccaccataaattccgtaacatagccggaacgccccatcatgagcgtcacgcctaagccgaccacaaacggtggcgtaacgatgggcaaaatggaaaagatgcgaccaataatggcgctgcgtttagcgatgcgcgtggtataaatcgccagcaccaggccgaagaaagtacagcctatccccaccgctatcgacaagacgatagagttgacgatcacctgaacaatatgtgcctgcgagagcacggtcataaacgccagcggggcgagctctcccgcgtcgttggtgaacatcgggataaaaatggcgatgctcggccagacgataaaaatgccaatcagcgccacaatcgcaatcagtgagccgatcacgaagcggtcgccgcccagccattcgaggcgggttaaggccagcgtcataatcgcgcctagttcgacaaacagcacgatggcggcgtagcctaaaccgcgtccagccacggtggcgctgatgacgataaacgccatacagagcaatgcccagccggcatcgaaataatgacgactacgctgttcgcgcgtggcctgacgaaacgggcggaccagcaacaggctcgggagtaaataccacagccagctgatattaaaatgcgaccagccgtacgccccgaggatctcatcactcgtggattccagcaggccataatcgaggctccagctcggcaacaggacaaatgccagccagcccagcaaaacccaaaggaaaatcgcatcccgctttttcacgggatggagtgcaagtgtctgtgacatagcagttccggtatggttggccggggcaggcgtctgcgctgcacccggcaaatgcgcctaatgcgggtttatttacccatcttcacttcgctgacccatttattaatcaatgccttacgaacatccgtggaaccatatttatccatgtcgtagttgattaatttcaggtcgtcgagcttcagcgaatttggcgacgtttcggcggtggtattagtcaggatctgataagacttccctttcttccacgccagttcctgagcttcttttgataatacccagtccacaaacagtttggcgttgtcgaggttgcgcgcgcctttcagaatgctgacgccgccaatttcgtagcccgtaccttcacacggggaaatcaactccagcggcgcgccctgttctttttccagcgagtagtcatgcaggaagccaataccaatcgccgtttcgccacgggcggcgttacgtgccggggctatgcctgatttggtgtactgagagacgttggcgttcagttgttttagataatcaaaggcctgatcttccccccacagctgcgcaaaagtagccagggcggtgtaggcagtaccggaactttgcggatcggcaatttgaatttcgcctttatattccggtttggtgagatctttccagcacttcggcaccggcaggtttttctctttcagacgatcggtgtttacgccaaaaccgaggatccccacataaacggcagaggacagattccctttcacttttgccggatcgcggaatttctccatgatctgctcaaggttaggggatttatacgcctgtagcaggcccatctcgccagcctgcgattgcgggtctaaagtgccgccgtaccagacgtcagcctgggggtttttcttttcagcatcgacttttgccagggtgcttccggaaccgttgcggataaacgaggtttttacatcatatttctcgccaaacgctttggtttcggcctcacacatttcattggtggcgctgcaatagaccaccagccggccttttgcctgcgcggcacccgttaaagtcgccagcgcaacggcagaagcaatcagagtagaggtaaaggtcattttcattgttttatccttcgagcgtgagtggtggtgatgcccgccatcagtaacggcatcagcagtaaacccataagtactgcggcgaccgagagtaaactgaacattcccggccagccgtagcgttcgatgaccagcgacagcggccagcctgccagcgccgcgccaaggtaagcgaacaggccgagaaatccggtgattgaacccgccgcagctttgtgcccacactccaccgccgcaagtccaatcagcatttgtgggccaaagacgaaaaagcccacggtaaaaaagcacactgccagcagagcgtagtgatgaaccggtgccagccacagtgcggcgactgacaccatcaaccccaacgtgaacagcaaaatcattggcgctcgttgcccgctaaacagcaaatccgatccccatccggcaaataacgcgccgagtaagccgcccacttcaaacagcattaccgtggcgttggcgctgagcaggttgacaccgtggctttccgtcagccagatattgccccagtcgttaagcgcaatccggatcacataaaccagtacatatgagacgcccagtagccagatcagcggattttgcagcatggtggtgcgcaacatttgccacagccccatcggcggactttgttgttcctgacgtaactccagcggatcgtgacgccagtgaccaactgtcggtaatccctcttcctggggcgtgcctttgagttgtagcgttaaccagatccctaatgccatgctgattatccccggtgtcagcatcgcggcctgccagccccaccagtgggcggcaaaggcgctaatcagcggaataatcgctccgccaatgttgatcgacatattccagcagccccaccagaaaccgcgctcattgcgtgagtaccagtgggtcagcaagcgggcacacggtggccatccccagccctgaaaaaaaccgttcagtgtccagaccacaagcagaagcgtaagtgattcgccaaaggcaaacaccacgttcaataacccggtggcgaacaagccgacgcccataaaaccgcgttgtccgtggctgtcatgccacagtccggcggtaaatttcgacaatccgtagctgagataaaacagcgaacccagcaggccaatgtcgcctttatccagtccgaggtcggtttgtagcgccggaaggacgtaattcacgctttttcgcgtcagataaaatgcggcgtagccaataatcatgcacatcagcaatcgcggacgtaatgtccggtagcattgattaatttctctcgctgaacgcgcgtgcatggttgtctccatgttgctgactatatgaaaatgaaagtgaaaggggatgagagaaaatccgggatacctaagactttttcctggttatccggcgatttgttgcaaaaatgtgggcaagttaacaattacccgcgtgccgtgctgtttttcgagcgttaagtcgccgcccagggcgctgacgcgctcacgcatcccctgaatgccaaatccagccattttcccgctggcgatccccacaccgttgtcgctgacttccagatgcaatacctctccctgctggcgcaggataatcgtcacttcgctggcttcggcgtgtttacagatgttattgagcaactcctgcaataaccgatacaaggtaaagcgcaccgtttcgttttctggtgtggagttcagttgataggcaaactggcaatgaatgccgcgttcactaaaggcaaattcattaatcagatgcagcaacgcttcgcgaaatgtcagttcatcaagcgcgggaggccgcaactggcgcagcaattggcgggtggagagatgaatgcggcgggcgagctcattgatttggctggctgcggattgaatttgcgccggatcacgcgcccgcttcaccagttgcgactggatctgaatggcggtgatgttctgaccgatttcgtcgtgcagctctcgcgccaggttttttcgcgtgtcctcctcggtgtggatcagcttttccgccaatgcccgccgcgctgccagctcggcctccagctgttgtcggtaatggtgcaggtttagcgccagatgttgctggcgactgatggcaatgcccaagccaattcccagcaaggcctgggtcgcgaggaaaatctccagctccaccaggttactaaagcccacgccaatctggcgggcgatggtgatcatcatgctgcccaaaagcccggagagtacgccaccttgccagccaaatttccacgccatcaccacattgggcaaaaagaccacgatcaacagcagacgttcaatttcaggtgacagcaccatctgagtgccgataccaataataaaaaacaggctacaccagatgattaaagaggtacgcaaggggggattatgcgtatcgagtcccaggagctggtagcgatgctgctggcgcagaaactcaaagataagatagacaaacggcgtcagtaatacgccgccggtaaatgaggtcaaacccggtagcattattgggcctgacataaaaggggagagcagggcggtattcaacaatgaagctgccgtgacagtggctaacagcaacgtcagacgctgccagtaaagtggaaaacggtgccagaagttttgcgcaaggagggcaggaaacaggctaataaccggcgttgccagcatgagataaccgttcaatagctgttcactatggagccagaacatcatcagcaaaggggggagcaccaacgcaggccagtagcggcgagagagcaaaataacaagggcgagataaactccctgcgggagaaacaacaccgcctgttgaccgttattggtcagataaaagctgagcgtccacagcatcagccagccggttccccaggctagcacaataaacagcaaaatcacccaatgacgaagattgcgcgacattaatgccccgccaacagatggtggtcgagcgcaaaatgtaccagttcaatggtgctatggcagttcagttttcccagcacattggcgcgatgcacatgtaccgttttatgactgagttcgagtttaaaggcgatctctttaacgctgtctcctttgaccagtaactcaaacacttcacgttctcgtggggtgagaatttccagcgcctgggcgggttgcccgccgccgcgtaaagcccgaatcgcatcggcacagagataatgcccgcccagcccgaccgagcgcaccgcctgtactaactcttccggcccacagcgtttggttaaatacccgctggcaccggcatccagcgcgctttgcacaaaggttggtgcgtcataaatgctaagaataatggcgcgaaattgcggtttttgtgcacgcaggcgcttaagcaaactgaggccgttttcgtccggcatggcaatatcaatgacggcaacattgacgtcatcacggattaatgccgaccatgcctgcgcggcactactgtactgaccaatgacctccagatcgtcttccagagagagtaattgtgcgaagccagagcgcaccacaacatggtcatccaccagcactacccgaatcatacttttcttctcttattatctaattctcctatcatgcatcacggcgcggcgctggcaatcaaccagcgacagatatggaatggatgtaacaaaatggcaataatttgccggagcgcgcacatcttatctggcttgtgaaccggcgggatacgttcgccaaaaccgcaaaatgcgcaaactcgctaaccattgccgatttttttctnnaaacgctttgttcttaacaagaccttttaattcctttatcaaactgacccgcaacgaaatactgctcccataacaagacaggggagcagacaatcatggcaatttcatcgcgtaacactcttcttgccgcactggcattcatcgcttttcaggcgcaggcggtgaacgtcaccgtggcgtatcaaacctcagccgaaccggcgaaagtggctcaggccgataacacctttgctaaagaaagtggagcaactgtggactggcgcaagtttgacagcggagccagcatcgtgcgggcgctggcttctggcgacgtgcaaatcggcaaccttggttccagcccgttagcggttgcagccagccaacaggtgccgattgaagtcttcttgctggcgtcaaaactgggtaactccgaagcgctggtggtaaagaaaactatcagcaaaccggaagatctgattggcaaacgcatcgccgtaccgtttatctccaccacccactacagcctgctggcggcgctgaaacactggggcattaaacccgggcaagtggagattgtgaacctgcagccgcccgcgattatcgctgcctggcagcggggagatattgatggtgcttatgtctgggcaccggcggttaacgccctggaaaaagacggcaaggtgttgaccgattctgaacaggtcgggcagtggggnnnnccaacgctggacgtttgggtggtgcgcaaagattttgccgagaaacatcctgaggtcgtgaaagcgttcgctaaaagcgccatcgatgctcagcaaccgtacattgctaacccagacgtgtggctgaaacagccggaaaacatcagcaaactggcgcgtttaagcggcgtgcctgaaggtgacgttccggggctggtgaaggggaatacctatctgacgccgcagcaacaaacggcagaactgaccggaccggtgaacaaagcgatcatcgacaccgcgcagtttttgaaagagcagggcaaggtcccggctgtagcgaatgattacagccagtacgttacctcgcgcttcgtgcaataaaaggaggcgcagatgctgcaaatctctcatctttacgccgattatggcggcaaaccggtactggaagatatcaacctgacgctggaaagcggcgagctactggtggtgctggggccgtccggctgcggtaaaaccaccctgctgaatttgattgccggttttgtgccttatcagcatggcagcattcaactggcgggtaagcgtattgaggggccgggagcagagcgtggcgtagtttttcagaatgaagggctactaccgtggcgcaatgtacaggacaacgtggcgttcggcctgcaattggcaggtatagagaaaatgcagcgactggaaatcgcgcaccagatgctgaaaaaagtggggctggaaggcgcagaaaaacgctacatctggcagctttccggtggtcaacgtcagcgggtggggattgcccgcgcgctggcggcgaatccccagctgttattactcgacgaaccgtttggtgcgctggacgccttcacccgcgaccagatgcaaaccctgctgctgaaactctggcaggagacgggcaagcaggtgctgttgattacccacgatatagaagaagcggtgtttatggcgactgaactggttctgctttcacccggccctggccgcgtgctggagcggctgccgctcaactttgctcgccgctttgttgcgggagagtcgagccgcagcatcaagtccgatccacaattcatcgccatgcgcgaatatgttttaagccgcgtatttgagcaacgggaggcgttctcatgagtgtgctcattaatgaaaaactgcattcgcggcggctgaaatggcgctggccgctctcgcgtcaggtgaccttaagcattggcacgttagcggttttactcactgtatggtggacggtggcggcgctgcaactgattagcccgctgtttttgccnccnccgcaacaagtactggcaaaactgctcaccattgccggaccgcagggatttatggacgccacgctgtggcagcatctggcagccagcctgacgcgcattgtgctggcgctactcgcggcggtgttgatcggcattccggtcgggatcgccatggggctaagcccgacggtgcgcggcattctggatccgataatcgagctttatcgtccggtgccgccgctagcttatttgccgctgatggtgatctggtttggtattggtgaaacctcgaagatcttactgatctatttagcgatttttgcaccggtggcgatgtcggcgctggcgggggtgaaaagcgcgcagcaggttcgcattcgtgctgcccagtcgctgggtgccagccgtgcgcaggtgctgtggtttgtcattttgcccggcgcgctgccggaaatcctcaccggattacgtattggtctgggtgtgggctggtctacgctggtggcggcggagctgattgccgcgacgcgcggtttaggatttatggttcagtcagcgggtgaatttctcgcgactgacgtggtgctggcggggatcgcggtgattgcgattatcgcctttcttttagaactgggtctgcgcgcgttacagcgccgcctgacgccctggcatggagaagtacaatgagtgaacgtctgagcattaccccgctggggccgtatatcggagcacaaatttcgggtgccgacctgacgcgcccgttaagcgataatcagtttgaacaactttaccatgcggtactgcgccatcaggtggtgtttctgcgcgatcaagccattacgccgcagcagcaacgcgcgctggcccagcgttttggcgaactgcatattcaccctgtttaccctcatgccgaagggggtgacgagatcatcgtgctggatacccataacgataatccgccagataacgacaactggcataccgatgtgacatttattgaaacgccacccgcaggggcgattctggcagcgaaagagttaccttcgaccggcggcgatacgctctggaccagcggtattgcggcctatgaggcgctctctgttcccttccgccagctgctgagcgggctgcgtgcggagcatgattttcgtaaatcgttcccggaatacaaataccgcaaaaccgaagaggaacatcaacgctggcgcgaggcggttgcgaaaaatccgccgttgctacatccggtggtgcgaacgcatccggtgagcggtaaacaggcgctgtttgtgaatgaaggctttactacgcgaattgttgatgtcagcgagaaagagagcgaagccttgttaggctttttattcgcccatatcactaaaccggagtttcaggtgcgctggcgctggcaaccgaatgatattgcgatttgggataaccgtgtgactcagcactatgccaatgccgattacctgccacagcggcggattatgcatcgggcgacgattcttggggataaaccgttttatcgggcggggtaatacgagagtggacggtcctctcgcccccttggggagagggttagggtgagggggcgttcaccgtgctttcaacaggttaactccccctttctgagaggaaacaaaattaacgcagaatcttcttctcagccaaatccagcgcaaagtagctgaaaatcagatccgcacccgcacgnttaatcgaacctaagctttcgagcacgactttctcttcatctatagcacccgccagcgcggcgaacttaatcatcgcatactcaccgctcacctgatacgcgccaatcggcaattcagtacgttcacgcagctcacgcacgatgtcgaggtacgctccagcaggtttaaccatcaggcagtctgcgccctgggcttcatccagcagtgactcacgaatcgcctcacgacggttcattgggttcatctgatagcttttgcggtcgccttttaatgcgcttccggcagcttcacggaacggaccataaaaggaggaggcgaacttggtcgaatacgacataatcgccgtatctttaaagccagcagcgtccagcgcctggcgaatcgcctgtacctggccatccatcgcggcggaaggggcgatgaagtctgcacctgcagcagctgcaaccacggcttgcttgcctaaattttccagagtcgcgtcgttgtcgacgccatgctcgcacagcacaccgcagtgaccgtgagaagtgtattcacagaagcaggtgtctgacatgacaatcatttctggcaccgtctgcttgcagatgcgcgacatacgcgctaccagtccatcttcccgccaggcatcgctgccggtttcatcggtatggtgagagatgccgaaagtcatcacggaacgaataccggcgttggcgatgcgttcaatttcgcgtgccagatgtttctctggaatgcgcatcacgccaggcatggcttcaacggctttgtagtcgtcaatttcttcttcaacaaagatcggcaacaccaggtcgttaaggctaagtgttgtctcttcaaacatagcgcgcagcgcaggagatttgcgcaggcgacgagggcgttggattaagtctgtcatggtctgcctgatgtttgtggaattaaggtgcacagtatacctgaagcggggcaggagtgttttacgaaagttgtcacgatgttgacaagaagagaatgaaagagagaccagggcatctttgtaatagaaatagcaataacttcatattcactgaaaatattttttaatttttatttataggtgctggttattatttttgccaatttggttgaactgtcaaaaattgaattacttaaagttcattgcttattgataaattatttgtctgatttgttgttttggtatttttaggatctataattcaaaattaatgatttcattaacgtgttgaaatgcagtgtttttgtcaacttattctttgtgcgtatagatatttttatatatgtccgcaatcggacttaggggaaagaataattgaaccattcctctataacgccgcataatcgtcaacgcgaaacataagatgttttctatgcattgataattgatggatcaacttattacgtccctgaggagggatgacaaatgcactcctggaaaaagaaacttgtagtatcacaattagcattggcttgcactctggctatcacctctcaggctaatgcagcgaccaacgatatttctggtcaaacttacaatactttccatcactacaacgacgccacctatgctgatgacgtttactatgatggttatgtaggctggaacaactatgccgctgatagctattacaacggcgatatctacccggtcattaataacgctaccgttaacggcgtgatttctacctactatctggacgacggtatttctaccaataccaacgccaatagtctgacaatcaaaaacagcactattcacggtatgattacctctgagtgcatgactactgattgtgctgatgaccgtgctactggttatgtttatgatcgtctgacactgagcgttgataattcaacgatcgatgacaactacgagcattatacttacaacggtacctataataatgccgctgacactcatgttgtagatgtttacgatatgggtactgctattacactggatcaggaagttgatctgtccatcactaataactctcatgtagcaggtattacgctgactcagggttatgagtgggaagatattgacgacaacacagtcagcactggcgtaaacagcagcgaagtgtttaataacactattactgttaaagattctactgtgacctctggttcatggactgatgaaggtactactggttggtttggccatactggtaatgccagcaactatagcaacacgctgactgcagacgatgttgcaattgccgcaatcgcaaatccgtatgctgataatgcgatgcagactacagtaactttagacaactcaacactgatgggtgatgttgttttctccagtaatttcgatgaaaacttcttcccgcaaggtgctgacagctatcgcgatgctgatggtgatgtagataccaacggttgggatggcacagaccgtatggatgtgactctgaacaacggcagcaagtgggttggcgctgcaatgtctgttcatatggttgatgaagatggtgatggttcttacgacggatatgctgttggtactgaagcaactgcaactctgctcgatattgcagctaacagcctgtggccttcatcaactgtcggtgttgataacatcaatactcaatatgacgaaaatggccatatcgtaggaaacgaagtttaccagagcggtttgtttaatgtgactttgaacggtggttcagagtgggatacaacaaaatcttctctgattgatactttaagtattaacagcggttcccaggttaatgttgcagactctcgtctgatctctgacactgtctctctgactggcggttctaacctgaacatcggtgaagacggtcatgtagcgactaataccctgaccatcgacaatagtaccgttaaaatgtctgatgatgtttctgcgggctggggtttagaagatgctgcactgtacgcaaataccatcaccgtaactaacgacggtctgttggatattaacgttgatcagttcgatgctaacccgttccaggccgataccctgaatctgaccagtaccactgatactaacggcaacattcacgctggtgtattcgatatccatagcagtgattacgtaatggataccgatctggtcaacgatcgtaccaacgatactaccaagtcaaactacggttatggcttaatcgcaatgaactctgatggtcacctgactattaacggtaacggcgataacgacaacactgcttctatcgaagctggtcagaacgaagttgataacaacggtgaccatgttgcagccgcgaccggtaactacaaagttcgtatcgacaacgctactggtgctggttctatcgctgactacaacggcaacgagctgatctacgtcaacgacaaaaacagcaacgcgaccttctctgctgctaacaaagctgacctgggtgcatacacctatcaggctgaacagcgcggtaacaccgttgttctgcaacagatggagttgaccgactacgctaacatggcgctgagcatcccatctgcgaacaccaatatctggaacctggaacaagacaccgttggtactcgtttgaccaactctcgtcatggcctggctgataacggcggcgcatgggtaagctacttcggtggtaacttcaacggcgacaacggcaccatcaactatgatcaggatgttaacggcatcatggtcggtgttgataccaaaattgacggtaacaacgctaagtggatcgtcggtgcggctgcaggcttcgctaaaggtgacatgaatgaccgttctggtcaggtggatcaagacagccagactgcctacatctactcttctgctcacttcgcgaacaacgtctttgttgatggtagcttgagctactctcacttcaacaacgacctgtctgcaaccatgagcaacggtacttacgttgacggtagcaccaactccgacgcttggggcttcggtttgaaagccggttacgacttcaaactgggtgatgctggttacgtgactccttacgncagcatttctggtctgttccagtctggtgatgactaccagctgagcaacgacatgaaagttgacggtcagtcttacgacagcatgcgttatgaactgggtgtagatgcaggttataccttcacctacagcgaagatcaggctctgactccgtacttcaaactggcttacgtctacgacgactctaacaacgataacgatgtgaacggtgattccatcgataacggtactgaagggtctgcggtacgtgttggtctgggtactcagttcagcttcaccaagaacttcagcgcctataccgatgctaactacctcggtggtggtgacgtagatcaagactggtccgcgaacgtgggtgttaaatatacctggtaatattcttcactccgaagaaatactggtaatttaatctaaataatgcccgtcaaggatttgacgggcattactgcaaaggacgcgcaaatgttatctgtagttaaacctcttcaggaatttggtaagctcgataaatgtttgtccagatacggtacgcgcttcgagtttaataatgaaaagcaagttatattttccagtgatgtcaataacgaagatactttcgttattttagagggagttatctctctgcgtagagaagaaaacgtacttatcggtattacccaggctccttatattatggggctggctgatggtttaatgaaaaacgatataccatacaaattaatatcagaaggaatttgtacgggatatcatctaccagccaaacaaaccattacgcttattgaacaaaatcaactctggcgagacgctttttactggttagcctggcaaaatagaattctggaattacgcgacgtgcagctcattgggcataattcctacgaacaaatccgcgcaacattattatcaatgattgactggaatgaagaattgcgatcacgtattggtgtgatgaattatatccatcaacgtacacgcatatcgcgttctgtcgtcgcagaagttctcgctgctttgcgtaaaggcggctatatcgaaatgaataaaggcaaactggtcgctatcaaccgtttgccttcagagtattaatcaggatgcggggataaccaacggtttattcccgcttagctcggtcaccagatcattgatgccatcgctcatatttttaaagcgcgtcaacggcgaacgagtgaccaccacaaacgcgccaatattcttctgcgggatcatcgccatataggtaatgaaaccgccaccaccacctgtcttctgaataatccccggacgaccctctttcggggccatatatacccagcctaaaccaagcgcatccgctttgccggggacatccatgccaatcactttcgtaaactgcnnncgctgataaatcaacgtctgcatgcgatctgcctggttactgcgctgataaaaatcagatgacaaatactgctgcatccagcgcatcatatcgccaggcgtggaatagacgccgccgctgccaattgccgccagcgtgttattgcacggactggcaccgcgctcagcaaccattaaacggcggcactgatccggtgagggagtgtaggtggtgtctttcatccccaatggacgggtaatctgctcttcaaacaactgggtataaggcttgccggacgcattcgccagtgcatctgccagcaggtcgaacgcaaggttagagtacgccgcctgactgcctggcgcggctttcagcttcgccgtagaaaggtatttccagcgttgctcgcgcgttggccagacaaacaccggacgatgtgccgcgccaccgggctgttcacggggcagggcgctggtatgggttgccagattgaccagcgtaatgggcgtcccattgtaggttggcacgcgtgcgcctggcggagcatatttacttagcggatcgtttaacttcacggtcccctggtcgagcaatttcaccagcatctcactggtcattagcttggtgagggaagcaatacgcacgaccgaatccagctgcgggcgaacgttattaccaggtcgcgtttcgccataactgcgaaagacgcgctggttaccgtcgataacaaccagcgccatccccgtggcaccgctgccgtaaaaaatatgatcggcataacgatcgacaatatcagaggcaaactccggttcagtgatcggctgcgccgcatggacggaggtcaatgacgccgcacacagcacggcagaaaaaagcagactacgtttcaacggtggtgtccataaattgaatgaaggtaactgagcgtatttatactactcattgatggattgcaaagggcgaattagtgcaataatagtgttaaaaacgtaacggcgcgtaaacgcgatctttttcctgctcaccaatgcctgcatttgtgatcctgcgcgtgttaatccgcttatgtaaacaatctttggtttgtgaaatccgtcgaaacaattcttatggccaggctggcgaactaagcgccttgctatgagtcacaatgggcggtttcatttggctgacgctttgtagcggtcatgcggttaatacacagcagttgttaaaacgataagaagttagcaggagtgcatatgtttaagtcttttttcccaaagccgggaacgttttttctctcggcctttgtttgggcattgattgccgttatcttctggcaagccggtgggggggactgggtggcgcgtatcaccggcgcttccgggcagatcccgattagcgccnngcgtttctggtcgttggatttcctgattttttacgcttactacattgtttgcgtaggactttttgcattgttctggtttatctacagcccgcaccgttggcaatactggtcaatactcggtactgcactgatcatcttcgtcacctggtttttggtggaagtcggggttgccgtcaacgcctggtatgcaccgttctatgatctgattcaaaccgcgctaagttcgccgcataaagtcactatcgaacaattttaccgcgaagtgggcgtctttctggggattgcgctgatcgcggtagtgatcagtgtgctgaataacttctttgtcagtcactacgtgttccgctggcgtacggcgatgaacgaatattacatggcgaactggcaacaactgcgtcatatcgaaggcgccgcacagcgtgtgcaggaagacaccatgcgttttgcttcaacgctggagaatatgggtgtcagttttatcaacgccatcatgacgttgatcgccttcctgccggtgttggtaacgctctccgcgcatgtgccggagctgccgattatcgggcacattccgtatggtctggtgattgccgctatcgtctggtcgctgatggggaccggattgctggcagtggtagggatcaaactgccggggctggagtttaaaaaccagcgtgtagaggctgcctaccgtaaagagctggtttatggtgaagacgatgccacgcgcgcgacgccgccaacggtacgtgagctgtttagcgccgtacggaaaaactatttccgcctctattttcactatatgtatttcaacatcgctcgcattctctatttgcaggtcgataacgttttcggtttgttcttgctgtttccgtcaattgttgccggtacgattacgctcggcctgatgacgcagattaccaacgtttttggtcaggttcgcggtgctttccagtacctgattaactcatggaccacactggttgagttgatgtctatctacaaacgtctgcgcagctttgaacatgagctggatggtgacaaaattcaggaagtaacccataccttgagctaaaaaggagaagtaatgtcgcgagtcaatcatctgtcttcgctttcatttttggcggttctggttttagcggggtgtagcagtcaggcgccacagccgttgaaaaagggcgaaaaagcgatagatgtggctagcgtggtgcggcagaagatgcctgcgagcgtgaaagaccgcgatgcctgggcgaaagatctcgccaccacctttgaaagtcaggggctggcactgacgctggaaaacgtctgctcggtgctggcggtggcgcagcaggagtcaaattatcaggcagatccggccgttccgggcttaagcaagatcgcctggcaagagattgaccgtcgtgctgaacggatgcacattcctgcttttctggttcatactgcgctaaaaatcaaatcgccaaacggcaaaagttatagcgaacggctagattcggtgcgtacagaaaagcaattgagcgggatttttgacgatctgatcagcatggtgccaatggggcagacgttgtttggttcgcttaatccggtgcnnaccggtgggccgatgcaggtcagcattgcttttgccgaacagcataccaaagggtatccgtggaaaatggacggtacagtccgtcaggaagtctttagtcgccnnnncgggttgtggtttggtacttaccatttactgaattatcccgccagttatagcgcaccgatataccgttttgctgattttaacgctggctggtacgccagccgtaatgccgcgtttcagaacgcggtcagtaaggccagcggcgtgaagctggcactggacggtgatttaattcgttacgacagtaaagaacccgggaaaaccgaactggcaacgcgcaaactggcggcaaaactggggatgagcgacagcgaaattcgtcgtcagctagagaaaggtgacagcttctcttttgaggagacggcgctgtacaagaaagtttatcaacttgccgaagcgaaaacgggtaaatcactcccccgcgaaatgttgcctggcattcaactggaaagcccgaaaatcacccgcaacctgactacggcctggtttgcgaagcgcgtagacgaacggcgggcgcgttgtatgaaacagtgaacaaacaggaatgtcatgccagataaggcgttttaggccgtatctggcaacgtaaatcttactggcggcgatgtcgccagtgcagccatagcgccaccactgcaaaaatgaggcagcctactaaaaacgggatcagcccgaanntggtgccgacacctaaaccaatttccacccgtgggcgacctgtttcctggacctgcattaaacgctcatagacgccgggcgcatgcactaacaggttcagcaattgcgccccagcccaaaagcaaaacagcacaaacaacgcataggcaatgttgccaggcgttgaagaggcattgcgatattttccgctaaacagcgattttgacagggtgaaatcagccataaaaacctccggaagtcatctgcttctcttctggtgtgataccagcggcttatggcaagtctgacaggtcatttagattgtcaatatcagaatcatggtaaattgatgttgggaatattcccgaagcgtgaatcttcgttgcgagtcacaaaatagcaactttaagttaaatttattaacaattgcgaaaatgttgtctacaccacagacggttgttgcagaatatgcaaggatgttgtttttcgttaacggagcagccatgaatctgcctgtaaaaatccgccgtgactggcactactatgcgttcgccattggccttatattcattcttaatggcgtggtggggttactgggatttgaagcaaaaggttggcagacctatgccgtcggtctggtgacgtgggtgattagtttctggctggcggggttgattattcgtcgtcgcgatgaagaaactgaaaacgcccaataagaatattatcgggcgttaaaatattacattgtggttttcaatgcgttatccgcagcgtgacgctccagcgccagctcaatcaaacgtgtgatcagatcggtgtaacccagaccgctggcttgccacagcttcggatacatactgatgttggtgaagccaggcagtgtgttgatctcgttgatcaccacttcgttctctggggttaaaaacacgtctacacgcgccatgcctgcgcatcccaacgtctgataagcctgaacggcaatcgcccggatcttatcgttgatttctggcgcaatggctgccggaactaccactttcgcgccatcttcgtcaatgtacttggtgtcgtaggcatagaaatcgctggtgagtacgatctcgccacaggtgctggcttgcggattgtcgttgcccagaactgcgcattcgatctcacgacctttgatcccttgctcaacgatcactttatgatcgaactcgaacgccagatcgacggcaattgcgtattgttcttcactggttactttgctgacaccaacagaagagccctgattagccggttttacaaacagtggtaaccccagtttagcctccacttcggcaaaactgatgttgtgacgattagcgcgcgtcagggtaataaatggcgcaatgttcagcccggcatcgcgtagcagacgtttggtgacatctttatccatacaggctgctgaagccagaacatcagaacctacaaacggtaaattggcgacccgcagcattccctgcaaggaaccatcttcgcccagcgtaccgtggacaatcgggaaaatgacatccaccgtcggcaacggctgaccgttttgcgcgtcgataagctgatgctcatgtttacctggcacctgggcgaggctggtcgccgaagggcgcaacgcaatatgggcaggatcgtctgcatttagcagataattgctggcatcgctgacgtgccattgcccttgtttatcaatgcccagcagcacaacgtcgaagcgacttttatcaatggcatcgacaatgttttttgccgattgcagagacacttcatgttccgctgatttaccaccaaaaacgattcctacccgcagtttttccatcttaaaaacctatcccgtctaacacaaagtgcatacattaccacgacaaaannnggggggattcgcggccttctgaaagattgttgcaatcttctgctgacaaagcgtgcaacgtactggtgaagaaagtgcgttatctcaaagatgtgcgcaagatcacaaaaatgatgaacgggaagctaatttattcctggcttaaatggccatgcggtgagtttttttctcttaattataagttaacgaagagaatatatttcataacttttatttataataaaggttgataattaaaagcctatgttttgtgtgggtaattatttaaataagagaaacgtttcgctggtaatcaaacaaaaaatatttgcgcaaannatttcctttgtcataaaaataatacctccagacactatgaagttgtgaaacataatgttaacttctccatactttggataaggaaatacagacatgaaaaatctcattgctgagttgttatttaagcttgcccaaaaagaagaagagtcgaaagaactgtgtgcgcaggtagaagctttggagattatcgtcactgcaatgcttcgcaatatggcgcaaaatgaccaacagcggttgattgatcaggtagagggggcgctgtacgaggtaaagcccgatgccagcattcctgacgacgatacggagctgctgcgcgattacgtaaagaagttattgaagcatcctcgtcagtaaaaagttaatcttttcaacagctgtcataaagttgtcacggccgagacttatagtcgctttgtttttanntnttaatgtatttgtacatggagaaaataaagtgaaacaaagcactattgcactggcactcttaccgttactgtttacccctgtgacaaaagcccggacaccagaaatgcctgttctggaaaaccgggctgctcagggcgatattactgcacccggcggtgctcgccncttaacggctgatcagaccgccgctctgcgtgattctcttagcgataaacctgcaaaaaatattattttgctgattggcgatgggatgggggattcggaaattactgccgcacgtaattatgccgaaggtgcgggcggcttttttaaaggtatcgatgccttaccgcttaccgggcaatacactcactatgcgctgaatanaaaaaccggaaaaccggactacgtcaccgactcggctgcatcagcaaccgcctggtcaaccggtgtcaaaacctataacggcgcgctgggcgtcgatattcacgaaaaagatcacccaacgattctggaaatggcaaaagccgcaggtctggcgaccggtaacgtttctaccgcagagttgcaggatgccacgcccgccgcgctggtggcgcatgtgacctcgcgcaaatgctacggtccgagcgcgaccagtgaaaaatgtccgggtaacgctctggaaaaaggcggaaaaggatcgattaccgaacagctgcttaacgctcgtgccgacgttacgcttggcggcggcgcaaaaacctttgctgaaacggcaaccgctggtgaatggcagggaaaaacgctgcgtgaacaggcacaggcgcgtggttatcagttggtgagcgatgctgcctcactgaattcggtgacggaagcgaatcagcaaaaacccctgcttggcctgtttgctgacggcaatatgccagtgcgctggctaggaccgaaagcaacgtaccacggtaatatcgataagcccgcagtcacctgtacgcctaatccgcaacgtaatgacagtgtaccgaccctggcacagatgaccgacaaagccattgaattgttgagtaaaaatgagaaaggctttttcctgcaagttgaaggtgcgtcaatcgataaacaggatcatgctgcgaatccttgtgggcaaattggcgagacggtcgatctcgatgaagccgtacaacgggcgctggaattcgccaaaaaggatggtaacacgctggtcatagtcaccgctgatcacgcccacgccagccagattgttgcgccggataccaaagctccgggcctcacccaggcgctaaataccaaagatggcgcagtgatggtgatgagttacgggaactccgaagaggattcacaagaacataccggcagtcagttgcgtattgcggcgtatggcccgcatgccgccaatgtcgttggactgaccgaccagaccgatctcttctacaccatgaaagccgctctggggctgaaataaaaccgctcccggcagtgaattttcgctgccgggtggtttttttgctgttagcaaccagacttaatgtcagatcacgggcgcatacgctcatggttaaaacatgaagagggatggtgctatgaaaattacattactggttaccttgcttttcggtctggtttttttaaccaccgtcggcgctgccgagagaaccttaaccccacaacaacagcgtatgacctcctgtaatcagcaggcgacggcacaggcgttgaaaggggatgctcgtaagacctacatgagtgattgcctgaagaacagcaagtctgcgcctggtgaaaaaagtttgacgccacagcagcaaaagatgcgcgaatgtaataatcaagcaacgcaacaatcactgaaaggtgatgatcgtaataagtttatgagcgcctgcctcaagaaagccgcctgatacctgatagtgctaacgggtgagctactaaaatggctcacccgaaatttcatacttctgcctttagccccgtctctataatttgggaaaattgtttctgaatgttcccaaaaataatgaatgatgaaaactttttcnnaaaagcggcggcgcacggggaggaacctcctttaactcctcaaaacgaacatcagcggtccgggctgcgcttcgcccgtcgcgtcagactaccccgtgcggttggcctggctggcatgttcttaccgattgcttcaacgctggtttcacacccgccgccgggctggtggtggctggtgttggtcggctgggcgttcgtctggccgcatttagcctggcagatagcgagcagggccgtcgatccgcttagccgggaaatttacaacttaaaaaccgatgcagtattagcgggaatgtgggtaggcgtaatgggcgtaaacgtgctgccttccaccgcgatgttgatgattatgtgtctgaatttgatgggggcaggcggcccccgtctgtttgtcgcgggtctggtgttgatggtggtttcctgccttgtcaccctcgagctgacgggcattaccgtgtcgttcaatagtgcgccgttggaatggtggctctcccttcccattattgtcatttatcctctgctgtttggctgggtcagctaccagacggcaaccaaactggcggaacataaacgcaggttgcaggtcatgagtacccgcgacggcatgacgggcgtgtataaccgacgtcattgggaaactatgttacgcaatgaatttgataactgtcggcggcataatcgcgatgcaacgttactgattatcgatatcgaccatttcaagagcatcaacgatacctggggccatgatgtgggcgatgaagcgattgtggcgcttacccgacagttacaaattaccctgcgcggtagcgatgtgattggtcggtttggcggcgatgagtttgcggtaatcatgtccggtacgccagctgagagcgccattaccgccatgttacgggtgcatgaagggctaaatacattacgtttgccgaatacgccacaggtaaatttacggattagtgtgggggttgcgccgctgaacccacaaatgagtcactatcgcgagtggttgaaatcggcagatttggcgctctacaaagcaaagaaagccggacgtaaccgcaccgaagtggcggcctgacgtccggcgaaagtcatcaggatttgctgagtttttctgatttttccatacacttcgtcatcgcttcgatcactgcggcacggaagcctttctcttccagtacgcgtaccgcttcaatggtggtgcctcccggtgagcagaccatatctttcagtgcccccggatgttctcccgtttccagcaccatttttgcggaacccattaccgcctgagcggcaaatttatacgcctgggcgcgtggcatcccgcccagcacggcggcgtcggccatcgcttcgataaacataaagacgtaggctggcgaagaaccgctcacaccgaccaccgggtggatcatcggctcagcaattacttccgcttcgccaaagcagcggaaaatattcagcacatcagcggtatcttctggggttaccagcgcgtttggcgttacggaggtcatcccggcattaaccagcgcgggagtgttcggcatggcgcggataattttccggtcatggcccagcgcgcgggcaagctggtcgagcgtgacacctgcagcaatagaaacgaccagagagtctttattgaggctggaggtgatttcgctaagcactttaatcatgatgccaggtttaacggcggcaaaaatgatgtcggcgatttgcgccacttcttgcgccgattctgcggcgttgatgccgaacttgtcatgcagggcggcgactttatccggggagggngtatatacccagatttgccctggaagcacctgaccgctggcaatcagaccgccgagaatggcttttcccatattgccgcagccaataaaaccgattttcttttccattgcctcactcctgccgtgaaattcattgttttgataatcgctggcagaagcataaacagaactatgccggaaggcaaaagcgcgacacaatagaggattacccaacaaaggatgactttatgacaatttgggtggatgccgacgcgtgtcccaatgtaattaaagagattttgtatcgcgcggcggaacgtatgcagatgccgctggtactggtagcaaaccagagtttacgcgtgccgccatcgcgatttattcgtacgctgcgcgtcgcggcaggtttcgacgttgccgataacgaaattgtccggcagtgtgaagcgggagatttggtgatcaccgcagatatacctttggctgctgaagccatcgagaaaggcgctgcggcgcttaatccgcgcggtgaacgttacacgccagcgaccattcgtgagcgcctgacgatgcgcgattttatggataccttacgtgccagtgggatccagaccggcggaccagatagcctttcacaacgtgaccgccaggcctttgccgcggagctggagaagtggtggctggaagtgcaacgtagtcgtggctaaatgtaatttnttatttacacttcattcttgaatatttattggtatagtaagggatgtattgagattttcactttaagtggaattttttctttacaatcgaaattgtactagtttgatggtatgatcgctattctcatgacaccggctttcgccgcattgcgacctattggggaaaacccacgatgacacaacctctttttctgatcgggcctcggggctgtggtaaaacaacggtcggaatggcccttgccgattcgcttaaccgtcggtttgtcgataccgatcagtggttgcaatcacagctcaatatgacggtcgcggagatcgtcgaaagggaagagtgggcgggatttcgcgccagagaaacggcggcgctggaagcggtaactgcgccatccaccgttatcgctacaggcggcggcattattctgacggaatttaatcgtcacttcatgcaaaataacgggatcgtggtttatttgtgtgcgccagtatcagtcctggttaaccgactgcaagctgcaccggaagaagatttacggccaaccttaacgggaaaaccgctgagcgaagaagttcaggaagtgctggaagaacgcgatgcgctatatcgcgaagttgcgcatattatcatcgacgcaacaaacgaacccagccaggtgatttctgaaattcgcagcgccctggcgcagacgatcaattgttgattttcgagcgcctatacttaacgttcatcccgtgaaataaggaagaacgatgccaacgaaaccgccttatcctcgtgaagcatatatagtgacaattgaaaaaggaaagccaggacagacggtaacctggtaccaactcagagccgatcatcctaaaccagactcgttgatcagtgaacatccgaccgctcaggaagcgatggatgcgaaaaaacgctatgaggaccctgacaaagagtgaccgcatcagactgctcggaagggattctgagtgccactacaagggatctgcgtcacatttttcataattcatgtttttcaaataattagaatattaaacaataacaatccattactggaatcatttggaatctttacattatgccgtgcacgtctgctgctacgctttttgtcatttgtagcacaagtaagtgtcagcagtggtgcttaacacttgcccggtaattaacgacgaaataaaagtaaggtggaagaacaatgagtgcgtcgttggcgattctaaccatcggcattgtacctatgcaggaagttttgccgctcctgacagaatacattgacgaagataatatttcccatcatagcctgctggggaagttaagccgcgaagaagtgatggcggagtacgcgccagaagcaggcgaagacacaattctcacattattaaatgacaaccatctggcccatgtttcgcgtcgcaaagtagagcgtgacctgcaaggtgtggttgaagtgctcgataatcagggctacgacgtcattatattaatgagtacggcaaacattagtagtatgactgcgcgtaatacgatctttcttgagccgtcgcggatattgccaccgctggtttcctctattgttgaagatcatcaggtgggggttatcgtaccggttgaggagttgctgaccgttcaggcgcaaaaatggcaaattttgcagaaaccgcctgtattttcattgggtaaccccattcatgattcagaacaaaaaatcattgatgccgggaaagaattactggcgaaaggcgcagatgtcatcatgctggattgtttgggatttaatcagcgtcatcgcgatttactgcaaaaacagctcgatgttcctgtcttgctctctaacgtattgattgcacggctggctgcggaattactggtgtaattttgcgtgacagccagcgcatctggcccctatagtgaagtagatgttcaactaccagacagggccagtttatgcttcaaagtaatgagtacttttccggcaaagtgaaatcgatcggcttttccagcagcagcactggtcgcgccagcgtgggtgttatggttgaaggcgaatacaccttcagcaccgctgagccggaagagatgacggtaatcagtggcgcgctgaatgtgttactgcctgacgcgaccgactggcaagtgtatgaagccggttcggtgtttaatgttcccggtcacagtgagtttcatctgcaagttgccgaacccacctcttatctgtgccgctatctgtaattcctcgccttccgcttgaacgggagggcatttttctgaaatgtcctctcataaccccataataatatttcctttgctgcgattttttcaatttccgatatattcataattcatcaaggttgatataaatatcattgaagattatgaatagaattaatatattggtcatctgtatggtcttattttttatgactggcaatgcatgtgccacagagtggatcagtagcgaggaccttatcacctctgactttcatcttatgacggcagatgagcgcaacgtggttaaagcggcaaccgacgatagtatggaagctgcttatatgctaaaagataatatccgctggtattatcataatggtgacctatcattacccgctaacttcagcaataaaaataaactggtggtgaacggtaatttaacgatttccggcgattatgatgattatctgtcaggtaatggtcatctgattgtattaggtaatgttattgtcgataactttattaatcatgatttcgcgtatgtcaaaggacagatgacagcgaaaggtttagtttatgctgattacaatgatcataactttgaagtgatgaagggaattagtgcgcgaggcattattgtttccgataaagcaacgcaatttgaagtcattaaagctgaattttatatcaatgaagatggaagtggtgaaggatataactgggatgagaatattcaaaaagcctattcactggtgactgccgatctttatgatcacactgaaatcgaaaccgataacatttccaatgcgtatcctgactatgatagcgtcgcagacaacatcgttcagggtttaccgctttttcgagataaagccgctcctgaaattaatgagaaattaaaatggattgaaacggggaaactcgataatttcccagcgaataaaataaagcatcaagatccactggtggcacgttttctgactcatacagagagtttatcacccgccgttatgctgcaactgttacagcaccccgatgaccagacgcgtgaatcgatggcgcagtcctggcccgctcaacagatgcattggcttaccgatgaattaattaaagatgaggctgttgccagagggctggttaaaaacagtaatatttccgccgatgtgaataaaaaattaatgtctgtacccgtcgagagcgtacagctggagcaggccagacaggataatctttctccagatattgttgcgtcgttaagtcatagcccctttctcagtgtacgcaagacattactcagccattacgattacgcctggctggttccgactgcagtggccgatgagttgataaataacgaagacccggagttacgtgaaagaattaccggagcagatttaaccgcacaacaagcagtgatgttgagtaaagataaatcactgaaagttcgtgaagcattagcccggacgcttactgaattaaaaattacccaactgtcagcaaccctgcgtacagaggatattgaacgtatcgcagaacaaatgtatctggataataaagaaaataaaaatatcgtaaaggtgttattgatagcgttgccggagatgcgtcaactgtctctggcaaaagaagatgtgcacaatttgcgcgaaggtgcgcgttatctgacatcgaaggacgtgattagttatctattgactcagcatgatgttcccaccgtctgggatgagctggcacgcgataaattattgccgctggaatataagaaacagttatggcaacgcacattaaatttaatgatgagcaaacggcaagaagatcaagagcaagcctacgaagtacagctggcgctgattgataatggtgttgttgacgaagagatgttaaataatgccattgatttactggttgatttacccgctgaataccgctatcgaatgcgtaaccaattatttgataataaagaattaccttccggaattatcaacaaactcgatcaacagtatcgcttcaactctgactgggcgctggctgttgtcagtatgaaaaatagcacccgtagacaaagtgaaagaggattacaccgctggaaccatgaggatagcgatatttttgcggaactggcgacgataaaagataaatcagatgatgaatggtggcgtgcattgctgcaaagtcgcaatgatcatttgcgccaaacggcattacgcaacgcacataccccggcgtcgttgttaacgacattgactgagtctcaggatcggtcgctggctattaataatccacagctggctgccgatgtgaaaacggtgtggctaaaagaggatccatcattacttttatttgtcgataaacccgatctttcgcagttacgggatttagtgaaaaccggggcaacgcggaaaattcgcaatgaagcgcgtcaccggcttgaggaaaaacaatgacacaacgcccctggagcaagttacagcgggagatctatgacttactgacgccaacgatcaacctgcaaattcactgtacccgttatcccatgcgcagccaaaatggtggaagcaccgatttaccgcgttattggatcacgttggataaaaacgtgatctgggattacccgaaagactttattgcaggcaacggtggagtgcgtaattttcacggtgaaacttgctggtatccttacctgacggatatttgttcaatttctgatttattgcgtgaatatattgacaccccaaaagcggagttgttaacaaaacaatttaccagcgataaatgggggttagtgaatattctgcgtgctgctgacaggcgaatagggatgaggcgattagatcagttacggcgtaaaacgcataatattgc

SEQ ID NO: 131 - DNA, 17403 bp, Escherichia coli
  Strain O55:H7
  modified_base (6)..(6): a, c, g or t
  modified_base (812)..(815): a, c, g or t
  modified_base (4149)..(4149): a, c, g or t
  modified_base (5726)..(5728): a, c, g or t
  modified_base (10948)..(10948): a, c, g or t
  modified_base (13154)..(13154): a, c, g or t
  modified_base (14400)..(14400): a, c, g or t
  modified_base (14408)..(14408): a, c, g or t
  modified_base (15434)..(15434): a, c, g or t
  modified_base (15476)..(15476): a, c, g or t
aaaatnattgcccgccgtagcgaataattatatgcctggtgtggcttcgtacgccggataagacgcggcaggcgtcgcatccggcattaaaggaaaatcagcaattaacgttgtgcttcgccacctaatccttcaatcaggttttgaattaacgctgccagttcaccagtcatcaggatgaaatcggcatcaaaacgctgggcgaaatcttcacggtcgatatcttcgttttgatcgcgcagctcgtcgcagaacttcagacgcttgagcgaaccatcgtcgcacatcacaaactgaatgcgctgctgccagtcgagcgccagtttagtcaccacttttccggcttcaatgtgattggtgatctcttcgctggtcagatcttgtttcttcgcgcggatcactccgccatcttccagcaacgatttcagctcggcttcatcaagcagctggaagccctgtgccgcactaccggaacgtacccattcggtcagcgtcagttcaatcgggtttgccatgctcaatggtacaaccggtaacgaccccaggcttttacgcagcagtgccagcgtatcttccgcttttttggcactggcgcagtccaccataatcaaaccgttaaccgtgtcgatccacatcattgtctggctaaaacggctgaaagcacgcggcaacagagagtgcagcacttcgtctttcagcgaatctttttcggttttcttcagcttacgcgcctgttccgcttccagtttggcgattttcgcttccagcgcctgtttaatcaccggagacggtaggattttttcttctttgcnnnngcagataacaatttgaccattggcaacgtgcgttaacgcatcgctgtgcgatcccatcggaggaacccagcccatcttcgccatgtcctggctgccgcatggggtaaatgccatcgaggctagctgtttttccatctcttctgcacgcagcgaaatctcgcggctaagacggtaaaccattaaatttttgaaccacagcatgataatttccacggccttgtcgttaaatttagcgggcatgataacgaattgtcggcggccttgcattgccaatccggttgtccgtctctacgctattgatattgaaaaaaataaggagagtaccgtgcgtataggtatcgatttaggcggcaccaaaactgaagtgattgcactgggcgatgcaggggagcagttgtaccgccatcgtctgcccacgccgcgtgatgattaccggcagactattgaaacgatcgccacgttggttgatatggcggagcaggcgacggggcagcgcggaacggtaggtatgggcattcctggctcaatttcgccttacaccggtgtggtgaagaatgccaattcaacctggctcaacggtcagccattcgataaagacttaagcgcgaggttgcagcgggaagtgcggctggcaaatgacgccaactgtctggcggtttcagaagcagtagatggcgcggcagcgggagcgcagacggtatttgccgtgattatcggcacgggatgcggcgcgggcgtggcattcaatgggcgggcgcatatcggcggcaatggcacggcaggtgagtggggacacaatccgctaccgtggatggacgaagacgaactgcgttatcgcgaggaagtcccttgttattgcggtaaacaaggttgtattgaaacctttatttcgggcacgggattcgcgacggattatcgtcgtttgagcggacatgcgctgaaaggcagtgaaattatccgcctggttgaagaaagcgatccggtagcggaactggcattgcgtcgctacgagctgcggctggcaaaatcgctggcacatgtcgtgaatattctcgatccggatgtgattgtcctggggggcgggatgagcaatgtagaccgtttatatcaaacggttccgcagttgattaaacaatttgtcttcggcggcgaatgtgaaacgccggtgcgtaaggcgaagcacggtgattccagcggcgtacgcggcgctgcgtggttatggccacaagagtaaaaaacccaggcaattggcgcatcatgcctgatgcgacgcttgccgcgtcttatcaggcctacaaaatgtgccagaaccgcgtagggcggataaggcgttcacgccgcatccggcaataagcaacgcacaccgtgacagtaatctaccccagtggtttcgccagcaccggactatccgccgcttgctggcgcttatagcgaccatacagcagcaacgatgacatcgcagcaaacgaaagcagggcggcaggcagcgccacgtaattatatgccagccccagcgtcagcatcatacctccgcaatatgcgccgacggcgctaccgaggttaaacgctatttgcccacctgcggcacctaataactctccgcctttggcattttgcagtaacaatatttgcagaggtgctgaaagggcaaataatcccgcgcaacaaataaaagcaaaaataagcgacgttgttttcatgccgccgcagaaaaagagcatcagcagtgccagtacaattataaagtcagtcactgctgcaatgcgcagtggtgaataacgtcctgaaatcctgccacttagcatatttcccagcaccatccctagcccaactaacatcataataaaggtcatcgccgtttccgaaaaaccggaaataaacatcatgtatggctttacgtagctgaaccaggcaaacacacctgcgttgccaaacatggtggcggcgaaaattaaccacggggccgggctgcgcaaaaagtgaaattgttcgcgcagctttcctttcgcctcgtcgcgaatatccggcacccaaaaatagaccgatgccatcaccgcaatattaaaaacagcgatcaataaaaaggtgtaacgccagctaaattcctgacttaaatacgttcccagcggaatgcccagcaaattggcgactgtcatcccggaaaccatccccgccacggcggcggtgacttttccgggtttgataatttttgataacacgatcgctccgacgccaaaaaatgcgccatgcggaaagccggaaaccaggcgaccaatggcaagcatcaggtacgacgaagagagcgtgaacatggcgttgccaatgacgcacaacgccaccagaaacaacaagatatgtttgagtgagtagcggctggaaaagagtgcgattattggcgcaccgaccaccacccccagcgcataatacgagatcatatgcccggcagcaggaatcgaaattcctacgttatgcgccagctccgtgagcacgcccataatgccaaattcggccatccccaaaccaaacgtgcccagagccaaagataaaatgacttttttcataccaccatcacaactaccagaacggctaccaatcaccgtagccaataaagtgatagcttgcaggataacgaccagcaaggccaagagataattcgcccctctgtattcattatcctgctgaatagttatttcactgcaaacgcactttccagtttgctgtagcccaggccgttgatcttcttcactttgatctgcacaggaatacgctctttcatcgcttcaacgtggctaatcacaccgatggttttgccactggcgttcagggcatccagcgcatcaagggcggtatccagcgtttcgctatccagcgtgccaaaaccttcatcaaggaacagcgagtcaatacgtgttttatggctgaccagatccgaaagcgccagcgccagcgccagactaacgaggaaactttcgccgccggaaagggtacgggtatcgcgtaccgcatctgcctgccaggtatcaacaacctcgacttccagcgcctcgctggctttgcgctgtaacagatagcgcccgtgcagccgggtaagttgctgattagcgagatggactaaattatccagcgtcagcccctgggcaaacttgcggaatttatcgccctctttggaacctattagcgaattcagatatccccagtcctcaacctgctgcgtcatttgagcaatttgctgcagtaaggtttgttgttgctgacggttatctgcatcctgcttcagctgctggcgaatctcgccttgactcgtggtgttttcacgcaacttttggtgagtttncgctaactcttgctgaatctgctccaccgtcacagtgagagccaacccgtcaggtcggtgttgttgatgctgtgccagcgtttctgctgtctgagtgaccagcgtttgcgcctgacggcgctggttttccagattctgcttgagctgttccagctgcgttagtgtttgttcatccattagcgccgcaaggaacgcctgctgatcgtcaaagacgctggcctgtagcgcggtgtcaaactgcgcctgggctttttgcagactttgcgccgccagaacatcctgttgctgtaacgtctgctgctggctgtgtaatgcgagacattgttcatgaacctgccgccagttatccagcgccacagtttcttcgctgtgcgggagatcatcactttgcggcaacgtttccagaatcggcgtcagctgctgaatacggttttgcagcgcggttaattcgttctggcgttgctgccagctctgcgcttcttgctgacgtgtcgccaaccagctctcttcttcatcttcctgtggcaatgtcagtgcataacccgccaatgccgttaagagctgctgctggcgttgttcaatttgctgttgatactggataatttgctgattatgcgcggcaatctgcccttgtaattcatgtcgttggctgagtaaccgcagctggcgttcgtgctcatcttgtgcatccagccacggttgaatatcgtcctgtggctgcaaggtgatattgaggctggccgtgacggcttgccattgttgagtaagtgcttgctcatcttgtcggaggctttgcgcttcgttttcatcgcgctgaagctgcttcgttaatgcatccagttgcccgcgcagcgccgcaccttcttcgccgagctttttaacttcgttttccagcgccagtaatcgagactgattaacgccaggctccagcgcctgatacgcctcgaccgccggatggctggtggaaccacaaagtggacaaggctgacccgcctgtaactgtgcacgttgagcttccagcgttttgatgcgcgcttcctgctcgcaaatggttttcacatcggcaagttgctgcgtcttttctttataacgctggcgcatttcgttaagtgcggcattacgttgcgtctgttccagagtgacattctggatagtgaccattaactgcgccagacgtttttgttggggaacaatctgcccatgcagcgcgaccaggcgctgacgcagtgggcgttgctcagcatgttgcgccagggcggtagcaacttcatcggcggttaacgtcaacgtgatcgccgcaagcgcattaagtttttgctcagcatgggttaactgttgctgccattgccgcagatgctcgcgatcgctggtttgttgggagaactgcgcacgccaacccgccagttcgttgttccactgacggaagcggtcgtgttcctgtaaccaggtattcaggctttgttgctgctgctgtaattctgctgactgcttcgccgcgtggtggcgaatgctcgcgcgaagcgccattgtgttctgtaagcgagtatttacttcttcaatctgctggcgagtatgcnnnagcgccgcgctgtgttctgcgatgcgttcccagtgcggacgaagatttcgtgccggttgtgccagactgagcgccgccagttgaggttgcgctttttcttcttcggctaacgcctgttgcaaggcctgctgacggcggctggcttcttgctgcaattcgtccagacgcgttaaccagtttagtgattgttgttcttgctgctgcgcggtaagtaactgtttttcttcgtcagtaagtacctgcaaactcgctgtcagcgattgcacttgttccggcgtgagcaacgcgacgcagctggcctgcgcttgcagcttctccagctctgtgcgggccgatttgtgctgctcaaaaaccatcgccgagatttgcccgtagatttcagtgccggttaactcctcgagcaattccgcgcgttctttgggtttggcattcaggaaggcagcaaattgcccctgcgaaagcagcatcgaacgggtgaagcgcccgtaatccagcccggttaacgtcgctgtcagttccagcttatctttcactttgtcggcgagaattttgccgtcggcgcagcgcgccagctctacgcgtggcacctgcaaattaccgtcgggttggttacgcgcccgattctggctccagaacgcgcgatacgcttcacctttcacttcaaactccacctccgccagacattcagcggtatcgcgggtcatgagatcattttgcgattgtgaaacgttagagagacgcggagtttcgtgatacagcgccagacaaatggcgtccagcagggtggttttccccgcaccggtcgggccggtaatggcaaacagcccgttgctggcgaacggctcgcgggtgaaatcaatcttccattcgccttttaatgagttcaggtttttcaggcgcaggctgagaattttcatgcttcgtgttctccggcgagggtatgcaacgtcgtggtgaaaagatgctgcagacgttgctgctgcgattcatccagttcttccagtgccagacggcgattgaacacctcttcgacgctgagttcgctgagggtttcacgctgttggctggctaacacacgctcgcgctgttcacgactccgacgtaccagcaatatttcaacaggcaatgattcggttaatgcctggattttgcgctgaatatcatgcagatactcatcagtagtgatttcgatatccagccagacaggtggctcctgcgatacatcgcgccactgttccagctgtgcggtaatcgacgccagatcgcctttcagcactgccatgggttgcgttaccggtacgttcaggttttccacgctctctaatttgccgtttgaaaatgtcaccagatggacatatttactcttaccgcattcatcaaaactcagtggaatgggggagccgcaatagcgaacatgttccatgccgccaataatctgtgcgcggtgaatatgcccgagcgcgatgtagtcggctggtggaaagttttgtgccggaaacgcgtccagcgtgccaatataaatgtcacgcacggcgtcacttttactggcccccacggtcgttaaatgtcccgtggcgatgatgggcagaggctgatcgccgcgcagtttgcaggcatcggcatagtgttgttggtaataatcggtaatcgctgccagtaaatgctgctgtttttcaataccgttaagccccgcctggctggtaataatgtcacgcggacgtaaaaacggaatggggcacagcactgcgcctggcgtcccgtcgcgacgaggcaagatttgcggcgcatgtccggcgctggcgaccacggtagtattgaggaacgccatgatatcgcgcgattcattcagcgtggcgaccgagtcatggtttcctgccagtaccaccagatgacagccagtttgctgtaaattgacaacaaaacggttgtataacgtgcgggcgtaactgggcggcgagccggtatcgaaaacatcaccggcaacaataatcgcatccacctgatgggtttgtgctgtctccagcagccagtcaagaaaagcctgatgttcagcttcgcggcttttactgtagaagttctggccgagatgccagtctgaggtgtgaaggatgcgcataacggttccctggcgaaaaagcatgggcgcgattatacccaaacagatgtgccatttgcttttttctgcgccacggaaatcaataacctgaagatatgtgcgacgagcttttcataaatctgtcataaatctgacgcataatgacgtcgcattaatgatcgcaacctatttattacaacagggcaaatcatggcgagacgtattctggtcgtagaagatgaagctccaattcgcgaaatggtctgcttcgtgctcgaacaaaatggctttcagccggtcgaagcggaagattatgacagtgctgtgaatcaactgaatgaaccctggccggatttaattctccttgactggatgttacctggcggctccggtatccagttcatcaaacacctcaagcgcgagtcgatgacccgggatattccagtggtgatgttgaccgccagaggggaagaagaagatcgcgtgcgcggccttgaaaccggcgcggatgactatatcaccaagccgttttcgccgaaggagctggtggcgcgaatcaaagcggtaatgcgccgtatttcgccaatggcggtggaagaggtgattgagatgcagggattaagtctcgacccgacatctcaccgagtgatggcgggcgaagagccgctggagatggggccgacagaatttaaactgctgcacttttttatgacgcatcctgagcgcgtgtacagccgcgagcagctgttaaaccacgtctggggaactaacgtgtatgtggaagaccgcacggtcgatgtccacattcgtcgcctgcgtaaagcactggagcccggcgggcatgaccgcatggtgcagaccgtgcgcggtacaggatatcgtttttcaacccgcttttaacgccttgctcatcggacgcagagcagggcttatgatttcttaactggagtatcttacgtgctggaacggctgtcgtggaaaaggctggtgctggagctgctactttgctgcctcccggctttcatcctgggtgcattttttggttacctgccctggtttttgctggcatcggtaacaggactgcttatctggcatttctggaatttattgcgcctttcatggtggctgtgggtggatcgcagtatgaccccgccaccggggcgtggtagctgggaaccgctactatacggcttacaccagatgcagctgcgaaataaaaaacgccgccgtgaactgggcaatctgattaaacgctttcgtagcggcgcggagtcgctgcccgacgcggtggtgctgaccacggaagagggcggtattttctggtgtaacggtctggcgcaacagattcttggtttgcgctggccggaagataacgggcagaacatccttaacctgctgcgttacccggagtttacgcaatatttgaaaacgcgtgatttttctcgcccgctcaatctggtgctcaacaccgggcggcatctggaaattcgcgtcatgccttatacccacaaacagttgctgatggtggcgcgtgatgtcacgcaaatgcatcaactggaaggggcgcggcgtaacttttttgccaacgtgagccatgagttacgtacgccattgaccgtgttacagggttacctggagatgatggatgaacagccgctggaaggcgcggtacgcgaaaaagcgttgcacaccatgcgcgagcagacccagcggatggaagggctggtgaagcagttgctaacgctgtcgaaaattgaagccgcaccgacgcaattgctcaatgaaaaggttgatgtgccgatgatgctgcgcgttgttgagcgcgaggctcagactctgagtcagaaaaaacagacatttaccttcgagatagataacggcctcaaggtgtctggcaacgaagatcagctacgcagtgcgatttcgaacctggtctataacgccgtgaatcatacgccggaaggcacgcatatcaccgtacgctggcagcgagtgccgcacggtgccgaatttagcgttgaagataacggaccgggcattgcaccggagcatattccgcgcctgaccgagcgtttttatcgcgttgataaagcgcgttcccggcaaaccggcggtagcggattagggttagcgatcgtgaaacatgcggtgaatcatcacgaaagtcgcctgaatattgagagtacagtaggaaaaggaacacgtttcagttttgttatcccggaacgtttaattgtcaaaaacagcgattaatccgcctttgtcatcttttattgccataagccagccgatgctggcttattttctttgcagtcaaaatacgggcgttagattttacaacggttggtgattttttgttcgcatgattagccatgtctttttcacggaaatagtgttttatactggttggtgatttcttatcgctatatacctctggtttttagatccctccttgctttaaaacgttataagcgtttaaattgcgcttcaggtgctgtcatactgactgcattaacgcggtaaatcgaaaaactattcttcgccgcgcctggttgggagtatttcccgctaaaattgtttaaatataccgctgtatcatccccagggattggcacaaaaatttaacgttacaacaccacatccacaggcagtatgatttatgacccatcaattaagatcgcgcgatatcatcgctctgggctttatgacatttgcgttgttcgtcggcgcaggtaacattattttccctccaatggtcggcttacaggcaggcgaacacgtctggactgcggcattcggcttcctcattactgccgttggcctgccggtattaacggtagtggcgctggcaaaagttggcggcggtgttgacagcctcagcacgccaatcggtaaagtcgctggcgtactgctggcaacggtttgttacctggcggtggggccgcttttcgctacgccgcgtacagctaccgtttcttttgaagtggggattgcgccgctgacgggtgattccgcgctgccgctgtttatctacagcctggtctatttcgctatcgttattctggtttcgctctatccgggcaagctgctggataccgtgggcaacttccttgcgccgctgaaanttatcgcgctggtcatcctgtctgttgccgcgattgtctggccggcgggttctatcagcacggcgactgaggcttatcaaaacgctgcgttttctaacggcttcgtcaacggctatctgaccatggatacgctgggcgcaatggtgtttggtatcgttattgttaacgcggcgcgttctcgtggcgttaccgaagcgcgcctactgacccgttataccgtctgggctggcctgatggcgggtgttggtctgactctgctgtacctggcgctgttccgtctgggttcagacagcgcgtcgctggtcgatcagtctgcaaacggcgctgctattctgcatgcttacgttcagcacacctttggcggcggcggtagcttcctgctggcggcgttaatcttcatcgcctgcctggtaacggcagttggcctgacctgtgcttgtgcagaattctttgcccagtacgtaccgctctcttatcgtacgctggtgtttatcctcggcggcttctcgatggtggtttctaacctcggcttaagccagctgatccagatctccgtaccggtgctgaccgctatttatccgccgtgtatcgcactggttgtattaagttttacacgctcatggtggcataattcgtcccgcgtgattgctccgccgatgtttatcagcctgctttttggtattctcgacgggatcaaagcatctgcattcagcgatatcttaccgtcctgggcgcagcgtttaccgctggccgaacaaggtctggcgtggttaatgccaacagtggtgatggtggttctggccattatctgggatcgcgcggcaggtcgtcaggtgacctccagcgctcactaaatcactgaacatttgttttaaccacggggctgcgatgccccgtggttttttattgtgttgatgggttaggaattgatggaaagtaagaacaagctaaagcgtgggctaagtacccgccacatacgctttatggcactgggttcagcaattggcaccgggctgttttacggttcggcagacgccatcaaaatggccggtccgagcgtgttgttggcctatattatcggtggtatcgcggcgtatatcattatgcgtgcgctgggggaaatgtcggtacataacccggccgccagctctttctcgcgttatgcgcaggaaaacctcggcccgctggcaggttacattaccggctggacctactgctttgaaatccttattgtcgccatcgccgatgtgaccgcttttggtatctatatgggtgtctggttcccgacggtgccgcactggatttgggtactgagcgtggtgctgatcatttgcgccgtaaacctgatgagcgtgaaggtattcggtgagctggaattctggttctcgttctttaaagtcgccaccatcatcatcatgattgtcgccggtttcggcatcatcatctgggggattggcaacggcgggcaaccgaccggtattcataacctgtggagcaacggcggcttcttcagtaacggctggcttggcatggtaatgtcgttgcaaatggtgatgtttgcttacggtgggatcgaaattatcgggattaccgccggtgaagcgaaagatcctgagaaatcgataccgcgtgcgattaactccgtgccgatgcgtattctggtgttctacgtcggtacgctgttcgtcattatgtctatctacccgtggaatcaggttggcactgccggtagcccgttcgtgctgacgttccagcatatgggcattacctttgccgccagcattcttaactttgttgtgctgactgcttcgctgtcggcaattaacagtgatgtatttggcgtaggccgtatgctccacggtatggcagagcagggcagcgcgccgaaaattttcagcaaaacgtcgcgtcgcggtattccgtgggttacggtgctggtgatgactaccgcgctgctgtttgcggtgtatctgaactacatcatgccggaaaacgtcttcctggtgatcgcttcgctggcaaccttcgccacggtgtgggtgtggattatgatcctgctgtcgcaaattgccttccgtcgccgtttgccgccagaagaagttaaggcgctgaaatttaaagtgccgggtggggtagcaacgaccatcggcgggctgattttcctgctctttattatcgggttgattggttatcacccggatacgcntatctcgctgtatgtcggtttcgcgtggattgttgtgctgttgattggctggatgtttaagcgtcgccacgatcgtcagctggctgaaaaccaataatacttgcgttctgtaagccggttcaggaggaaatcctgatccggctattccgaaagttatccgcccccgtcctcctcccccaaatatccttcagatgatgagtgatcctgcattaggctatggcaaggtgatcagattttcatcacaggggaattatgatgttaaatgcatggcacctgccggtgcccccatttgttaaacaaagcaaagatcaactgctcattacactgtggctgacgggcgaagacccaccgcagcgcattatgctgcgtacagaacacgataacgaagaaatgtcagtaccaatgcataagcagcgcagtcagccgcagccaggcgtcaccgcatggcgtgcggcgattgatctctccagcggacaaccccggcggcgttacagtttcaaactgctgtggcacgatcgccagcgttggtttacaccgcagggcttcagccgaatgccgccggcacgactggagcagtttgccgtcgatgtaccggatatcggcccacaatgggctgcggatcagattttttatcagatcttccctgatcgttttgcgcgtagtcttcctcgtgaagctgaacaggatcatgtctattaccatcatgcagccggacaagagatcatcttgcgtgactgggatgaaccggtcacggcgcaggcgggcggatcaacgttctatggcggcgatctggacgggataagcgaaaaactgccgtatctgaaaaagcttggcgtgacggcgctgtatctcaatccggtgtttaaagctcccagcgtacataaatacgataccgaggattatcgccatgtcgatccgcagtttggcggtgatggggcgttgctgcgcttacgccacaatacgcagcagctgggaatgcggctggtgctggatggcgtgtttaaccacagtggcgattcccatgcctggtttgacaggcacaatcgtggcacggggggagcttgtcacaaccccgaatcgccctggcgcgactggtactcgtttagtgatgatggcacggcgctcgactggcttggctatgccagcttgccgaagctggattatcagtcggaaagtctggtgaatgaaatttatcgcggggaagacagtattgtccgccactggctgaaagagccgtggaatatgnacggctgncggctggatgtggtgcatatgctgggggaagcgggtggggcgcgcaataatttgcagcacgttgctgggatcaccgaagcggcgaaagaaacccagccggaagcgtatatagttggagagcattttggcgatgcacggcaatggttacaggccgatgtggaagatgccgccatgaactatcgcggcttcacattcccgttgtggggatttcttgccaataccgacatctcttacgatccgcagcaaattgacgctcaaacctgtatggcctggatggataattaccgcgcagggctttctcatcaacagcaattacgtatgtttaatcagctcgacagccacgatactgcgcgatttaaaacgctgctcggtcgggaggttgcgcgcctgcccctggcagtggtctggctgttcacctggcctggtgtaccgtgcatttattacggtgatgaagtgggactggatggcaaaaatgatccgttttgccgtaagccgttcccctggcaggtggaaaaacaggatatggcgttattcgcgttgtaccagcgaatgattgcgctgcgtaagaaaagtcaggcgctgcgtcgtggcggctgtcaggtgctgtatgcggaagataacgtggtggtatttgtccgcgtgctgaatcagcagcgtgtactggtggcaattaaccgtggcgaagcctgtgaagtggtgctacccgcgtcaccgtttcttaatgtcgtgcaatggcaacgcaaagaaggccatgggcaactgacagacgggattctggctttgcctgccatttcggctacggtgtggatgaactaaagcatctgttttatttgttacgtcgttagtcaccagccctgacactacgcagcgcaaaaaagctgctcaatgtcagggctgaatttgttaaatatttgtcccgatcgatatgagcgatttttggtattgtttgcccatgatgttatgtacaacatgctccaggataaccctgtagtggagcaaagatatgacaatttcaaattcgaattnattgaaaccgtttattactggtactgagttgccaccttttanagaggatgtcttttctaaaacagaagaacaatttaaaaaaagcacctatggcaaatcgcttttcatttccggaaatgaaaacttagtaaacatttcagcggaaaaaatcgatgaaataaaaaatagcaaaaatttcttttcaaacattgtaaatataataattttactcattaagcatcctgataaaattctgcccattcttcatggttgtcctgtagagtcgatcgaagtcattaagaatgcgaaacgaacgggacaatggtcatatgagatgactgataagaacgggcagagtattgaagtgtcctatattttcactgataccatagatgataaatctgatggaaaattatgcttaaaaatctgtaactcctgcaaccaaaatgattctagtacacatgaatataaaatagatcatcaacagttgaaaaatcacataaggcaacttgaggagtgggcccttcttgaaaagttttatgataacaacgcttattattctaaacgtacaaaacaattagagaagaaaattgccgatgcggggtttataacaaggaaggttaaagccgagaactttaatgtaaaagagtttaaagacgatatagcctcgatgctttgtgaacagccccccatgcgtacacaccagatttcttcatccggatacgtatctgccgataaactgcacaaactctataagacaaatttggaagacgcgcagagagatctgaaaacaacaccggttgacatcgatggtgttagtctaaaatcaataactcgggaaaaaattgcggaagaaattgcgaaaaaaactgcggaaataattgcgaaacaaaatgcgaagagcattgaggagaagaatattgaaaaaaacaagaaacaaacaaattctgaggataattttgtcttaaaattctcaccggaagaaatcaatgagatgctcctggattacagcgatgaagaacaaaaaaaattaagaccttttttcactagtgatcacatctattgtttgtttgatgcttttagtcagggtttgcataatgttgctcgtaatggcagtccacggtatgcaggtttactacgtcaaatagcatccaagtctgcgatattacaagattttgatcaacaattgttctggcgcacgtttacaggaggggtcctccatcgacatatctctgtgaagagcgagccagaaaagacagatgtatggcgattcagtagccaatttgattttccacatataaatgaaaacggagagttgtccagaacggtactcatgttcgagggggttgctgaaagcaactttaaagatatcgccaatcattccagcgaatgtttttcttaccgttgttatgccgccccgctggatgcgaatgctaaaaaatagtgacgccggagtttgaagtttcagagcgccttgcgtgacgcctgcgccatcatccgtggataaaactgccagaagcgggtttcgagggcggcataatgggcgtctaaatcgtaccaggagtcacgcagggcatccagacgtgggcgacggcttgccatgccgtttaacacgttctggatgaaatccatatcgcgatagcgcaccagccactgctctgaccataagtagttgttcaggttgataaagcgtggcggtgagtccggcaaaattgtcatcacttgctcgcgggcataacaaacaaattcctgtagcggaaagtccggcgacagctgcgaccagtgacgggaaagaaagtgatcccacatgacatccagcgtaataggcgcaacgcggcgagtttcactacgaaaccactcccgtgcttcgcggacttccggcagattgtcagtcaatacgtcgatacgtcgatgcatatgaatgccagccacgacgtcgggcggaaaactttcttcaggatttccgcgtacgaaatcagccagcaaattg

SEQ ID NO: 132 - DNA, 336 bp, Escherichia coli
  Strain O55:H7
  modified_base (2)..(2): a, c, g or t
  modified_base (5)..(6): a, c, g or t
  modified_base (8)..(8): a, c, g or t
gnganntntccgcgagatgggctaaatgcaggtgagctaaaaaattcatcgattatattctatccaaaggggggtaaaggttgcagggagagcgccccggcactagactacccgcctcttattttagtctgagtcagtgtcatgcgcgttaccgatttctcctttgaattgcccgaatccctgattgcccactatccgatgcctgaacgcagtagctgtcgtttactgtcgctggacgggccgacgggcgcgctgacgcacggtactttcaccgatttactcgataagctcaaccccggcgatcttctggtttttaataatacccgggtgatcccg

SEQ ID NO: 133 - DNA, 1887 bp, Escherichia coli
  Strain O55:H7
  modified_base (1110)..(1110): a, c, g or t
ttgggcgtaaagccagcggcggcaagattgaagtgctggttgaacggatgctcgacgacaaacgcattcttgcgcatattcgcgcctcgaaagcgccaaaacctggcgcagaactgctgctgggcgatgacgaaagtattaacgcaacaatgaccgcgcgccacggcgcactgtttgaagtcgaatttaatgatgaacgctcggtgctggatattctcaacagcatcggccatatgccgctgccgccgtatatcgaccgtccggacgaagacgctgaccgcgaactttatcaaaccgtttatagcgaaaaaccgggcgcggttgcagccccgaccgctggtctgcattttgacgaacctttgctggaaaaattacgcgccaaaggcgtggagatggcgttcgtcaccctgcacgttggtgcgggcaccttccagccggtacgcgtcgacaccattgaagatcacatcatgcactcggaatacgctgaagtaccgcaggatgtggtagacgcggtactggcggcgaaagcgcgcggtaaccgggtgattgcggttggcaccacctcagtacgttcgctggaaagcgcggctcaggcggcgaaaaacgatctcatcgaaccgttctttgacgatacccaaatctttatctatccgggcttccagtacaaagtggtcgatgcgctggtgacaaacttccaccttccggaatcgacgctgattatgctggtttcggcctttgccggttatcaacacacaatgaatgcctataaagcggcggtagaagagaaatatcgcttttttagttacggtgatgcgatgtttatcacgtacaatccgcaggcaattaatgagcgcgtcggggagtaattccgcggcgctggtttaaacgttggactgtttttctgacgtagtggagaaaaaatgaaatttgaactggacaccaccgacggtcgcgcacgccgtggccgcctggtctttgatcgtggcgtagtggaaacgccttgttttatgcctgttggcacctacggcaccgtaaaagggatgacgccggaagaagttgaagccactggcgcgcaaattatcctcggcaacaccttccacctgtggctgngcccgggccaggaaatcatgaaactgcacggcgatctgcacgattttatgcagtggaagggaccgatcctcaccgactccggcggcttccaggtcttcagccttggcgatattcgtaaaatcaccgaacagggcgtgcacttccgtaacccgatcaacggcgacccgattttcctcgacccggaaaagtcgatggagattcagtacgatcttggttcggatatcgtcatgatctttgatgagtgtacgccgtatcctgctgactgggattacgcaaaacgctccatggagatgtctctgcgttgggcgaagcgtagccgtgagcgttttgacagtctcggaaacaaaaatgcgctgtttggtatcattcagggcagcgtttacgaagatttacgtgatatttctgttaaaggtctggtagatatcggttttgatggctacgctgtcggcggtctggctgtgggtgagccgaaagcagatatgcaccgcattctggagcatgtatgcccgcaaattccggcagacaaaccgcgttacctgatgggcgttggtaaaccagaagacctggttgaaggcgtacgtcgtggtatcgatatgtttgactgcgtaatgccaacccgcaacgcccgaaatggtcatttgttcgtgaccgatggcgtggtgaaaatccgcaatgcgaagtataagagcgatactggcccactcgatcctgagtgtgattgctacacctgtcgcaattattcacgcgcttacttgcatcatcttgaccgttgcaacg

SEQ ID NO: 134 - DNA, 6800 bp, Escherichia coli
  Strain O55:H7
  modified_base (517)..(520): a, c, g or t
  modified_base (4863)..(4863): a, c, g or t
aggcgcgcgactcaataccattcataaccttcgttactaccagcgtttgatggcgggtttacgcaaggctattgaagagggtaaattagagagcttcgtaactgatttttaccagcgtcaggggcgagaagtaccacctttgaacgttgattaatattaataatgagggaaatttaatgagcttttttatttctgatgcggtagcggcaacgggtgcaccggcgcaaggtagcccgatgtctttgattttgatgctggtggtattcggtctgattttctatttcatgatcctgcgtccacagcagaagcgcaccaaagaacacaaaaagctgatggactccattgccaaaggtgatgaagttctgacgaacggtggcctggttggtcgcgtaaccaaagtagcggaaaacggctacattgctatcgcgctgaatgacaccactgaagtagttattaaacgtgacttcgtagctgccgtcctgccgaaaggcaccatgaaggcgctgtaattaaaatnnnnccctaagggaattgccgtgttaaaccgttatcctttgtggaagtacgtcatgctgatcgtggtgattgtcatcggtctgctgtatgcgcttcccaacctgtttggtgaggatccggctgttcagatcactggtgcgcgcggagtcgccgccagtgagcaaacgctgatccaggtccagaaaacgttacaagaagaaaaaataactgctaagtctgtggcactggaagagggcgctattcttgcgcgcttcgactccactgacacccagctgcgcgctcgtgaagcattaatgggcgttatgggtgacaaatacgtcgtggcgcttaaccttgccccggcaacgccgcgctggctggcagctattcacgctgagccgatgaagctcggccttgacctgcgtggcggcgttcacttcctgatggaagtggatatggacaccgcgcttggcaaactccaggaacaaaatatcgatagcctgcgcagcgacctgcgcgaaaaaggcatcccgtataccaccgttcgtaaagaaaataactacggcctgagcatcactttccgcgatgctaaagctcgtgatgaagccattgcgtatctgagcaagcgtcatccggacctggtgattagcagtcagggcagcaaccagctgcgtgcggtaatgagcgatgctcgtctgagtgaagcgcgtgaatatgcggtgcagcagaacatcaatatcctgcgtaaccgtgtaaaccaacttggcgtggcggagccggtggttcagcgtcagggtgctgaccgtatcgttgttgaactgccaggtattcaggacactgcgcgtgcgaaagagattctgggtgcgacggcaacgctggaattccgtctggtaaacaccaacgttgatcaggccgctgcggcatccggtcgcgtaccgggcgactctgaagtgaaacagacccgcgaaggtcagccggttgtgctgtacaaacgcgtaattcttaccggtgaccatatcaccgactccacttccagccaggacgaatacaaccagccgcaggttaacatctcgctcgatagcgctggtggcaacattatgtctaacttcaccaaggacaacatcggcaaaccgatggcaaccctgtttgtggagtacaaagacagcggtaagaaagatgcaaatggtcgtgcggttctggtgaaacaggaagaggtgattaacatcgccaacatccagtctcgtctgggtaacagcttccgtatcaccggcatcaacaacccgaacgaagcccgtcagctgtcactgctgctgcgtgccggtgcgttgatcgcgccgattcagattgttgaagaacgtacaattggcccgaccctgggtatgcagaacattgagcaggggctggaggcttgccttgccggtctgctggtttctattctgttcatgatcatcttctataagaagtttggtctgattgcgaccagtgctctgattgccaacttgatcttgatcgtcggtattatgtcgctgttgccaggcgcaacactgagtatgccaggtatcgcgggtatcgtcttaacccttgcggtagcggtcgatgcgaacgtactgatcaacgaacgtattaaagaagagttgagcaacggacgtactgttcaacaggcaattgatgaaggttatcgtggcgcattcagttctatcttcgatgcgaacatcaccacgctgattaaagtcatcatcctgtacgcagtgggtaccggggcaattaaagggttcgcgattactaccggtatcggtgtggcgacgtcgatgtttaccgcgattgtcggtacgcgtgccatcgtaaacctgctatatggcggcaagcgcgtcaagaagctgtcaatctgaggagtgcgatgtggcacaggaatatactgttgaacaactaaaccacggccgtaaagtctatgactttatgcgctgggactactgggcttttggcatctctggtctgctgttaatcgctgctatcgttattatgggcgtgcgcggctttaactgggggctggatttcaccggtggtacggttatcgaaattacgctcgaaaaaccggctgaaattgacgtaatgcgtgatgcattgcaaaaagccggttttgaagagccgatgctgcaaaactttggtagcagccacgacatcatggtccgtatgccgcctgctgaaggcgaaaccggcggtcaggtgctgggcagccaggttctgaaggtgattaacgaatccaccaatcagaatgcagcagtgaagcgtattgagttcgtcggtccgagcgtgggggcagaccttgcgcaaaccggtgcgatggcgttgatggcagcgctgctgtctatcctcgtgtacgtaggtttccgctttgagtggcgactggcggcaggggtggttattgcgctggcgcacgacgttatcattacgctgggtattttgtcgttattccatatcgagattgacctgaccattgtggcatcgttgatgtcggttatcggttactcgcttaacgacagtatcgtggtatcggaccgaattcgtgaaaacttccgcaagatccgtcgcggtacgccttacgaaatctttaacgtgtccttgacccagacgctgcaccgtaccttgatcacatccggtactaccttgatggttatcctgatgctgtatctcttcggtggtccggtactggaaggcttctcgctgaccatgcttatcggtgtttccatcggtactgcatcttccatctatgtggcatctgcgttggctctgaaactgggtatgaagcgcgaacacatgttgcagcagaaagtggaaaaagaaggggcggatcagccgtcaattctgccgtaatggtgttttaaatccgttctgttaaaaaaaccgtggcgtatttgcgctgcggttttttttgcctgtttcacaggcaactgaatacggtttggttgtagaaagcgttctgacatatactttgtattaatagttaatacgtggagatcgcttatgcgcaaaattacctcagtaagcgttggcgaacaattagatagttttattacccggatggtccagtctggtcgttatggctcggccagtgaagtaatgcgttcggcacttcgtctattggaacaacaagaatccagggatgaagctgtcagaaatgctgttattgaaggtcttgagagcggtgaaagttcgatgacgcttcgtgatatcgcagcagaaaggaagcaaaaacatcgtgtataagcttagcggaaaagctgttgaagatttcagagggatctatgactacacgctgggaaagtttggtgatgagcaggcggatcgctataccgactctctcggcacttttctggatacactctctcaaatgcccgagatagggcaagactatgatgcgattccagaggtaaagaagatcgcatttaggtttcacactgtttattacgttataagagtcgatgacattctcattgcgcgcattcttcatcagttgatggaacctcgccgtcactggtaatgtgagaatttcttgactcaggattgcgaaaatccccgcatcttgggaaactgcgcgtaaccctacatttcatccaggtaacttttcatggctatcatcccaaaaaactatgcgcggttagaaagcggctatcgcgaaaaagcattaaaaatctatccgtgggtctgcggtcgctgttcccgcgagtttgtttattccaacctgcgtgaacttaccgttcaccacattgatcacgaccataccaataacccggaagatggcagtaactgggaattgctttgtctctattgccacgatcatgagcattcgaaatataccgaagcggatcagtatggtacgaccgttatcgcaggggaagatgcgcagaaagatgtcggtgaagcgaagtacaacccattcgctgacctgaaagcgatgatgaacaagaagaagtgattaaaacgtaaaattgcctgatgcgctacgcttatcaggcctacgttatttcagcaatatattgaatttacgtgcttttgtgggccggacaaagcgtttacgccgcatccggcatgaacaaagcgtacgttgttaacaatctgaaatgccgggaataaatcccggcattttcataatcagaagttgtaacctactaccaggtaaccaccccagccggtagagcgaacgttgaagttgccgttgccgaagttcagttctgcatcgtcgttccactgaccaccgtcgtgccagtaacgagctacgacagagtagtgccagtgatcgtagttcagagccagaatatggctggaagcgatagagttattagtacgggtcttaataccgttgattgcgtnaccgctgtcatcccctaaatcggaaccccagtcgaagttggtgaagccgatgtagctcagctgaccgccccacagatcggtaatcggcacaaagtatttaattttgaaacggtaaccgtcccactcgttttcgttcgctgcgccatagttctgccactggtatttcgcatagacgttcatggacaggctcatcggcaggccagtgtcgatatcggtacccagacccatgtaccaggtgctctggcgaccatctttattacgacccatgtcgtaaatgtagttgttcgcgaagtaccactctttgaacggaccgaagctaaggtcagtattggtcagcttgtcgatggagaaacgtggttcgatttccataaacagaggagaaccgtggttccagataccttttgcatcggagttaccgccgaagaataccggcgcatccgcataaccatagaagtcgaaccagtcttttttagcgaatgcttcgtactcaaggtaggtatcgttgcggatctgcggtccgaaacgggtgtgatagcttccgacaacgttaacgctctggtgccaccagtcggaaagatactgcggtttgtcgttttcagctgcgttgacagtaaaagacgaagagagcgccagtaccgcaccggctgccagtaatgtttttttcatatgtatgccactgtttgaaaatcccttgcgggagtgaaaaaggcgcaaattgcgtttctaaatatttcgtatacagaggagcctattataaaaatcattgctcacaaaaatatgtttcgtttcacagttctatcatttacgtaatcgattgcgttcacgtttacacacattcgggcggggattgtactgactttcgcccttgttgcaaacttttactatcaatctgggttatgtaagcggagtaacaaaatgatggggaaggatgttgcgggacgcacaaaatcgccccgctataagtttactgcataacaggttgaatgtcgtggatacgtacaaagcctaactgatccacagaaatcccctttaactgtaacggaatatcaacatcgctgggggcgaggacgctggcaggggcattaatcaattgattctgtacattgatttcctgaaagttgtctattgttccctgaatttgcccatattcaacagttccgctgaatgcgggcaagggatcattcgactcaccctgaatacgtagtgtcagggtggtgccatctgtatcaggcgtaatattcaccagcgacatacgtaaagtaccgatctggctttccagtcttgccggtgttttcgctccaggcagaaggtaaaccccactgctggattttgcattcagcctgttttgctgagtgattttgactgtttcttgattgagttgcgtcatctcctggttcagcgtgctgacgctgtgtttcatctgtcgcacttcactttgctgcacacaggcgctaaggctgaataggcttcccagcaggatcagtcgaaaaacgttaatattcataggtcgtccctttctcgtcgcaattagcctaatggtagagggtaaaagcagcgaaagcatcgatcctttatctcaaaagcgttgcgcctttgttgtatcgtcagttcagggtaaaatagatttccgttaaccacctggtcaggacgccgtatgcattgcccattctgtttcgccgtggacactaaggtaattgactctcgtctcgtgggcgagggttcatccgtacgccgccgtcggcagtgtctggtgtgtaatgaacgtttcaccacctttgaagtggcggagctggttatgccgcgtgttgtaaaaagcaacgacgtgcgtgaaccgtttaatgaagaaaaattacgtagcggaatgctgcgggcgctggaaaaacgtccggtgagttccgatgacgtcgaaatggcaatcaatcatattaaatcgcagc

SEQ ID NO: 135 - DNA, 8022 bp, Escherichia coli
  Strain O55:H7
  modified_base (1066)..(1066): a, c, g or t
  modified_base (2425)..(2425): a, c, g or t
  modified_base (6115)..(6115): a, c, g or t
accggtgagcgcgaagtgccgagcaagatgattggcaatctggtgatggagcaattgaaaaagctcgataaagtcgcctatatccgttttgcctctgtctaccgcagtttcgaagatatcaaagaatttggcgaagagatcgcgcgcctggaggactaagccgtgcaggacgagtattacatggcgcgggcgctaaagctggcgcaacgaggacgttttaccacccaccccaacccgaatgtcgggtgcgtcattgtcaaagatggcgaaattgtcggtgaaggttaccaccaacgagcgggtgaaccacatgccgaagtacacgcgttgcgtatggcgggtgaaaaagccaaaggtgcgaccgcctatgtcacactcgaaccctgtagccatcatggtcgtacgccaccgtgctgtgacgcactcatcgccgctggcgtagcgcgcgtggtcgctgcgatgcaggacccgaacccgcaggtcgctgggcgtggactttaccgtctgcaacaggctggcattgacgtcagccacggcctgatgatgagtgaagccgagcaattgaataaaggctttctcaagcggatgcgcaccggctttccttatattcagttaaaacttggcgcatcgcttgatggccgcacggcgatggcgagcggcgaaagccagtggatcacttcgcctcaggcgcggcgcgacgtacaacgactgcgcgcacaaagtcatgccattttaaccagcagcgctacggtgctggcggatgatcctgccttaacggtgcgttggtctgaactggatgtacaaactcaggcgctctacccgcaacatcatctccgccagccggtacgtattgtgattgatagccaaaatcgcgtgacgccggaacatcacattgtgcagcagcccggcgaaacctggttcgcgcgtacgcaggaagattctcgtgagtggccggaaacggtgcgtaccttgctgattccagagcataaaggtcatctggatctggttgtactgatgatgcaactgggtaaacagcagattaacagcatctgggtggaagcggggncaacgctcgctggcgcattgctgcaggcggggttagtcgatgagctgattgtctatatcgcacctaaactattaggcagcgacgcccgtggattatgcacactgccagggcttgagaaattagctgacgccccccaatttaaattcaaagagatacgtcatgtaggcccggatgtttgcctgcatttagtgggtgcatgatctcccggctcgaaagggaagcagcgcacgaaatattatgctaaaatccgcccccctgcggggccatactcgaacccgaaggaagaaaatgaacattattgaagctaacgttgctaccccggacgctcgcgtcgccatcaccatcgcgcgtttcaacaactttatcaatgacagcctgctggaaggtgcaattgatgcactgaaacgtatcggtcaggtaaaagatgaaaacattaccgttgtttgggtgcctggtgcctatgagctgccgctggcggcgggtgcactggctaaaaccggtaaatacgacgcggtgattgcgctgggtacggttattcgtggtggcactgcccattttgaatatgtcgctggtggtgcaagcaacggcctggcgcatgttgcccaggacagcgaaattccggttgcttttggggttctgaccactgaaagcattgaacaagcgatcgaacgtgctggcaccaaagctggcaacaaaggtgcagaagctgcactgaccgcgcttgaaatgattaatgtattgaaagccatcaaggcctgaaattagtaaggggaaatccgtgaaacctgctgctcgtcgccgcgctcgtgagtgtgccgtccaggcgctctactcctggcagttgtcccagaacgacatcgctgatgttgaataccagttcctggctgaacaggatgtaaaagacgttgacgtcctgtacttccgtgagctgctggccggggtggcgactaataccgcatacctcgacggactgatgaagccatacctgtcccgcctgctggaagaactgggacaggtagaaaaagcagtactgcgcattgcgctgtacgaactgtctaaacgtagcgatgtgccatacaaagtggccattaacgaagcgatcgaactggcgaaatcgttcggcgcagaagacagccataagttcgtcaacggcgtactcgataaagcagcacctgtgattcgccctaacaaaaagtaatatccaggccggtagattcacggaagactgttccgcgatcgccggccttttcttttttacctgctgaggcataacgtatggcatgtggcgagttctccctgattgcccgttattttgaccgtgtaagaagttctcgtcttgatgtcgaactgggcatcggngacgattgcgctcttctcaatatccccgagaaacagaccctggcgatcagcactgatacgctggtggcgggcaaccatttcctccctgatatcgatcctgctgatctggcttataaagcactggcggtgaacctaagcgatctggcagcgatgggggccgatccggcctggctgacgctggcattaaccttaccggacgtagacgaagcgtggcttgagtccttcagcgacagtttgtttgatcttctcaattattacgatatgcaactcattggcggcgataccacgcgtgggccattatcaatgacgttgggtatccacggctttgttccgatgggacgagccttaacgcgctctggggcgaaaccgggtgactggatctatgtgaccggtacaccgggcgatagcgccgccgggctggcgattttgcaaaaccgtttgcaggttgccgatgctaaagatgcggactacttgatcaaacgtcatctccgtccatcgccgcgtattttacaggggcaggcactgcgcgatctggcaagttcagctatcgatctctctgacggtctgatttccgatctcgggcatatcgtgaaagccagcgactgcggcgcacgtattgacctggcattgctgccgttttctgatgcgctttctcgccatgttgtaccggaacaggcgctgcgctgggcgctctctggcggtgaagattacgagttgtgtttcacggtgccggaactgaaccgtggcgcgctggatgtggctctcggtcatctgggcgtaccgtttacctgtatcgggcaaatgaccgccgatatcgaagggctttgttttattcgtgacggcgaacctgtcacgttagactggaaaggatatgaccattttgccacgccataaagatgtcgcgaaaagtcgcctgaagatgagtaatccgtggcatctgcttgctgtcggattcggaagtggattaagcccaatcgttcctggcacgatgggatcgctggcggcgattccgttctggtatctgatgacctttttgccctggcagctctactcgctggtggtgatgttggggatctgtatcggcgtctatctttgtcatcaaacggcgaaagacatgggggtgcacgatcacggtagcatcgtatgggatgagtttattggcatgtggatcaccctgatggcgctgccgaccaatgactggcagtgggtcgccgccgggtttgtgattttccgtattctggatatgtggaagccgtggccgatccgctggtttgatcgcaatgtacatggcggcatggggatcatgatcgatgatattgtcgccggggtgatttccgcaggcatcctgtactttatcggtcatcactggccgctgggtattctttaaatgccattgaccgggaggtgtaggcgattccagaccacccggtttgatttataaatgaacagtgccccaattttggggcactctgttaaagtaaaacccgacatcgccgaatatactatgcggcgatatttcaaggtgtatctttgtcactcataattcaatgacactgaaatatcgtcagtcgacgaactcataataattgctcatattctctgactgttgacgaaaaatatcatcaaaattattctcaatggtttcggtcatagtgttgaataaatttttagaaagttcatctattttgtcttgaatctttgattttatttcatcttgaatttcacgggtaaccaaaagttggtccaattgatcatccattttgtattttgcaattaattgtgcagttaaaggtactttcttcaaataatcattttttgttagtttatactggtctttgaaatattgtttggcttctgcttgtatatatttaaaaaattcattatactttttcctgcttatttttccttgaagattcattgcgcgattgaatattttctttaaatgctgattgtagaaaataaaattatcgatatcttgttttattttaataactgttgatttttcttcaaagtttaatgactcagggtttttatctgattcaatatagtcaagaataatttttgctaatgggctaatgtctttttcttctgttgattctgcttctgtttttaatatcggattaaaaaggtcggtacggtaaagtttcgtgcctttcatcctgacgatgtcaggaagaatagtgtttgaaagattagcctcgctaaagtccacattttggcaatcactttctgataaatctgcccaattgaaagtggttttcacacaggagcagttagttagaatcatccctttcgtttcattcccatctgatttctgataagttatcctttgtattatttgatctgcttctggatattgcatctcaggttctttttctttaccatatatcatcgcattatcaagaattgcgccagtgcaattcatatttgtcaggtcgcatttcttaaatctacaattgttaaaattcgcatttgtacaattcgcatttgtaaacttgacgccataaaaataagtatgttcgaagttgacatttgagcagttacagtttcccatatctataccgaaatctatatcgggatctttattgggatctttaccggaaatattgctgtgtgctagatatagaccgctgaaatcgtaatatccattgtcatccttttctattgggagtgaataagtctttactacctcgttaacaatagagatagttccacgtatcatcagattttctccgtctttataaaaaataatgttatgtttgatggtactgttgtatggctctggcaatgaggatgcaattttattccagaaacaacaaagcgtggtctgtttttgtttgggcgagaggcgatcaaaattcagctttaaatatgagtctaaatctgacgttgcatctatattaaagttgggatctggagttaacgctgaattataatttagaactgacaatgtattgatgtatttatgaatcgatttaaatgccttttgtttatcactgtccagaaaaaaatcacgaattttgttccacagcctttcaataagattttgatttaaatcttgcttcattgagtttcttaaatctgcaaccggtacatcagtaaacaggatcggttgtttggtgatggttttcatcatgattgtaatcctcttacgttgactaaataagacagttttaggggatattacctggagaaactatcaaaaatcgctcaaagggatgaagacgatgaatagctgcaaactcattcacgaagaatttctcttgcagaggtggattatggttacagaaggtgatgggaggtacgttgtccccatcatcgcagacgatggggaattcagcagataaaatgggtgaaaagcgaaatttacttaaatcctacgaccggatgcggtttatacggtgtttccagttcagcaatctgttccggcttcaaagtgatatccaccgcgttcagcagctcatcaagctgttcttcccgcgaagttccgataatcggtgcggcaatgcccggtttactcaacaaccaggccagcgcaacttgtgctcgtgttgcaccgagttcttcactgacgcccgttaaccgctctgcgatctgcgcgtcattttcatcgctttctttatagagatttttccccacctcatcagacaccagtcgtgcggtagtttctccccacggacgcgtcagtcncccccgcgccagcggactccacggaatgaccgccacgccttcctgataacacagcggcagcatctcgcgctcttcttcgcgataaatcagattgtagtgatcctgcatactgacaaactgcgcccagccgtgctgtttttgtagttccagtgcctgagcaaactgcgaagcgtgcatggatgacgcgccgatataacgcgctttcccggcttttaccacgtcgttgagggcttccagcgtctcttcgatcggcgtgttgtaatcccagcgatgaatttgcaggatatcgacataatccatgccgagacgtcgcaggctgtcgtcgatagagcgcaaaatttgtgcacggaataatccttccggtaaatcaccaacgcgatggaacactttggtggcaacgaccacgtcttcacgacgggagaaatcccgcagtgcgcgaccgacgatctcttcgctgctgccatcggaatagctattggcggtatcaaagaaatttatgccgccttccagtgcgcgtttaatgatgggacggctgctctcttccggcagtgtccatgcgtgattaccacgatctggctcgccaaaggtcatacagccgaggcaaagtcgggaaacgcgaaggtcggtttttcctaaggggttgtattgcatgctgccactcctgccatgaataatttcttaagcatagcaggagtggagtaggggttatgccagccaggccttgattttggcttccataccggcggcatcgaggccgagttcggcgcgcatttcttcctgagttccttgcggaataaagaagtccggcaggccaatgttcagcacgggtactggtttacgatgggccatcagcacttcgttcactccgctgcctgcaccgcccataatggcgttttcttctacggtaaccagtgcttcatgactggcggccatttccagaattaacgtttcatcaagcggtttcacaaaacgcatatcgaccagcgtggcgttcagcgattcggcgactttcgccgcttctggcatcagcgtaccaaagttaaggatcgccagtttctcgccacgacgcttcacaatgcctttgccaattggtagtttttccagcggcgtcagttccacgccgaccgcgttgccacgcgggtagcgcaccgctgacgggccatcgttatagtgatagccggtatagagcatctggcgacattcgttttcatcgctcggggtcataatgaccatttccggtatgcagcgcaggtaagagagatcaaaagcgccctggtgggtttgaccgtcagcaccaacaatgcccgcgcggtcgatggcgaacaggaccgggagtttttgaattgccacgtcatgcagcacctgatcataggcgcgttgcaggaaggtggagtaaattgccacgatcggtttgtagccaccaatcgccagaccggcggcaaaggtcaccgcgtgttgctcggcaatcgctacatcaaaatagcgatccgggaatttacgtgaaaactcgaccatgccggaaccttcacgcatcgccggagtaatcgccatcagtttgttatctttcgctgccgtttcgcacaaccagtcgccaaagatttttgaatagcttggtaaaccaccgctacttttcggcaaacaaccgctggagggatcaaatttaggcacggcgtggaaggtgattgggtctttttctgccggttcataaccacgaccttttttggtcatgatatgcaggaactgcgggcctttcaggtcgcgcatgttcttcagcgtggtgataagccccagcacatcgtgaccgtcaaccgggccgatgtagttaaagcccagctcttcaaacaacgtgccaggcaccaccatgcctttaatatgttcttcggtacgtttgagcagctctttaattg

SEQ ID NO: 136 - DNA, 3347 bp, Escherichia coli
  Strain O55:H7
  modified_base (7)..(7): a, c, g or t
  modified_base (392)..(392): a, c, g or t
  modified_base (2076)..(2076): a, c, g or t
agaaaanttttttcccgccttcgcgcagtgaagagtaaagcttaccggaaagcagctgcgccagatggttgttaagcgcgccaacattttcggaaatcgacatttcattgtcgttgaggaccaccagcatatcaggacgaatatcgcccgcgtgattcatcgcttcaaacgccatgcctgcggtaatcgcgccgtcgccaatcacacagacggtgcggcgatttttgccttctttctcggcagcaaccgcaataccaattccggcactgatggaggttgatgaatgcccgacgcttaatacgtcatattcgctttcgccgcgccacgggaacgggtgtagaccgcctttctgacggatggtgccgattttgtcgcggcgtccggtcaaaatnttatgcggataagcctgatgccccacatcccaaatcaattggtcaaacggggtgttatagacatagtgcagcgccacggtcagttcgaccgtgcccagcccggaggcgaagtgcccgctggaacggctcacgctgtcgagtaaatagcggcgcagttcgtcgcagagtttcggtaaactctcttttggcaacagtcgtaactcctgggtggagtcgaccagtgccagggtcgggtatttggcaatatcaaaactcatcaggggcctattaatacttattgtttatttattacgctggatgatgtagtccgctagcgcttccagtgccgaagtatcgatcgactgttcagccagttgtttcagcgactggcgggcatcgtcgatcagatcctgggctttcttccgggcttgctcaagacccaggagtgcagggtaggtacttttgccaagctgctggtcggcaccctgacgttttcccaacgttgcagtatctcccaccacatccaggatgtcatcctgaacctggaaggcaaggccgatgctctctgcgtacttgtcgagtactggtagagcacgacgtcctttatctccggcgcttaatgcaccaaggcgaacggcggcgcgaattaatgcgcctgttttatgacgatgaatacgctcaagcgcgtccagaggtacgtgtttgccttccgcgtctaaatccaacgcctgaccaccacacattccggcaataccgctggcgctcgccagttcagaaatcatcgaaattctgtcgcgatccgacacttctggcatatcagcatcgcttaaaatcgagaacgccagcgtttgtaaagcgtcgccagcgagaatcgcgttcgcttcgccaaacttcacatggcaggtcggcaagccgcgacgcagatcgtcatcatccatcgccggtaaatcatcatgaattaatgagtaagcgtggatacactctacggcggcagcgggtgcgtccagcgtgtttgtgctaacgccgaacatatgaccggtggcataaaccaggaaaggtcgcaggcgcttaccacctaataatgcgccatactgcatggtttcgaccacgggagtgttctgaaagggcagtggggcgataaaacggctcagcgcctggttggcctgcttaacgcaggcttcgagttgctgcggaaagtccattactcattgtccggtgtaaaaggggttagagaggcgtcttcgttgtcagacagcagaatttgtacgcgctgttcggcttgttgtaatttggcctgcccctgacgtgccagctgcacgccgcgttcgaactcgttcagcgcctcttccagcggcaggtcgccactttccagacgggttacaatctgttccagctcgctcagcgccttttcaaagctggcgggcgcctcatttttcttcggcataatgaatgtctgactctcaatatttttcgccccgtcatggtaacggactcagggcaaatagcaaataacgcgcaatggtaaggtgatgtgcgcagcaaagcgatgttagtggtatacttccgcgcctggatgcagccgcaggtgtgggctgctgtatttttccctatacaagtcgcttaaggcttgccaacgaaccattgccgccatgaagtttatcattaaattgttcccggaaatcaccatcaaaagccaatctgtgcncttgcgctttataaaaatccttaccgggaacattcgtaacgttttaaagcactatgatgagacgctcgctgtcgtccgccactgggataacatcgaagttcgcgcgaaagatgaaaaccagcgtctgactattcgcgacgccctgacccgtattcctggtatccaccatattctcgaagtcgaagacgtgccgtttaccgacatgcacgatattttcgagaaagcgttggttcagtatcgcgatcagctggatggcaaaaccttctgcgtacgcgtgaagcgccgtggcaaacatgattttagctcgattgatgtggaacgttacgtcggcggcggtttaaatcagcatattgaatccgcgcgcgtgaagctgaccaatccggatgtgactgtccatctggaagtggaagacgatcgtctcctgctgattaaaggccgctacgaaggtattggcggtttcccgatcggcacccaggaagatgtgctgtcgctcatttccggtggtttcgactccggtgtttccagttatatgttgatgcgtcgcggctgccgcgtgcattactgcttctttaacctcggcggcgcagcgcatgaaattggcgtgcgtcaggtggcacattatctgtggaaccgctttggcagctcccaccgcgtgcgttttgtcgctattaatttcgagccggtagtcggggaaattctcgagaaaatcgacgacggtcagatgggcgttatcctcaaacgtatgatggtgcgtgccgcgtctaaagtggctgaacgttacggcgtacaggcgctggtcaccggcgaagcgctcggccaggtgtccagtcagacgctgaccaacctgcgcctgattgataacgtctctgatacgctgatcctgcgtccgctgatctcttacgacaaagagcacatcatcaacctggctcgccagattggcaccgaagactttgcccgtactatgccggaatactgcggtgtgatctccaaaagcccgacggtgaaagcggttaagtcgaagattgaagcggaagaagagaaattcgacttcagcattctcgataaagtggttgaagaagcgaataacgttgatatccgcgaaatcgcccagcagaccgagcaggaagtggtggaagtggaaaccgtcaatgacttcggcccgaacgacgtgattctcgatatccgttctgtcgatgaacaggaagataagccactgaaagtcgaagggattgatgtggtttcactgccgttctacaagttgagcaccaaat

SEQ ID NO: 137 - DNA, 52845 bp, Escherichia coli
  Strain O55:H7
  modified_base (7278)..(7278): a, c, g or t
  modified_base (8268)..(8268): a, c, g or t
  modified_base (10378)..(10378): a, c, g or t
  modified_base (14597)..(14597): a, c, g or t
  modified_base (16296)..(16299): a, c, g or t
  modified_base (17071)..(17071): a, c, g or t
  modified_base (21043)..(21045): a, c, g or t
  modified_base (21348)..(21351): a, c, g or t
  modified_base (23121)..(23121): a, c, g or t
  modified_base (33309)..(33312): a, c, g or t
  modified_base (36490)..(36491): a, c, g or t
  modified_base (47741)..(47741): a, c, g or t
  modified_base (49656)..(49656): a, c, g or t
  modified_base (51851)..(51851): a, c, g or t
atctcgaccagaacagaacctggctactgtggtgtgagcgcggggtaatgagccgcctgcaggcgctctatctacgcgaacagggctttaagaatgtgaaggtgtatcgtccgtaatttgtggtttttacgtcgcatctggtcagatgcgacgtttgccgcatccgacactactcgtaataattataaatccctgccgccatcaccagttgtgatgccacttcatgggctttctcgcgcccaaccagcaggtcgataattttcagaccaaagtcgatagctgtacccggcccctggctggtcagcaattttacccgtgcatcccagacgacgcgcttgtcctgccattgttcagcgggaattttgtctttcagcgtcgggaagccggtcatattgccaatcggaaagatatcgtgcggcaccagcacggtggctggcgcggcgcaaatagccgcgacgatacgcccggaacggtggaactgtttaacggtttcaaccagcagggtactatcgcgaaaacactccgcgcctttaatgccaccaggcagcacgatcacgtcatattcgccatcagccacttcgaccagcggcgcatccgccagcagcttcacgccgcgcgagcaggtaatcgccaggttgccatcgctggctacgctggcagtggtgactttgataccgccgcgaatcaagaggtcgatcgtggtgacggcttcagtctcttcactaccaggggcgaggcaaaccagtgccgatgcgctcatattcactctcctttctttttaccatttcaaacaggcgggtgttttccggtacggcaatcccatgcgcgcgggcgcggcgtaagagaaaaccattgatatagtcgatttcggtgtggcgcagcgcgcggatatcctgcaacatcgacgagatattttccgctgtggcatcaatcacctgcatcacgtaatcacgtaaatcttccgctgaagtatgatgcccttcgcgttcgatcactgccgcgacttcttcgcatatttgcataatttcttgcggatgatgacgtaattcaccgttcgggcaattccagatggcagtcagtggattaatcacacagttgactgccagcttgcgccacagctcggcgcgaatattgttatgccaggcaacgtcaggcaacacggtttgcaatatatccgccagataactgtaatcgccgtcctgttgccgtgctggaccaatatgcgtgataccgtttgccacatgaataatgacattgccgtcgcggcaggcggcatgggtggtggtgcccatcagtaatggctgctgaatgttttgcaattcttcgatggtgcccatgccgttgtgaattaacagtattggcgtagttacaggcagtgtggacgcgaggcttttgacggcatcggaaacctgccatgctttcagcgtcaccaggagcagatcgctggtggcaagaaaatcgggatcgttggcggtcagcgattcgttaaatatcgaaccatcagtctcaaccagattcacactacaataaggttgcggtacgcgcagccagccctgaacttcgtgaccctgtttacaaagtgctgtaagccataattgccctaaggcaccgcatcccaatacggtaattttcattgttcctcctcacccgcaaccactccgggtgttcaataaggctatcccttaattgtgcatgctgttgcgactatgcacaattaagggatacgtcctggtgcaggactgttggttatttaactttgcaggtattatgcttcgcatcaaaaatgaagggagaggaaaagatgccatctttcgatattgtctctgaagttgatcttcaggaagcacgtaacgcggtcgataacgcgagccgcgaagtggagtcccgttttgacttccgtaacgttgaagcctcatttgagctgaacgacgccagcaaaaccatcaaagtgttgagcgagtccgacttccaggtcaatcagttgctggatattctgcgtgccaagctgctgaagcgcggcattgaaggcagttcactggatgtaccggaaaatatcgttcatagcggtaaaacctggtttgtggaagcgaaactgaaacagggcattgagagcgccactcagaaaaaaatcgtcaagatgatcaaagacagcaaactgaaagtgcaggcgcaaattcagggcgatgagatccgtgtgacgggcaaatctcgtgatgatttacaggctgtcatggcgatggtgcgcggtggcgatctcggtcagccgttccagttcaaaaacttccgcgattaatcgcgacaacctgcgctttgttcatgtcagatgcggcatgaacgcctggttcggcctacaaagttttgtaaatcaggaacttagtaggcctgataagcgtagcgcagcaggcaatttcgcctcgcttttatgcctggcgaattgcctgttcaacatcaaagcgattcgtcactttgctgtcgattttcacataagctgaatgttcttcttctgcaatcaacacttctttgatgccttcagtttccagcaaacgcacttttaacgcctcgtttgcggcaatgttcgccgggatttcaatgcgcaaactgctgacatacggcggttctttcatggtactggcgactgccagccacactgcggccagcattgcgccagcgagaaataccccctgaccgtcaaacatgccgtcaatccagccgcccagcgaaccgccaatcgccacgccaagaaactggctggtggagtaaacacccatcgccgtacctttgtaacctgctggcgactctttactgataagtgagggcaggagggcttccatcaaattaaacgccacaaagaaaagctgcacgccgaccaccagttgccagaactgcgtttgcgcgttcctcaacacaatttccgcaaccacgatcaacccgacgcagaagacaaagacttgcttcattttgcgcttaacttcagcgtagataatgaaaggcacgaccgagccaaaggcgattagcattgtcgccagatagaccttccagtgttcagccgccgggaaccccgcatcagccagttgtccgggcagggcaacaaacgtcgacatcagcaaaatatgcagacacataatgccaaagttgagtttcagcagccgcggttccgccagcaccttactgaaactgcctttcaccattccggactcacgattaagtacgtgagtgctactgttgggcacaacccaaatggtcaacgcaatgccggtcgttgccagaatagcgatcatccagaacagcgcgtgcagcccaagtttgtgagtgatgatcgggccaagcaccatcgcaatggcaaaggtaatgccaaagctcacgccgataaacgccattgctttggtgcggttttgttcgcgcgtgagatcggaaagcagcgccataacggcagcggcaatcgcaccggagccttgtagcgcccgacccagaataattccccagatggagtcagagagcgcagcgataacgctaccggcggcaaacactgccagcccaccgacaattaatggtttgcgaccaatgcggtcggaaagcaggccaaacggaatctgaaaaacggcctgagtcagaccataaataccaatggcaataccgattaatgcttcgctggcaccttgcagagccatgccgtacgtggtcagaaccggcagaaccatgaacatgcccagcatgcgcaacgagaatacggtccctaaaccccaggtcgcgcgccgctcacctggcgtcattttataatcgttcattaccacctctgttttaaattcgcgactagtgtaaagcggcaaacgaatggggtaaacatgcggattttttagtaaatatttcgagagggatatgtttctaatgctaagaaaaaaggtgccgtagcacctttttaatagagaggttgtgttaccacacagcagccagcagcgtatgcgagtccggcaccataaaatcaacggacatcatcaccgagagggcagtgatggcgatgatagagaagccgaacagcttgcgcgcccagattctgtcatcagcaactttataaccgcgcagagccatacctaaccaccagacgctaaccgccgcggcgaccaccagatacttatatccagcgtaaccgccaagagagagcatcagcgtggcaacggcaaaggcgatgatatacagcgtgatgtgattcttcgccaccgaaatgccttttaccactggcaataccggaatgtttgccgcctggtaatccttaaagcggaaaatggcgatggcataggagtgaggcatctgccacaggctgaagatagccagcaggatcgctgcgccgctatcgaactcgccggttactgcacagtagccaatcaccggcggcgcagcgccggagagcgaaccaatcaatgtgccgtagactgagtggcgtttcatgtacaggctataaacgccgacataaaccacaaagcccatcacccccagccagcaggccagcggattcgcgccaaaccacagcagcataaagccagcaatacccagcaaggtggcgtacaccagcgagacagcaggagagatcaggcctttaaccagcacccgattcttcgtcctttccatctttctgtcgatatccctgtcgatgtagttgttaaacacacaacccgacgccacaaccagtgacaccccaaccagcgtgtagataaacaggggataatcaatgctgccctttgaggccagcaggaatcccccaatcaccgagatcaggttgccaaagatgatgcctggtttcgttacttgcaggtattgcttaaacatcataaccgccgctcttagtgcatcatcatgttgtagttgaggttccacataatccagatggagcctacaaccaggatagcgatgattagcacggtgaagacaaacgccgtcatgttccagccttcatctgatttggtattcatgtgcaggaagcacaccagatgcaccagaacctgtaccactgccattgccaggattgttcccagaattacggccggagaggcagcccctgtcatcaccatccagaacggaatcaccgtcagaatgatcgacaggataaagcctgtcatgtaggtttttacgctgccatgggacgcgccgctgtgatcggtagaatgactcattacatcgcccccatcagataaacaacagtgaacacacagatccaaaccacatccaggaagtgccagaacaggctcaggcacatgatgcgggtacggttagtgctggtcaggccgcgacgagcgatttgtaccatcagcaccgccatccagataagaccggaagtgacgtgcagaccgtgcgtgccgaccagcgcaaagaacgctgacaggaagccgctgcgatccggacccatgccgttaacaatcaggtgatggaattcgtagatttccatcccgataaatccggcgccaaacaaccaggtcaacgccagccaggagataacctggcttttgttgtttttgtacatggcgatagccgccatgccgtaggtgatggagctgaacaacagcaagaaagtttcaaccagaacgaacggcagttcgaaaatgtccttacctgtcgggccgcctgcggtgccgttcaccagaacggcataggtagcaaacaagatagagaacagaatgcagtcgctcatcaggtagatccaaaatccgaagattttggttccgcctgcatcgtggtgcccgtgttcgtgcgcgtggacagtcgcgtgcgtcaaagtatcagttgccatttttcagccctgccttagtaatctcatcgaaatgctggttttccagtttttcgatttctgccaccggcacgtagtaatccacgtcctcgtcgaagcttttcacgatccaggtgatgatcatgcctgcgaagccaacaatcgccagccaccagatatgccagatcatggcgaaaccgaagatggtggagaaagccgcaatgacgatacctgcaccgctgtttttcggcatatgaatttcttcatagtggtcaggctttttatacgcttcgcctttctctttcatttcccagaatgcatcacgctcgtgaacgtgcggcacaacggcaaagttatagaacggaggcggggaagaggttgcccactccagcgtacggccaccccacgggtcgccagtcaggtcacggttctggtcgcggtcacgaatagaaacgtacatctgaataacgaggcagagaatacctagcgcaatcagtactgcaccgctggctgcaatcatcagcatggtgtggaactgcgggtcaatctgctggctcaaacgacgggtcatgcccatgaagcccagcgcgtacagtggcataaaggcaacgaagaagccgatgatccagaaccaaaacgcgcgtttaccccaggtttcgttcagtttgaaaccgaacgctttaggccaccagtaggtcatccctgcgaagcagccgaagaccacgccgccgatgatcacgttatggaagtgcgcaatcaggaacaggctgttatgtagaacgaagtccgcgcccggtactgccagcagcacgccagtcataccgcccaccgagaaggtgacgataaaaccgatagtccacagcatcgcagaatggaacacgatgcggccctgatacatggtgaacagccagttgaagatcttcaccccggtcgggatggcgataatcattgtggtgataccaaagaaggcgtttacgttcgcgcccgcacccatcgtaaagaagtggtgcagccaaacgatgaacgacagcacggtgatacagacggttgcccataccagcgaggtataaccaaacagacgtttacgcgagaaggttgccgcaatttcggagaacacaccgaaaacaggcaggatcaggatgtaaacttccgggtgtccccaggcccaaatcaggttgatgtacatcatcatgttgccacccatatcgttggtaaagaaatgggtgcccagatagcgatccagggtcaacaacgcgacggtaaccgtcagaattgggaaggaagcaataatcagtacgttcgcgcacagtgatgcccaggtaaatactggcatcttgaacatggtcatgcccggtgcgcgcatcttcagaatggtaacgaagaagttgataccggtaagcgtcgtacctataccggatagctggagactccatatccagtaatcgacaccgactcccggactgtactctattcccgatagcggtggataggccagccagccggtctgcgcaaattcgcccacnccgagagaaacgttaaccagaatcacaccaacaacggtaaaccagaagcttaagttgttgaggaacgggaacgcaacgtcacgcgcgccgatctgcagcggaaccaccaggttcatcagaccgataacgaaaggcatcgccacgaagaagatcataatcacgccgtgcgcggtgaagatctgatcgtagtggtgaggtggcaggaagcccgcttcgcccgccgaggcaagagcctgctggctacgcatcataatggcgtcagcaaaaccacgcagcaacatcacaatcgccacgatgatatacatgataccgaggcgtttatggtcgacggaggtcagccactctttccacaggtaggtccacttaccgaagtaagtgatcaggccaacgagcgccagacctcccaaaataatgccagcgatcgtaaccatgacgataggttcatggaacgggactgcatcaagtgataattttccgaacatctttattcttcctcaacccctttaatgggcggattccgcgtggctcatgtccatgccttccataccttcgtgtgcgctgtgctcaccttctggctgggtcatgtccatgctcttaccgtgagccataaacttgttaattacatcggcaaacaagtctggtttcacgttggagaaatattccacctggttgtattcgctaggcgcggccagtttttcgaacgctgccatgtcagacatggagttcggcgactgtttcgcttttgcgacccactggtcgaatgcggcgcgatccggtgttgcaatagctttgaacttcatgcctgagaagcccgggccgctgtagctggcggagataccgtcataagtgccgggttcgttggcgatcagatgcaggcgagtctgcataccggccatggcataaatctggctacccagacgcggaatgaagaaggagttcatcacggagttggaggtcactttgaagtacaccggagtgttcgccgggaangcgatttcattcacggtagcaaagccctgttccgggtagatgaagaaccatttccagtccatggaaaccacttcgatggtaatgggcttctcgtcgtgtgccagcggcttgctaggctcaagagcgtgagtggttttccaggtcagtaccgcaaggaagatgatgattaagataggtaccgtccagaccacagcttccactttattggagtgtgaccagttcgggctgtacttagcatctttattgctcgcacggtacttccaggcgaaaccaacagccatcaagattgcgggaataacgacaatcaacatcaggccaaatgccgtcagtatcagtgaacgttgctccagaccaatctgtcctttgggatctaacagcgcagaattacagccactgagcaatacagtgcctgcaaataatgacaaccatcccaaacttttattgtatttcctgagtctcatttaacgacctcaattccacgggatctggtggcgtttaaagtgtgtgggcattttacgggaaggttacattactgtaaacatgattaaattcctgttacttggatttggctgtcaggtcacatatgttgcaaaacatatcaggttgattttaagaagctgttgcaaaagggcgttataacaaaaggggagtgcagaagaagtctggacgggcaattggtataaccaatgcgaaataaaacaattatttaacaaataattatcattggagtgacaacttggtggtgagaaaataaagactcattagctgaatcgtgtaagaaaaatagaatttataaatggcgccaataatttccaaacgctaagccgcacaaaagaacaaatattaataagcgatgctgatgtttatttagccgtaataattacggcgagtgattactacagctaaataatatttacagattacgtcagatgcgtttttcgtagcgccagataatccagcaaaccaccaagcacgacgccagaaagggcgactaaaaccccgacttccagcagagcaggcaggaaagagaagtgcgtcaaatccagcgcgtccatcgtcaatagcagtaaccacacggccaacaggctgacgcccgccgccagtgtccacatggcaaaggcataacctgccggatatgcggtacgggagataaagttgtcatttactcgtgtatattcaagcgtctggcggcaaaccagcagcaaaataagccctggtacggcagcggcgacggagaatagatagaatgtcgaccagccgtgtgcttcaacaaaccaacccgccacggggccgacataaactcgccctacagcagaaagcgctgagagcagggcaaattgagtagcggaaaatgacttattacatagcgtcattaacagcgcgacaaaggctgatgtgcccatcccgccacagaggttttcgaaaaagacggctgcgcccatgctgtagagatgcttatcagtaatcgacagcagccagtaaccagcgttagacgcaccttgtaaaatgccgaaaatcagcagtgcccggaacagtgacaggcgctgcatcaaaatcccaccgtacaatgcgccaacaatggtcgctagtaagccaagcgttttgtttaccacgcctacttcacccgcatcaaacccgacgccgcgaatcaaaaacgtggttgtcaggctcatggcgaatgcgtcgcccagcttatacagcacgataagaagcaaaataagccaggcattattgcgaccaaagaaatctcgcagaggtgcaacaaccgcttgttccagcgttttgggcacaggaatggtgtcggttggttctggtgcaagcaacgtcgcgataatacaggggatcaacagcgccgccatcaaccagtacatgccctgccagcccagccatttatctgccagccacagggctaggccgccggaaaccagcatccctaaacggtaacccagaacgctgattgccgcgcccgcaccacgttcttctgccgggagcacatcggttttccacgcatcgaagacaatatcctgggaggcagagcaaaaagcgatcaccaccgccagcgccgccatccagcggagttgggtgcctggttcgagaaaacccatcgccncaatggcgactaataacaggatttgcgtggcgagcagccaaccgcgccgccgcccaaaaaatgggggcgtgtagcggtccatcagcggtgaccagaggaatttaaaaacgtaagcctggcctaccagagagaagaaaccaatggttttgagatcgatattctcgaccgtcatccaggcctgtaaggtgccggatgtcagggcgagcggtagcccggaagcaaaacccaggatcagcaatatggctgaacgcggctgttgaaaaatacgtaaatattgactggacatgggcgtctacaggcccggcttgcaccgggccagagggcagaaattaacgcgcgttctgcttgatgaattcgtgaatgctggtgtcctgagacatatcagcgatggtatcggtcagcacactgttaaccgcatcggcgatatttttgttggaggcctggaacgcaccttcaacgttgtagctggcacgatagtttttggtcattttgttgccattctgcgcggtagcgatgatggcgatatccgctttggtagcgatgttgtagcgcacgttgccctgggacacgtcagcatacagctggctaacgatgatttgcagattaaccgggccattcggaccaaccatgtaaccacgcgcggtcatctgtttttccagcacttcttgcagcaggaaacgcagatcgcgggaggcggtcagggtaacgatttgattatcgcgggtgacttttgccagcgcctgatcggtacgctgatcggcaccattaatgcttacggtgacgcccatcaggcttggatcctgctgtggcagtgtaatcgtcggggaaacttcaatagttgttggcggtcttgcgcatcctgcaagcataaacagagcaactaacgggaagaggatttttttgaacatgttcgggctctcagagactcttaagcgtgtttggtaaaaattcccgccatcataacattgccaacggcgaggggaagtaggtaaggcatgtaaattcatcatgttgacgaaataatcgcccctggtaaaagaaacgctgatgcgaggcctgtgtttcaatctttaaatcagtaaacttcatacgcttgacggaaaaaccaggacgaaacctaaatatttgttgttaagctgcaatggaaacggtaaaagcggctagtatttaaagggatggatgacatctcagcgttgtcggaggagatatttcatgatgatacgtgagcggatagaagaaaaattaagggcggcgttccaacccgtattcctcgaagtagtggatgaaagctatcgtcacaatgtcccagccggctctgaaagccattttaaagttgtgctggtcagcgatcgttttacgggtgaacgttttctgaatcgtcatcgaatgatttacagtactttagcggaggaactctctactaccgttcatgcgctggctctgcatacttacactattaaggagtgggaagggttgcaggacaccgtctttgcctctcctccctgtcgtggagcaggaagcatcgcgtaaaaacgcatttgcaactgtcggcgcttttccagtatgttgctaaagattttatgaaaaacggcctgcgggccgttttgttttgtctggattttgcgctttttgcccagcattcagacgaaaattgcccgggaattgtgaaaaaatacgcgacagcgcgcaataaccgttctcgactcataaaagtgatgccgctataatgccgcgtcctatttgaatgctttcgggatgattctggtaacagggaatgtgattgattataagaacatcccggttccgcgaagccaacaacctgtgcttgcggggtaagagttgaccgagcactgtgattttttgaggtaacaagatgcaagtttcagttgaaaccactcaaggccttggccgccgtgtaacgattactatcgctgctgacagcatcgagaccgctgttaaaagcgagctggtcaacgttgcgaaaaaagtacgtattgacggcttccgcaaaggcaaagtgccaatgaatatcgttgctcagcgttatggcgcgtctgtacgccaggacgttctgggtgacctgatgagccgtaacttcattgacgccatcattaaagaaaaaatcaatccggctggcgcaccgacttatgttccgggcgaatacaagctgggtgaagacttcacctactctgtagagtttgaagtttatccggaagttgaactgcagggtctggaagcgatcgaagttgaaaaaccgatcgttgaagtgaccgacgctgacgttgacggcatgctggatactctgcgtaaacagcaggcgacctggaaagaaaaagacggcgctgttgaagcagaagaccgcgtaaccatcgacttcaccggttctgtagacggcgaagagttcgaaggcggtaaagcgtctgatttcgtactggcgatgggccagggtcgtatgatcccgggctttgaagacggtatcaaaggccacaaagctggcgaagagttcaccatcgacgtgaccttcccggaagaataccacgcagaaaacctgaaaggtaaagcagcgaaattcgctatcaacctgaagaaagttgaagagcgtgaactgccggaactgactgcagaattcatcaaacgtttcggcgttgaagatggttccgtagaaggtctgcgcgctgaagtgcgtaaaaacatggagcgcgagctgaagagcgccatccgtaaccgcgttaagtctcaggcgatcgaaggtctggtaaaagctaacgacatcgatgtaccggctgcgcttattgacagcgaaatcgacgttctgcgtcgccaggctgcacagcgtttcggtggcaacgaaaaacaagctctggaactgccgcgcgaactgttcgaagaacaggctaaacgccgcgtagttgttggcctgctgctgggcgaagttatccgcaccaacgagctgaaagctgacgaagagcgcgtgaaaggcctgatcgaagagatggcttctgcgtacgaagatccgaaagaagttatcgagttctacagcaaaaacaaagaactgatggacaacatgcgcaatgttgctctggaagaacaggctgttgaagctgtactggcgaaagcgaaagtgactgaaaaagaaaccactttcaacgagctgatgaaccagcaggcgtaatttacgcagcataacgcgctaaattcgcacaaaggcccgtcaccgccaggtggtgggctttttttgtcatgaattttgcatggaaccgtgcgaaaagcctctttcggtgttagcgtaacaacaaaagattgttatgcttgaaatatggtgatgccgtacccataacacagggactagctgataatccgtccataaggttacaatcggtacagcaggttttttcaattttatccaggagacggaaatgtcatacagcggcgaacgagataactttgcaccccatatggcgctggtgccgatggtcattgaacagacctcacgtggtgagcgctcttttgatatctattctcgtctacttaaggaacgcgtcatttttctgactggccaggttgaagaccatatggctaacctgattgtggcgcagatgctgttcctggaagcagaaaacccagaaaaagatatctatctgtacattaactccccaggcggggtgatcactgccgggatgtctatctatgacaccatgcagtttatcaagcctgatgtcagcaccatctgtatgggccaggcggcctcgatgggcgctttcttgctgaccgcaggggcaaaaggtaaacgtttttgcctgccgaattcgcgcgtgatgattcaccaaccgttgggcggctaccagggccaggcgaccgatatcgaaattcatgcccgtgaaattctgaaagttaaagggcgtatgaatgaacttatggcgcttcatacgggtcaatcattagaacagattgaacgtgataccgagcgcgatcgcttcctttccgcccctgaagcggtggaatacggtctggtcgattcgattctgacccatcgtaattgatgccagaggcgcaactgtgccgctatacttatccagggcggcacaacgctgtaagcggcttgcgcctgagaatggcatttgcgtcgtcgtgtgcggcacaaagaacaaagaagaggttttgacccatgacagataaacgcaaagatggctcaggcaaattgctgtattgctctttttgnggcaaaagccagcatgaagtgcgcaagctgattgccggtccatccgtgtatatctgcgacgaatgtgttgatttatgtaacgacatcattcgcgaagagattaaagaagttgcaccgcatcgtgaacgcagtgcgctaccgacgccgcatgaaattcgtaaccacctggacgattacgttatcggccaggaacaggcgaaaaaagtgctggcggtcgcggtatacaaccactacaaacgtctgcgcaacggcgataccagcaatggcgtcgagttgggcaaaagtaacattctgctgatcggtccgaccggttccggtaaaacgctgctggctgaaacgctggcgcgcctgctggacgtcccgttcaccatggccgacgcaaccacgctgaccgaagccggttatgtgggcgaagacgttgaaaacatcattcagaagctgttgcaaaagtgcgattacgacgtacagaaagcgcagcgcgggattgtctacatcgatgaaatcgacaagatttctcgtaagtcagacaacccgtctattacccgtgacgtttccggtgaaggcgtacagcaggcactgttgaaactgatcgaaggtacggtagctgctgttccaccgcaaggtggacgtaaacatccgcagcaggaattcttgcaggttgatacctctaagatcctgtttatttgtggcggtgcgtttgccggtctggataaagtgatttcccatcgtgtagaaaccggctccggcattggttttggcgcgacggtaaaagcgaagtccgacaaagcaagcgaaggcgagctgctggcgcaggttgaaccggaagatctgatcaagtttggtcttatccctgagtttattggtcgtctgccggttgtcgcaacgttgaatgaactgagcgaagaagctctgattcagatcctcaaagagccgaaaaacgccctgaccaagcagtatcaggcgctgtttaatctggaaggcgtggatctggaattccgtgacgaggcgctggatgctatcgctaagaaagcgatggcgcgtaaaaccggtgcccgtggcctgcgttccatcgtagaagccgcactgctcgataccatgtacgatctgccgtccatggaagatgtcgaaaaagtggttatcgacgagtcggtaattgatggtcaaagcaaaccgttgctgatttatggcaagccggaagcgcaacaggcatctggtgaataattaaccattcccatacaattagttaaccaaaaaggggggattttatctcccctttaatttttcctctattctcggcgttgaatgtgggggaaacatccccatatactgacgtacatgttaatagatggcgtgaagcacagtcgtgtcatctgattacctggcggaaattaaactaagagagagctctatgaatcctgagcgttctgaacgcattgaaatccccgtattgccgctgcgcgatgtggtggtttatccgcacatggtcatccccttatttgtcgggcgggaaaaatctatccgttgtctggaagcggcgatggaccatgataaaaaaattatgctggtcgcgcagaaagaagcttcaacggatgagccgggtgtaaacgatcttttcaccgtcgggaccgtggcctctatattgcagatgctgaaactgcctgacggcaccgtcaaagtgctggtcgaggggttacagcgnnnncgtatttctgcgctctctgacaatggcgaacacttttctgcgaaggcggagtatctggagtcgccgaccattgatgagcgagaacaggaagtgctggtgcgtactgcaatcagccagttcgaaggctacatcaagctgaacaaaaaaatcccaccagaagtgctgacgtcgttgaatagcatcgacgatccggcgcgtctggcggataccattgctgcacatatgccgctgaaactggctgacaaacagtccgttctggagatgtccgacgttaacgaacgtctggaatatctgatggcaatgatggaatcggaaatcgatctgctgcaggttgagaaacgcattcgcaaccgcgttaaaaagcagatggagaaatcccagcgtgagtactatctgaacgagcaaatgaaagctattcagaaagaactcggtgaaatggacgacgcgccggacgaaaacgaagccctgaagcgcaaaatcgacgcggcgaagatgccgaaagaggcaaaagagaaagcggaagcagagttgcagaagctgaaaatgatgtctccgatgtcggcagaagcgaccgtagtgcgtggttatatcgactggatggtacaggtaccgtggaatgcgcgcagcaaggtcaaaaaagacctgcgtcaggcgcaggaaatccttgataccgaccattatggtctggagcgcgtgaaagatcgcatccttgagtatcttgcggttcaaagccgtgtcaacaaaatcaagggaccgatcctttgcctggtanggccgccgggggtaggtaaaacctccctgggtcagtccattgccaaagccaccgggcgtaaatatgtccgtatggcgctgggcggcgtgcgtgatgaagcggaaatccgtggtcaccgccgtacttacatcggttctatgccgggtaaattgatccagaaaatggcgaaagtgggcgttaaaaacccgctgttcctgctcgatgagatcgacaaaatgtcttctgacatgcgtggcgatccggcttccgcactgcttgaagtgctggatccagagcagaacgtggccttcagcgatcactacctggaagtggattacgatctcagcgacgtgatgtttgtcgcgacgtcgaactccatgaacattccggcaccactgctggatcgtatggaagtgattcgcctctccggttataccgaagatgaaaaactgaacatcgccaaacgtcacctgctgccgaagcagattgaacgtaatgcactgaaaaaaggtgagctgaccgtcgacgatagcgccattatcggcattattcgttactacacccgtgaggcgggcgtgcgtggtctggagcgtgaaatctccaagctgtgccgtaaagcggttaagcagttactgctcgataagtcattaaaacatatcgaaattaacggcgacaacctgcatgactaccttggtgttcagcgtttcgactatggtcgcgctgataacgaaaaccgtgtcggtcaggtaaccggtctggcgtggacggaagtgggcggtgacttgctgaccattgaaaccgcatgtgttccgggtaaaggcaaactgacctataccggttcgctcggcgaagtgatgcaggagtctattcaggcggcgttaacggtggttcgcgcgcgtgcggaaaaactggggatcaaccctgatttttacgaaaaacgtgacatccacgtccacgtaccggaaggtgcgacgccgaaagatggtccgagtgccggtattgctatgtgcaccgcgctggtttcttgcctgaccggtaacccggttcgtgccgatgtggcaatgaccggtgagatcactctgcgtggtcaggtactgccgatcggtggtttgaaagaaaaactactggcagcgcatcgcggcgggattaaaacagtgttaattccgttcgaaaataaacgcgatctggaagagattcctgacaacgtaattgccgatctggacattcatcctgtgaagcgcattgaggaagttctgactctggcgctgcaaaatgaaccgtctggcatgcaggttgtgactgcaaaatagtgacctcgcgcaaaatgcactaataaaaacagggctggcaggctaattcgggcttgccagcctttttttgtctcgctaagttagatggcggatcgggcttgcccttattaaggggtgttgtaaggggatggctggcctgatataactgctgcgcgttcgtaccttgaaggattcaagtgcgatataaattataaagaggaagagaagagtgaataaatctcaattgatcgacaagattgctgcaggggctgatatctctaaagctgcggctggccgtgcgttagatgctattattgcttccgtaactgaatctctgaaagaaggggatgatgtagcactggtaggttttggtacttttgccgttaaagagcgtgctgcccgtactggccgcaacccgcagaccggtaaagagatcaccatcgctgccgctaaagtaccgagcttccgtgcaggtaaagcactgaaagacgcggtaaactaagcgttgtccccagtggggatgtgacgaagttcaagggcgcatctactgatgtgccttttttatttgtattcggtgactttctgcgtcttgtgggctgacaattgcccccgtttcttgtcacaataggcctttgcgcgcatcgatacgttgcgtgaggtacacagtcatctacagcggagtgttgttacaccatgatggacagcttacgcacggctgcaaacagtctcgtgctcaagattattttcggtatcattatcgtgtcgttcatattgaccggcgtgagtggttacctgattggcggaggcaataactacgccgcaaaagtgaatgaccaggaaatcagccgtgggcaattcgagaatgccttcaacagcgagcgtaatcgcatgcagcaacagctgggcgatcaatactccgagctggcagcgaacgaaggctatatgaaaaccctgcgtcaacaggtgctgaatcgtctgatcgacgaggcgctgctggatcagtacgcacgtgagctgaaactgggtatcagcgatgagcaggttaaacaggcgattttcgcgaccccagccttccaggttgatggcaaatttgataacagccgctataacggtatcctcaaccagatggggatgaccgccgatcagtacgcccaggcgctgcgtaaccagctcactacccaacagctgattaacggcgttgctggtaccgattttatgctgaaaggtgaaaccgacgagctggcggcactggtcgctcaacaacgcgtggtgcgtgaagcgactatcgatgttaacgcgctggcggcgaagcagcctgtgaccgaacaggaaattgccagctactacgaacaaaacaaaaacaatttcatgacgccggaacaattccgcgtgagttacatcaagctggatgccgcaacgatgcagcaaccggttagcgatgcggatctccagagctactacgatcagcatcaggatcaattcacccagccgcagcgtacccgttacagcatcatccagaccaaaactgaagatgaagcgaaagcggtacttgatgagctgaataaaggcggtgattttgctgcattagccaaagaaaaatctgccgatattatctctgctcgtaacggcggcgatatgggttggttagaagatgccactatcccggatgaactgaaaaatgctggtctgaaagaaaaaggccaactgtctggtgtcatcaaatcttcggtcggtttcctgattgtacgtctggacgacattcagccagcgaaagtgaaatcgttagacgaagtacgtgacgatgtcgcggcgaaagtgaaacacgaaaaagccctcgatgcgtactacgcgctgcagcagaaagtgagcgatgcggcaagcaacgacaccgagtctctggccggtgcagagcaagctgccggcgttaaagccactcagacgggttggttcagcaaagagaacctgccggaagagttgaacttcaagccggttgctgacgctatctttaacggcggtctggtaggtgaaaacggcgcgccgggcatcaactctgacatcatcaccgtagacggcgacctcgcattcgtgctgcgcatcagcgagcacaaaccggaagcggtgaaaccgttggcagatgttcaggaacaagttaaggcactggttcagcacaacaaagctgaacaacaggcgaaagtggatgctgagaaactgctggttgatttgaaagccggcaaaggtgcggaagctatgcaggctgccggtctgaaatttggcgagccgaaaaccttaagccgttccggtcgtgacccgattagccaggcggcgtttgcactgccactgccagcgaaagacaaaccgagctacggtatggcgaccgatatgcaaggtaatgtggttctgctggcgctggatgaagtgaaacaaggttcaatgccggaagatcagaaaaaagcgatggtgcagggtatcacccagaacaacgcacaaatcgtctttgaagctctgatgagtaacctgcgtaaagaggcgaaaatcaaaattggcgatgcgttggaacagcaataatcctgaagccgcctcgcaaaaaaatgctttgcagctgtaacaagaaaaggtcgctttcgcggccttttccatttctgaacattgccatttgtttactgttttcactgccgttaaggtgattccactgttaacaaacaannnagaaaacagtatgaaacacggaattaaagcactgctcattaccctgtccctggcctgtgccggaatgtctcatagcgcgctggcggcagcttctgtggcgaaaccgacggcggtagaaaccaaagcggaagctcctgcagcacaaaataaagcagcagtaccggcgaaagccagtgacgaagaaggctcccgggtcagcattaataatgccagcgcggaagagctagcccgcgcgatgaatggcgttggcctgaagaaagcgcaagcgattgtcagttatcgcgaagagtacggtccgtttannnnggtggaggatctaaagcaggtgccggggatgggcaattcgctggtggaacgtaatctggcggtattaaccctgtaattaatttgcatagtggcaattttttgccagactgaagaggtcataccagttatgacctctgtacttataacagtttttataaaaacaacgtaaggttattgcgctatgcaaacacaaatcaaagttcgtggatatcatctcgacgtttaccagcacgtaaacaacgcccgctaccttgaatttctcgaagaagcccgctgggatgggttggaaaatagcgacagttttcactggatgacggcccataacatcgctttcgtggtggtgaatatcaatattaactatcgtcgtccggcggtattaagcgacttgttaaccattacgagccagttacagcaattaaacggtaaaagcggcatcttaagccaggtcattacactggagccggaagggcaggtggtagcggatgcgcttattacgtttgtttgtattgatcttaaaacgcagaaagcattagctctggaaggggaattgcgcgaaaagctggagcagatggttaagtaaacgttttgtggtgccggatgctcaagccgcatccggcgacacccggaataattacttcaacccggttttctgcttcatcgctgccatcaccgtcggtttatcggccagataatgattcaaaccgttggcgcgtaaattacatgccgcacaatgaccgcaaccgtcgcctttaatgccgttatagcaggtcaacgtttcgttacggactaaatccagtttgccgtaataatctgccagcgcccaggtttccgctttatcaatccacatcagcggcgtttcaaaacgaatatctttcgccatgcccaaactgacggcatggtttagtactttcacaaactcatcgcggcaatccgggtagccggagaaatccgtttcgcagacgccggtaattacggcttctgcttttacctgatacgcatatattgccgccagcgtcaggaacaaaatattacgccctgggacaaacgtattcgggatgccatcggcttcaggttcataatcaggcaccggaatgctgtcacgcgtcaggctgctgaccgccagctcgttgagcagcgttacatcaagaaccttatgcgcgcgtgcccccagtttcagcgccagttcgcgtgccacgtcgatttctgcgcgatggcgctgaccgtaatcgaacgtcacgcaatggacttcatcatattgttgtaatgcctgcaccagacaggtggtggaatcctggcctccactgaacacaacgacagcacgtttcatagataatcctgcttgaacaataaaagcgttatggtaacgcctgcgattaacccggaccagctattcattgcgacggcgcgggaagccaggcttcggtaaattcaaaccagccgcgcggtgtcagtcgcacaccgttcacgccgggaggggcactaatgcgatagtgatagttgaacagcggcgtcagcgtcgcatctgtcattaactggctaaaaaccgctttcagggcattaaatcggttttcctcatcaggcattacttgcaccgcgtccagtgtcgattgtagatgtgcgtatgctggagcgtcgaaaacatgtggccacagcggatcgcagcgcagccattgctccagagtatattccggtgcttcgccaattaatctgtcgcccatcatgaggtctgcgtgtgccagtagggtcgtgtcgtcccagttttttgcgttntgaaaaataattgtgagttcacagccttccgctgccagtgtcgcctgtaggcgttctgccatggtatgaagttctatcgggaggtgataaaccagcgtcaaggttttcggtagtttgacttcatccggtacttgccaatgcggaatagtccagcctggcagtaatgcatgactggcggtgatcaggttttctccgacttctaacgtttgtaataaaccggattgatgaataatggagatcacttttcgcgcctgccagagggagagtcggggacttttgcgcaacgttaaatagcaaaaacctaaactgatgccactactgacctggctgacccgttgcagctcctccggtttgccgatggtgatttgcacgggatgccgacaactggttcccaaatctttttcgaaaagcggcggagttatccagtactcaaccgctttaagcagcggatgacgtaaatggtaataatcatggctttccaggcgcaccagttcagctgtgaattgtgttaagcgaaaaggacccgtgccaatcagtgggaattgcggatgcgccagatggctgcaatagctcgccagccggtgcgcaagccagtaatcggggcgatgtaaaaagaaggtcagacactgcggatgggtgacctcaatacgcttcacgctaataaataattgatccagtgctggcagttgtaacagcatcaataatcgctggtgtaagtgtgaggcttttactgcatcgccgttatgccagtgtagggttgaacgaagataaaagtcccagcgtaacccgtcagcagaggtttcccagtgatgcgctaaatcgccaatcgggcgctgggtattattatcgaagcgggtcaggccggaaaatatctgtccggcgagatgctgctcggcacggccgggcaaaaagcccggttgtagcggttcgagcgggcgatagtagggaatacgcaacgtgggtgtatcgttttgccattgtccgcccataaacggctgtaacagagtgcgcagctcacctggggccagttgcgccagctccagcacatcttgctgctttccggtttccagtgccttttccatcatcgcattgcgtagcgattctggcgtgaccagaaagcgtaattgtccgcgctttccgcgtcctgactgcgcctgccactccagccatcccgcttcctgtgcctgacgcaacagcgtacgaacatggcgttcgctgcaaaaacagcgttcggccagttcgctgacggtgacggtttgcggctttccggcggaaggttgccacagacgttgatactggttaaggcggttgagcagtcgcataaaaacccggaacaatattatttaactattcactattacttccgtatatatcaggtgatactcaatcaccattaaccgtgtcacagagtggagaaagaaatggctcgtctggcagcatttgatatggatggcactttattgatgcctgaccatcatttaggtgagaaaaccctctctactttggcgcgactgcgtgaacgcgacattaccctcacttttgccacggggcgtcatgcgctggagatgcagcatattctcggggcgatatcgctggatgcgtatttgattaccggcaacggaacgcgcgtgcattctctggaaggtgaacttttacatcgtgatgatttacctgcggatgtcgcggagctggtgctgtatcagcaatgggatacccgagccagcatgcatattttcaatgacgacggttggtttaccgggaaagagatccctgcgttgttgcaggcatttgtctatagcggttttcgttatcaaataatcgatgtcaaaaaaatgccactcggcagcgtcaccaagatctgcttctgtggcgatcacgacgatcttacacgtttgcagatccagctatacgaagcattaggcgagcgtgcacatttgtgtttttccgccacggattgccttgaagtgctgccggtgggctgcaataaaggcgctgcactgacggtgctgacccaacatttaggtttatcgttgcgcgattgcatggcctttggtgatgcgatgaacgatcgcgaaatgttaggcagcgtcggtagcggatttattatgggcaatgcgatgccgcaactgcgcgcggagctcccgcatttaccggtgattggacattgccgaaatcaggctgtctctcactatttgacgcactggctggactatccacatctaccttattcccccgaataacgagatcccttccagcaccgggcaattgcccggtttttttgcgttgaatttgtcattttgtgccgtggtgtttaaaccgcacagaataaattgtcgcgatttcacctttaaaatagaattaaaagagaaaaaaattctccgtggaagggctatgttagataaaattgaccgtaagctgctggccttactacagcaggattgcaccctctctttgcaggcactggctgaagccgttaatctgacaaccaccccctgctggaagcgcctgaaacggctggaggacgacggtatccttatcggcaaagtcgccctgctggatccggaaaaaataggcctcggcctgaccgcctttgtgctgataaaaacgcaacatcacagcagcgaatggtattgccgctttgtcacggtggttaccgaaatgccagaagtgctggggttctggcgcatggctggtgaatacgattatctgatgcgcgtccaggttgccgacatgaaacgctacgacgagttttataagcgtctggtaaacagcgtgccggggctgtcggacgtcacttccagcttcgcgatggaacagattaaatacaccacttctttacccatcgaataaatatccagaatcaggtcaggacacaacgcgtgcgattatttgctcaattaagctggtatttccgtcgggaatggcgtcgctatctcggggctgtcgccttgcttgtcattatcgcgatgctgcaactggttccaccaaaagtggttggtattgttgtcgatggcgtgacagaacaacactttactaccgggcagatcctgatgtggatcgccaccatggtgctgattgccgttgtggtttatctcctgcgttacgtctggcgcgtattgctgtttggtgcgtcttatcaactggctgttgaactgcgtgaagattattaccgtcagctaagccggcagcatcctgagttttacctgcgtcatcgcacgggggacctcatggctcgtgcgactaatgacgtcgatcgcgtcgtgtttgccgccggagaaggggtgctgacgctggtggattcactggtaatgggctgcgctgtgttgattatgatgtctacgcaaattagctggcagttgaccttatttgccctgttaccgatgccagtgatggcgatcatgattaagcgcaacggcgatgctttgcatgaacgctttaagctggcacaggcggcgttttccagtcttaatgaccgcacccaggaaagcctcaccagtatccgcatgatcaaagcctttggtctggaagatcgccagtcggcgttatttgccgcggatgccgaagataccggcaaaaaaaacatgcgggtggcgcgtattgatgctcgtttcgacccgaccatctatatcgcgattggtatggcgaacttgctggcgattggcggcggtagttggatggtggtgcagggcagtttaacgctgggccagctcaccagttttatgatgtatttaggtctgatgatttggccaatgctggcgctggcatggatgtttaacattgtggaacgtggtagtgctgcgtacagccgtattcgcgcgatgctggcggaagcgccggtggtgaacgatggtagcgaacccgtgccggaagggcgtggcgaactggatgtaaatattcaccagttcacgtatccgcagactgaccatcctgcgctggaaaacgtcaatttcgccctgaaacccggtcagatgctgggtatctgcgggccgactggttccggcaaaagtaccctgttgtcgctcattcagcgtcatttcgacgtcagcgagggggatattcgctttcatgatattcctctgacgaagttacaactcgatagctggcgtagccgcctggcggtagttagccagacgccattccttttttctgacaccgtggcgaataacatcgcgctgggttgcccgaatgccacccagcaagagattgagcatgtcgcgcggttagccagcgtacatgacgatattttgcgtctaccgcaaggttacgatacagaggtgggcgagcgcggtgtgatgctttccggcgggcaaaaacagcgtatctccattgctcgtgcgttattagtcaacgcggaaatcctcatccttgatgatgcgctttcggcggtggacggacgcactgagcaccagatcctgcataacctgcgtcagtgggggcagggaagaacggtaatcatcagtgcccatcgcctttctgcactgacggaagccagtgaaattattgtgatgcagcacggacatatcgcccagcgtggcaatcatgatgtgctggcacaacaaagcggctggtatcgcgatatgtatcgctatcaacaactggaggcggcgctcgacgacgctccggaaaatcgcgaggaggccgtcgatgcgtagttttagccaactgtggccgactctcaagcgcctgttagcgtacggttcaccgtggcgtaaaccgctggggattgcggtcctgatgatgtgggttgcggcggcggcagaagtcagtgggccgctgcttatcagctattttatcgacaatatggtagcgaaaaataacctgccgttgaaagtggttgcagggctggctgcggcgtatgttgggctgcaactgtttgccgccgggctacattacgcgcagtcgctgctgtttaatcgggcggcagtaggcgtagtgcaacagttgcgtaccgacgtgatggatgctgcgttacgccagccattaagcgagtttgatacccaacccgtcgggcaggtgatttcccgcgtcactaatgacactgaagtgatccgcgatctctacgttaccgtagtggcaactgtcctgcgcagtgccgcactggtgggcgcgatgctggtggcgatgttcagcctcgactggcgaatggcgctggtggcgataatgattttcccggtggtgctggtggtaatggtgatataccagcgttacagcacgccaattgtccgtcgtgtgcgcgcctatatggcggatatcaacgacggctttaacgaaatcatcaatggcatgagcgttatccagcagtttcgtcagcaggcgcgatttggcgaacgtatgggtgaggccagtcgttcacactatatggcgaggatgcaaaccctgcgcctcgacggttttctgctgcgtccgctgctgagtctgttttcatcgctcattctctgtggcttgttgatgctgtttggcttctccgccagcggcaccattgaagtgggcgtgttgtatgcgtttatcagctatcttgggcgacttaacgaacccttaatcgaactgaccacgcagcaggcgatgctgcaacaggctgttgttgctggtgagcgcgtgtttgagctgatggacggaccgcgccagcaatatggcaatgatgatcgcccgttacagagtggcaccatcgaagtcgataacgtgtcatttgcttatcgcgatgacaatctggtgctaaagaacattaatctctctgtgccttcgcgtaactttgtggcgctggtcgggcataccggcagtggtaaaagtaccctcgccagtttattgatgggctattacccgctaacggaaggtgagattcgccttgatggtcgtccattaagttcgctaagtcacagcgcgctgcgccagggcgtggcaatggtgcagcaagatccggtggtgctggcggataccttcctcgccaacgtgacgctggggcgggatatctccgaagaacgcgtctggcaggcgctggaaaccgtgcaactggcggagctggcacgcagtatgagcgatgggatttatacgccgctgggcgagcaggggaataatctctctgtcgggcaaaagcaactgctggcactggcgcgcgtgctggtcgagacgccgcaaatcctgatccttgatgaggcaaccgccagcattgactccggtactgaacaggcgattcaacatgctctggcggcggtgcgtgaacataccacgctggtagtgattgctcaccgcttatcgactattgttgatgccgacactattctggtgcttcatcgtgggcaagccgtggagcagggcactcaccagcaactgctggcggcccagggacgctactggcagatgtatcaactgcaacttgcgggcgaagagcttgcagccagcgtgcgtgaagaagaatcattgagcgcctgaatagcgcaatatctcatcgttggtgcaaaaatgtaacgcactgtgcactgtcatagtgcgttttcattttcaatcttcttaacttcctgctctctttctcgtttttcatttctggcacaccgcttgcaataccttcttcgtgtagcagaaccattaccgaattctgaccggaggggatctatgaagctggtgaccgtgataatcaaaccattcaagctggaagacgttcgtgaagcgttatcttccattggtattcagggcctgaccgtcaccgaagtgaaaggtttcgggcgtcagaaagggcatgccgagctgtaccggggggcggaatacagcgtcaacttcctgccaaaagtaaaaattgatgtggcgattgctgatgaccaactcgatgaagtgatcgatatcgtcagtaaggcggcttacaccggaaaaattggcgacggcaaaatcttcgtcgctgaattgcaacgcgtcattcgtattcgtaccggcgaagccgacgaagcggcgctgtaatctctggcacacagcaacaggaacgaaaaatgaagatagcgacgataaaaactgggcttgcttcactggcgatgctgccgggactggtaatggctgcacctgcggtggccgataaagccgacaatgcgtttatgatgatttgtactgcactggtgctgtttatgactattccggggattgccctgttttacggtgggttgattcgcggcaaaaacgtgctgtcgatgctgacgcaggtgacggtgacgtttgcactggtctgtattctctgggtggtttacggttactcgctggcgtttggtgagggcaacaacttcttcggcaacattaactggttgatgctgaaaaacatcgaactgacggcggtgatgggcagcatttatcagtatatccacgtagcgtttcagggatcgtttgcctgcattaccgtaggcttgatagttggggcgctggcggaacgaatccgcttctcagctgtgttgattttcgtggtggtatggctgacgctctcttacattccgattgcgcatatggtgtggggcggtggtttgctggcttctcacggtgcgctggatttcgcgggtggcacggtggtgcatattaacgccgcaatcgccggtctggtgggcgcgtatctgataggcaaacgcgtgggcttcggtaaagaggcgtttaaaccgcacaacctgccgatggtcttcaccgggactgccattctctatatcggttggtttggctttaacgccgggtcagcgggcacggcgaatgaaatcgcggcactggcatttgtgaatactgtggtcgcaacggcggcggcaattcttggctggatcttcggtgaatgggcgctgcgtggtaagccttcactgctgggagcgtgttctggcgcgattgccggtctggtcggcgtgacgccagcgtgtggctacattggtgttggcggcgcgttgattatcggcgtggtagctggtctggcgggcttgtggggcgttaccatgctcaaacgcttgctgcgggtggatgatccctgcgatgtcttcggtgtgcacggcgtttgtggcattgtcggctgtatcatgaccgggatttttgccgccagctcgctgggcggcgtgggcttcgctgaaggtgtgacgatgggccatcagttgctggtacagttggaaagcattgccattacgattgtgtggtctggtgtggtggcatttatcggctacaaactggcggatctgacggttggtctgcgtgtgccggaagaacaagagcgagaagggctggacgtcaacagtcacggcgagaatgcctataacgcataacaagcactgcaaaaaacagccggacggttttcacctccggctatttttttaattgtgattacgcatcaccccttcctgaacggtcgaggcaaccagtacgccgtcctgggtataaaactcaccgcgcacaaagccacgtgcgctggacgccgaggtgctctccacgctatacagcagccattcattcaaattaaacgggcgatggaaccacatggaatggtcaatggtggcaatctgaatccccggttcgagaaaaccgataccgtgcggctgtagagctaccggcaggaagttaagatcagaagcgtaaccgagcagatactgatgaacgcgcaggtcatccggcacgctaccatttgcgcggatccacacctgacgatgtggttctgcgacgtgacctttcagtgggttatgaaactccaccggacggacttccagcggacgatcgcagatgaatttatctttaagcactggcggcagcaggtgcgccagcgattgggcgatttgcgtttccgaaggcaggccatcaggcgctggcgcggacggcattgttttttgatgttcgaaccccgcttctggtgcctggaaagaggccgtcatataaaaaatcggtttgccgttttgaatagcagcaacccggcgggcgctgaagctgttaccgtcacgcagcgtttcgacatcataaataatcggcttcttactatcgccagggcgaagaaagtagctgtgaaacgaatgtaccagccgctcttcagggacggtctcttttgcagcatacaaggcctgacccacgacctggccgccaaatacctggcgtaaacctaaatcttcactctggccgcgaaagagtccttcctcaattttttccagatttaacaatgtcagtaaattttttagcgcctgactcatataactctccagtaacaaagctgccgcagcaagccaaagtgagttgagtataacgcaaatttgctactggtccgatgggtgcaatggtctgaattacgggctaattacaggcagaaatgcgtgatgtgtgccacacttgttgacgttactattttgttaaccactcttccggcgaggaaagttagcccgctggtgcattgataataaggagaaatgaatgaaactcgtgcacatggccagtggtttagcggttgcgattgcgttggcggcttgcgcagataaaagcgcggatattcagacgccagccccggctgcaaatacgtctatttcagcaacacaacaacctgctatccagcaaccgaatgtatccggtaccgtctggatccgtcagaaagtcgcactgccgcctgatgctgtgctgaccgtgacactttctgacgcgtcgttagccgatgcaccgtcaaaagtgctggcgcagaaagcggtgcgtactgaaggtaaacagtcaccattcagctttgttctgccatttaacccggcagatgttcagccgaacgcgcgtattctgttgagtgcggcgattaccgtgaatgacaaactggtatttattaccgataccgttcagccggtgatcaaccaggggggaaccaaagccgacctgacattggttccggttcagcaaaccgccgtgcctgtccaggccagtggtggcgcaacaactaccgtaccatcgacttcaccgacccaggtgaatccatcttcggcagttcctgcccctacgcaatactaagcgttactaacccctttccatctggagaggggttagtagttccagcgatagcgctgtaagtcgatttgcccgcttcccgataccatcacaccttctgccagtaatgcctgtcgttgacgctgtaaatccggtccggttagcgaaatggtgccgtggcgattaaccacccggtgccagggcaaggtgctgccttcggggagacgctttaacacaccgccaacctggcgnnnngcgcggggcgatcccgccagtttcgccacatcaccgtaagtggtgacatacccttcgggaatagcggctacgatttgccagacgcgttggggaaatgaatcttctttttccatcttttcttcctgagataatttttcagcataatctggaaaaacgcccgagtgaagccgcattgcgcaagaaaccagcatctggcacgcaatgggttgcaattagccggggcagcagtgataatgcgcctgcgcgttggttctcaacgctctcaatgggggctctgttggttctcccgcaacgctactctgtttaccaggtcaggtccggaaggaagcagccaaggcagatgacgcgtgtgccgggatgtagctggcagggcccccacccatttctgcctcccaccgtttcgtcaaaaaatcccaacatgactaaactttaaccacaactgacgtcgcaagaattgtctggctgcgcagtacgcttcggaggtatgtctgatgaagtatgttgatggttttgtggttgccgttcctgccgataaaaaggatgcctatcgggaaatggccgctaaggccgcgccattgtttaaagagtttggcgcgcttcgtattgtcgaatgctgggccagcgatgtaccggatggcaaagtgaccgattttcgtatggcggtgaaagcggaagagaatgaagaggttgtctttagctggattgaatacccttcaaaagaggtccgcgacgcagctaatcaaaagatgatgtcggacccacggatgaaagagttcggcgagtccatgccgtttgacggcaagcgaatgatctatggcggattcgagtcaatcatcgacgaataggtagcgtgacgggctgtgcggcgtgccgtcagcccaaaaattcacaaatgttgctcggcccagcgtaagaaatcttctttcggtaatgccttgctgtagagccagccctgaccgtagtgcacgccatgctggcgtagccactcttcttgtttactggtttcgattccctccgctaccattttcagtttcagtgtttttgccatttcgatgatatgcggcgtgacatttttatattccagcgcatcaacgaaagatttatcgatcttcagaatgtcgacatccagatcctgtaaataacttaaacttgaataccccgtaccaaaatcatcaagataaatttcatggcccgcctcccggtagcgagaaattatcggggcgctggttttcggatcggcaaactcgcgttcagtgagttcaagcgcgatctgtctgggattaacctgatagtgattgatcatttcacgcagcaattgcgggattttttccgaggtgagcacggtggattcaagattgatcgaaatatgctgctgtggatgctgacgcagccagtcgcccatatcttcaaagacgcttcttataatcagtagcgtcaatggctcagaaaggcccgtttgctgtgccagcggaataaaactatctggtgacaaccaactaccgtctgtctgcggccagcgcgccagtgcctcagcaccgacaattttgccattggctaaggagacaatcggctgatagtgcacgcaaatatcacgattttcgatagcatcctgcagccgatgatgcggtgactggatgcggcgcaaaatgcgcagcacaaacatcgctgccagcaggccaatcaccaacccgagcggtaaccaaataaagacttgccgatgccagcctttctgcaacattttcgatgaagcccaggtgataattgaaatattcatctccgggaagggcaggatatcgtaaatgattccattattttcgatatgctcaccgggtgttttttgtagcctggtaataattccctgagcaatttcatcgctgctggttatgacaacgttatgggcattgccaataatggcggcatcaatttgccatgagctatagggaatgacatcaataaaggaagcggggtcgatcatgacgacataatgtgccgttcccatggcgaccatgtaacggataatgcctaaatcgttatgtgatgttaaccagacacgataaccatctttcgaaattttacctggctcggggaaggtatcgggcggactttcatgctccagagacgaacactggggaacgttgttatcgatataaaccacttcctgaatatagcgataactgtaagatacccgacgcatttccatgagatgggcttcactacagtcagcgccttgccatctttccagctcttgcagcgcatctttcccttgtgtcgccaccttattggcccgaatagcgacgcgggaggaataggtatccagctcttcaataaacgatgtttctacctgctgatgggccagccagatgcttaagccgacaggcagcaatactgaaagaatcagtactcccgaaataaggccgaccagatgtcgtgttctcaccagcatatccttattaacacagtgtagggaaagtatatctgattgtggaaaaaggctggcaggagataaggaggtagagctggtatttcatgaagtgatgggtggaaacgatcgttgtcatttgaccaggcgcagagctttacgcctggtatgtaatcctaacttaagatgttgattcggcgcgagcgagggtaaaaatatcgtaaaaagacaattcacctttacggacgatcattttttgcagttgttccttatgaacatccgcgacacgcggagagttcaagatggcttcaaccagcgcggcaggtacaaagcgcgtgttgtaccattcgccgttatagcaaacgcggaaatccaacacgtcgatatcttcatagcggtagcgtgggtagacatcgaaaaagaagaaaccattaagcaggataaataatacaaccagtagccagacagagcctgaaagcgtttcggactgcaacatcaccgccagggtggcaaaaaaagcaacgtacataccgataaacagccccggatgtttacggataaaactgatactaaagcggggtttgttgtcgcgtttttcgcgggtattcagagactcaatcgtttcggtcagcaggcgttgtatttcggtcatcgtttgccttcgtggtatctgcaactttccagggaacaccctattttaacgtgggaatagtagagggaaagtaacagatctaccacaattttgcataacagttgcgnnaaaccgattacaattttttaattattctggctggattaccgcccacgacaacgttgtccgggacatcttttgtgacaactgcacctgaggctaccacgacgttatcaccaatggtcacaccagggttaatgaccgcgcgtccgccaatccagacgttattaccgatggtgacgggtttccccagttcagcaccgctattacgtgctacagggtcgatgggatgtgttgccgtgtagatatgaacgcctggtgccaacatacagttatcaccgatgcgaatagggcagacatcaagcatcacgcaatcgaagttggcgaaaaaattattaccgagaaaaatgttatagccatagtcacagcgaaacgttggctcaatataagcctctgtcacctgaccgaatagatcagcgagaatttgctggcgtaatgtgtgctcttccgccagggaatgattgtatcggtgaataagctgacgagcgcgcaggcgatcgcgagataacgtctcatctgccgagcgatacaactcaccagcaatcatcttttctttttctgtgctcattactgacctccggttgctgaaaatgcggcaacacagtaagacgaaaagtcagtgaagagaacgttcccattacatctgtgtgataaagatcacatagggtatgtcttcatggcgaaaaagtataaaattcttaataaacagccggttatagctctgaaagcgaattatttattagcgaataaatttccatactgaggaagggatcttgtcgtacagtttattcatggtcaattcggcgaggcggtgatctgcggctgagtaaaataccgccagttcattatctgataattcgtatttatttttctcgataacacgctccagcgtgtcaattgtctggcaacgacgtaaacgcattaaataatcggttttcgttaaaggtttttcggacatacttctacccatggttgtaataattctaacaagataaactcgcaggattctctttcgtcgcattgacaaaacaacggaatagtcgattacctgacttccgccatttctgaagatcctgcatattaataccataactactgaacaacataaaggtgtcatccagatattcgtcgatctgctcaatgagcttattgtcttcattatacttaattttgtaattaagtgcgaaggtcgcaatatgctcaatcagttcattcaactggaggttgatcgccgaggttgggtcgttaacccagccatgattgctttcttcaaggtttgcaaggcagtcatgatacagagtttcacagagaaacttaagctgtgcgatatcatgtcttttgggtgagtattcatccataacgcgtccccttcttagcggttgaactaacggacacctttcgggatggaaaaaacttactgacctggacttgccctctcgtttgttagcttaactataagccactctttgcaggttttcatcgcattattacgaaaaattacaattaggaaggaagcgggacagggctcactttttcatactagcaccaacccgcagcaggtaaaagcagtttgctcgaactgttcataacatttcaggattatcgccagatgaaattggtgacactaataccaggattgctctgaatatgacgtaataaccgaggaatgaataaagaattaccgcaaataattaagaatagcctctaaatgattatggattattaaatctattagcgctacttaatataaattaactaacaatcagtattttttatgaattttatacgtggttaatactggttttcgtatgagatcctgagttggtggttcaattactccttaatgttcgtaggttatgcataaaaaaggccgcttacgcggccttagtgattacacgttgtatcaatgatgatcgacagtatggttgtgctcgatatcttcattcttgcggctaaagaggcggcgaaccaccacaaagaataccggaacgaagaagattgccagtaccgttgcggtcaccatcccgcccattacaccggtacctactgcgttctgcgcgccggaaccagcaccagtactgataaccagcggcataacgccgaggataaacgccagcgaggtcatcaggatcggacgtaaacgcatccgcaccgcatcaagcgtcgcttcaatcagacctttaccttctttatccatcaagtctttggcgaattcgacgataagtatcgcgttcttcgccgacaacccaatggttgtgagcaggcctacctggaagtaaacgtcattggtcaggccacggaaggtggcagccagcaacgcaccgataacccccagcggaacgaccagcataacggagaacggaatcgaccagctctcgtacagcgccgccagacacaggaacacgacaatcaacgaaatcgcgtacagtgaaggtgcctggttgccggagagacgttcctgataggacatccccgtccagtcatagccaacaccggtaggcagtttgctcgccagttgttccatcagctccattgcttcaccggtacttttacccggtgccgcctggcctaagatttccatggatggcaggccgttgtaacgttccagacgcggcgaaccgtactcccaacgagaagaggagaacgccgagaatggcaccatctgaccatcagcagcacgaacataccagtcgccgatatcatccggcagcatacggtatttcgcttctgacatgacgtaaactttcttcacacgaccgcggtcgataaagtcgttcacatagctgccgccccatgcagcgcccagagtggtgttaatgtcgttgatagaaacacccagcgcctgcgctttttcctggtcgatatcaatcttaaactgcggggtatcttccagaccgtttggacgtacgctggtcaacatatcagggtgcttcgctgcttctgcaagcaactggttacgcgcctgagtcagtttttcgtgaccaaggccagcctggtcaatcagctcaaagtcaaagccggttgcggtacccagttccacgattgcgggcaggttaaaggcgaaaaccatcgcatctttgatttgcgagaaagcgcgtgttgcacgcatggtaatcgcttcaactttgttttcttcacccggacgatcggcccagtccttcaaggaaacgaacgcaataccggtattctgaccacgtcccgcaaagccgaagccgttaacggcgaacaccgactcaacgttgttcttttctttggtcagatagtaatgcgttacctcattgagcactttctgcgtacgttcctgcgttgcacctgctggcagctgaaccatggtcataaatacgccctggtcctcatctggcaagaaggagcttggcagacgcacaaacagataggccatgccgaccacgatgatcagatacagcaccagataacgccccgtactgcgcagaataccgcctacgctgtcggtgtagtggtgcgtgctcttctcgaacatgcggttaaaccagccgaagaagccttttttaccttccccgtgatcgcctttggcaatcggtttcagcatggtggcacaaagagctggagtcaggatcaacgccaccagtaccgacagcgccattgctgaaacaatggtaatagagaactgacgataaattgccccagtagaaccgccaaagaaggccatcggtacgaataccgccgacagtaccatcgcgataccgaccagagcgccctgaatctgccccatcgacttacgggtggcttcttttggcggcaaaccttcttccgccatcacacgctcaacgttttctaccacaacgatagcgtcatccaccaacaggccgatggcgagcaccatcccgaacattgttagcgtgtttatcgagaagccaaaggcggcaaggacggcaaaggtcccgagcaataccaccggtacggcaatggtcggaatcaacgtcgcgcggaagttctgcaggaacagatacataaccaggaacacgaggatgatcgcttcgaccagcgttttaaccacttcgtgaatagagattttcacgaacggcgtggtgtcgtacgggtaaacaattttcagacccgacgggaagaacggttccatcttcgccagttcagcacggattgccgcagcggtatccagcgcgtttgcaccggtcgccagcttgatccccagaccggaagccggttggccgttaaactctgcgatgatgtcgtagttctcaccacccagctcaatcttcgccacatcacgcagcagtacgcgggaaccatcctgattcactttcagcaggattttgccgaactcttcagtagaggtcagacgcgtctgagcaataatagaggcgttaagctgttggcctttcaccggcggtgtaccaccgagctggcccgccgcaacctgggcgttctgcgctttgatggcggtaataacatcaaccggcgttagctggaatttgttcagttcattcgggttcatccagatacgcatcgcgtactgtgaaccgaacaactgaacgtcacccacgccagacgtacggctgatggcatctttcatattcgccgccacgtagtcggagatatcctcctgcgtcatggtgccatcggtgttgataacgccgacaaccatcaggaagctgctggatgatttctcaacgctcaccccttgctgctgaacttcttgcggcagcaacggcatcgccagctgcagtttgttctgcacctgaacctgcgcgatatccgcatcagtaccagactcaaaggtcagggtgatctgtacggtacccgtggagtcactgttagaggacatgtacatcaggttatcgataccgttcatattctgttcgataacctgtgtcaccgtgtcctgcactgttttcgcatcagcgccggggtaggaggcggagatcgttactgccggcggtgcaatcgtaggatattgcgccaccggcagtttgaggatcgccagcccccctgccaacatgatgataatggcgatcacccacgcaaaaatcgggcgatcgataaagaaattaggcatgtcttaacggctcctgtttaagttaagacttggactgttcaggctgagcaccgcttgcggcttgctggttattatcagcggtaacttcttgtgcttttacctggacaccaggacgcactttctgcagcccacttattactacgcgatcgcctgctttcagaccttctgtcaccagccacttatcgccaatagcctggcttgcaacgatcggacgggtttccactttgtcatccgcgccaaccaccagtacggtggcatcgccacgcggcgtacgggttacgccctgttgcgggactaaaatagcgtttggattaagcccttcttccagacgtgcgcgcacgaacatacccggcagcagagtgtgatccgggttcgggaagatagcgcgtagggtgatagacccagtggtctgatcaacggtaacgtcagagaattccagcgtaccgtcctgcgggaacttaatgccgtcactggtgatcagcgacactttggctttgccgttctcttgtttcagcgtgccattcgccagttcctgtttcaggcgcaggaagtcgttgctggactgggtcacatcaacgtagatcggatcaagttgctgcacggttgccagcgcagtcgcctgaccgttctgtaccaatgcgccttccgtcacgttcgacttaccaatgcgaccgctaatcggagaggtgactttggtgtaagccagattgatccgcgcagtttcaacggcagctttcgccgcagttaccgcagcattcgcctgttgcgcatcagccagagcctgatcgtactcttgcttactgatgtactgagtaccgagcagtttctgataacgattcaccgtcaattgcgcgatattggctgcagcctgggctttcgccagatcacctttcgcactgtcgtatgtcgcctgataggtcgcaggatcaatctgatagagagagacacctgcttcgatgtcgctaccttctttgaaattacgcttcaggataatcccgctaacttgaggacgaacttctgcgatccggtaggcactggtgcgacccggaagctcggttgtgatctgcagaggttcagttttgactgttactacgccaacggcgggcatctgctggccaccttgttgggcctgtttgtcgtcacatcctgttagggctaagctgcctgagagcatcagaacgaccgccagaggcgtaaaccctctgtttttgttcatatgtaaacctcgagtgtccgatttcaaattggtcaatggtcaaaagttaataaacccattgctgcgtttatattatcgtcgtgctatggtacatacattcacaaatgtatgtaaatctaacgcctgtaaattcacgaacatatggcacgaaaaaccaaacaagaagcgcaagaaacgcgccaacacatcctcgatgtggctctacgtcttttctcacagcagggggtatcatccacctcgctgggtgagattgcaaaagcagctggcgttacgcgcggtgcaatctactggcattttaaagacaagtcggatttgttcagtgagatctgggaactatcagaatccaatattggtgaactagagcttgagtatcaggcaaaattccctggcgatccactctcagtattaagagagatattaattcatgttcttgaatccacggtgacagaagaacggcgtcgattattgatggagattatattccacaaatgcgaatttgtcggagaaatggctgttgtgcaacaggcacaacgtaatctctgtttggaaagttatgaccgtatagaacaaacgttaaaacattgtattgaagcgaaaatgttgcctgcagatttaatgacgcgtcgggcagcaattattatgcgcggctatatttccggcctgatggaaaactggctctttgccccgcaatcttttgatcttaaaaaagaagcccgcgattacgtcgccatcttactggagatgtatctcctgtgccccacgcttcgtaatcctgccactaacgaataaccctgaatctgactccaggatttttcctggacattttcgtcgttgctattctggttcactgcgtcgtgatattcttgcggtttgactttttcaggtcgttcttcaggttcagaaaccttcattcatcatgactatgttccagtattacaaacgatcacggcattttgttttttcagcatttattgcttttgtttttgtcttgttatgccagaacacggcgtttgcgcgggcgtcatcgaatggtgatctgccgacaaaagcggacctgcaggcgcaacttgactcactaaataaacaaaaagatctttctgctcaggacaaactggtgcagcaggatctgacagatacattagccaccctcgataaaatcgatcgcgtaaaagaagagaccgttcagctacggcaaaaagtcgctgaagcgccggaaaaaatgcgccaggcgaccgcggcgttaacagcacttagcgatgtcgataacgacgaagaaacgcgcaaaattctgagcacgctttcgttgcgccagctggaaactcgcgttgcccaggcgctggacgatttgcaaaacgcacaaaacgatctggcgtcttataacagccagctggtttcgttacagacgcagcccgaacgcgtgcaaaatgcgatgtataacgcttcgcagcagctgcaacaaattcgcagtcgtctggatgggactgatgtcggcgagactgccttacgtcccagccagaaagtgttaatgcaggctcagcaggcgttgctgaatgcggagattgaccagcagcgtaaaagcctggaagggaataccgtcttgcaggataccttgcaaaagcaacgtgattacgtgacggcgaacagcgcccgtctggagcaccagttgcagctgttgcaagaagcggtaaacagcaagcgcctgactttaaccgaaaaaacggcgcaggaagccgtctccccggatgaagccgcgcgtattcaggctaatccgctggtgaagcaggaactggaaattaaccagcagttaagtcagcgtctgattaccgcgactgaaaacggtaatcagttgatgcagcaaaacattaaagtcaaaaactggctggagcgggcgctgcaatcggaacgcaatattaaagagcagattgccgtcctgaagggcagcctgctgttgtctcgtatcctttaccagcaacaacaaacgctgccctcggcggatgaactggaaaacatgaccaaccgcatcgcggatttgcgtctcgaacagtttgaagttaaccagcagcgtgatgcactcttccagagcgatgcgttcgtcaacaaactggaagaaggtcacaccaacgaagtcaacagcgaagttcacgatgcgttattgcaagtggttgatatgcgtcgcgaattgctggatcaactcaacaaacagttgggtaaccagctgatgatggccattaacctgcaaatcaaccagcagcagttaatgagtgtgtcgaaaaacctgaaatccatcctgactcagcaaatcttttgggtgaacagtaaccgtccaatggactgggactggatcaaagcgttcccgcaaagcctgaaagatgaatttaagtcgatgaaaattacggttaactgggaaaaagcctggcccgccgtttttatcgctttcctcgctggtttgccgctgctgttgattgccgggctgatccactggcgtctggggtggctgaaagcgtatcaacaaaaactggcttccgctgtgggttccctgcgtaacgacagccagctcaacacaccaaaagcgatccttatcgacctgatccgtgcactgccggtgtgcctgattattctcgcggttggcctgattctgttgaccatgcagctcaacatcagcgaactgctatggtcgttcagcaaaaaactggcgattttctggctggtgtttggcctgtgctggaaagtgctggagaagaacggcgttgccgtgcgtcacttcggcatgccggaacagcagaccagccactggcgtcggcaaattgtccgcatcagtctcgcgttgctgcctatccatttctggtctgtggtggcagaactttccccgctgcatctgatggatgatgtgctggggcaggcgatgattttcttcaacctgctgctgattgccttcctggtatggccaatgtgccgcgaaagctggcgtgataaagagtcgcacaccatgcgactggtcaccattaccgtgctgtcgattatcccgattgcattgatggtgctgactgccacgggttatttctacaccacgctgcgcctctccgggcgttggattgaaaccgtttatctggtgatcatctggaacttgctctaccagacggtattgcgcggcttaagcgtagcggcgcggcgtatcgcctggcgtcgtgcgctggcgcgtcggcagaatctggtgaaagagggcgcagaaggtgccgaaccgccggaagaacccaccattgcactggaacaggttaaccagcagacgctgcgtattaccatgttgctgatgtttgcgctgttcggtgtcatgttctgggcaatttggtccgatttgatcaccgtgttcagctatctcgacagcattacgctgtggcattacaacggtactgaagctggtgctgcggtggtgaaaaacgtcaccatgggtagtctgttgtttgcgattatcgcctcaatggtggcctgggcgttgattcgcaacctgcctggtttgctggaagtgctggtgctctcgcgactgaatatgcgccagggcgcgtcgtatgccattactaccatccttaactacatcattattgctgttggtgcgatgacggtgttcggatcgctgggcgtctcttgggataaactccagtggctggccgcagcattatccgtaggtcttggttttggtttacaagaaattttcggtaacttcgtctccggtttgatcattctgttcgaacgtccggtgcgtattggcgatacggtaaccattggtagcttctcggggacggtaagtaaaatccgtattcgtgcgacaacgattaccgatttcgatcgcaaagaagtgatcatcccgaacaaagcgtttgttaccgagcgtctgatcaactggtcgttgactgacactactacgcgtctggtgatccgtctcggcgtggcctatggctccgatctggaaaaagtgcgtaaagtgttactgaaggcggcgactgagcacccaagggtgatgcacgaaccaatgccggaagtcttctttacggcatttggtgccagcacgttggatcatgagctgcgtctgtatgtgcgtgaactgcgtgaccgtagtcgtactgtcgatgagctgaaccgtactatcgatcagctgtgccgtgaaaacgacatcaacattgcctttaaccagcttgaagtgcatctgcacaacgagaagggcgatgaggtgacggaagtaaaacgcgactacaaaggcgacgatccgacgccagcggtagggtaaggacaataaagggcgacagtgatgccgccctttattttttactcgctttgtgaagcctcatcgctctgtaacttcttttcataatcacgctttacaatatccagcgcgcgcagcacggtgcgggctgggatctgattttcttccagcagcacaatcaaatcgacagccagtttgacatcgtcaggggcattttccagtgacatactctctccattgctagcgggttaaacgcgctaacctgttttcgattttttccagcgcatggcggcagcgtgccaggcgcgcttcataggcttccacttcacgatgcagcgtttgctgttccacgagatcggtcacccgcgccaggcgggctctacgttcggcaaccatctcacgtagccgccgctcaaaatcctgatgctgaatacgtttacgctgccagcgggcaatttggggtggtgcgctatcccactcgcgtagcgaccaggctgtggcttcacgcgctatagcctccagttgcgccgccagatgttctgccagccaggcgacttgcggcagttgctgttgctcaactgcatgacgaagcgcagccagattatcgcccgcctcgtcgagacaagcctgtagtgttgtcgcacgagtctgaaaaagatgcctgttgaaacgagcacttagcgtggcgaactgtgacaccggggcacaacgctgacgcagcgtagcgagctgtcnttccagtttttccagcagcagggcggttttcacgataagacctcaatgaaaatgataattgttatgctaaagtagccactctgtaagctgacaacactcaatatgcaacgaatcattttaatcatcattggctggctggcggtagtgctgggcacgctgggcgtggtattaccggtattaccgacgacgccgtttatcctgctggcggcctggtgctttgcccgttcttccccgcgctttcacgcctggttgctgtaccgctcatggtttggcagctatctacgtttctggcagaaacatcatgcgatgccgcgcggcgtcaaaccgcgggcgattttgcttattttgctcacgtttgccatttctctgtggttcgtccagatgccatgggtgcgcatcatgttgctggtaattctcgcctgtttgcttttctatatgtggcgaattccggtgattgatgaaaagcaagaaaagcactgaagcacaacaatcgcagttgcaattattgcgtatagccagtacattctggcgttttcgagcacaggcgcaggcggtcaaaggttaaacaactgttacttttgatacgtttaaaacgcgccgtgagtaccaccgtaacaagcaggcatacacttatgaccgcgactgcacagcagcttgagtatctcaaaaatagcatcaaaagcattcaggactacccaaaacccggcattcttttccgcgatgtcaccagcttactggaagacccgaaagcttacgctctcagcatcgacttgctggttgagcgttacaaaaatgcgggcattaacaaagttgtcggcaccgaagcgcgtggcttcttgtttggcgctccggtagctctgggtctgggcgttggctttgtaccggtccgtaaaccgggcaaactgccgcgtgaaaccatcagtgaaacttacgatctggaatacggcaccgatcagctggagatccacgttgatgccatcaaaccgggcgacaaagttctggtggtggacgatctgctggcaaccggcggcactatcgaagcgaccgttaaactgatccgtcgtctgggtggtgaagtggctgacgctgcgttcattatcaacctgttcgatctcggcggcgaacagcgtctcgaaaaacagggcattaccagctacagccttgtcccgttcccgggccattaattatcgccagtcttgtgctgcccacgctacggacagcacaagatgtgcattcagcctcgccgttctgacggggctgtgttagcattaccccttcgtgaatccaccttccagcgtttcagagcctgccaatgagttatcaggtcttagcccgaaaatggcgcccacaaacctttgctgacgtcgtcggccaggaacatgtgctgaccgcactggcgaacggcttgtcgttagggcgtattcatcatgcttatcttttttccggcacccgtggcgtcggaaaaacctctatcgcccgactgctggcgaaggggctaaactgcgaaaccggcattaccgcgacgccgtgcggcgtgtgcgataactgtcgtgaaatcgagcaggggcgctttgtcgatctgattgaaatcgacgccgcctcgcgcaccaaagttgaagatacccgcgacctgctggataacgtccagtacgctccggcgcgtggtcgtttcaaagtttatctcatcgacgaagtgcatatgctgtcgcgccacagctttaacgcactgttaaaaacccttgaagagccgccggagcacgttaagtttctgctggcgacgaccgatccacagaaattgccggtgacgattttgtcgcgctgtttgcaatttcatctcaaggcgctggatgtcgagcaaattcgtcatcaacttgagcacatcctcaatgaagaacatatcgctcacgagccgcgngcgctgcaattgctggcgcgcgccgctgaaggcagcctgcgagatgccttaagtctgaccgaccaggcgattgccagcggtgacggccaggtttcaacccaggcggtcagtgcgatgctgggtacgcttgacgacgatcaggcgctgtcgctggttgaagcgatggtcgaggccaacggcgagcgcgtaatggcgctgattaatgaagccgctgcccgtggtatcgagtgggaagcgttgctggtggaaatgctcggcctgttgcatcgtattgcgatggtacaactttcgcctgctgcacttggcaacgacatggccgccatcgagctgcggatgcgtgaactggcgcgcaccataccgccgacggatattcagctttactatcagacgctgttgattggtcgcaaagaattaccgtatgcgccggaccgccgcatgggcgttgagatgacgctgctgcgcgcgctggcgttccatccgcgtatgccgctgcctgagccagaagtgccacgccagtcctttgcacccgtcgcgccaacggcagtaatgacgccaacccaggtgccgccgcaaccgcaatcagcgccgcagcaggcaccgactgtaccgctcccggaaaccaccagccaggtgctggcggcgcgccagcagttgcagcgcgtgcagggagcaaccaaagcaaaaaagagtgaaccggcagccgctacccgcgcgcggccggtgaataacgctgcgctggaaagactggcttcggtcaccgatcgcgttcaggcgcgtccggtgccatcggcgctggaaaaagcgccagctaaaaaagaagcgtatcgctggaaggcgaccactccagtgatgcagcaaaaagaagtggtcgccacaccgaaggcgctgaaaaaagcgctggaacatgaaaaaacgccggaactggcggcgaagctggcggcagaagccattgagcgcgacgcgtgggcggctcaggtgagtcaactttcgctaccaaaactggtcgaacaggtggcgttaaatgcctggaaagaggagagcgacaacgcagtatgtctgcatttgcgctcctctcagcggcatttgaacaaccgcggtgcacagcaaaaactggctgaagcgttgagcatgttaaaaggttcaacggttgaactgactatagttgaagatgataatcccgcggtgcgtacgccgctggagtggcgtcaggcgatatacgaagaaaaacttgcgcaggcgcgcgagtccattattgcggataataatattcagaccctgcgtcggttcttcgatgcggagctggatgaagacagtatccgccccatttgatcgtaagcacagcttacgttcgtcatccttaacgtgattgagagagaaacctatgtttggtaaaggcggtctgggtaacctgatgaagcaagcccagcagatgcaagaaaaaatgcagaaaatgcaggaagagatcgcgcagctggaagttaccggcgaatctggcgcaggtctggtaaaagtgaccatcaacggtgcacataactgccgtcgcgtagagatcgacccgagcctgctggaagacgacaaagagatgctggaagacctggtggctgcagcattcaacgacgcagcacgtcgtattgaagaaacgcagaaagaaaaaatggcttctgtatcctccggaatgcagctgccgcctggctttaagatgccgttctgatgcaaaccagcccgctgttaacacagcttatggaagcactgcgctgtctgccgggcgttggcccgaagtcggcgcagcgtatggcgttcacgctgcttcagcgcgatcgtagcggcgggatgcgtctggcgcaggcgctcacccgggcgatgtcggaaatcggccactgcgccgattgccgcaccttcaccgaacaggaagtctgtaacatctgttcgaatccgcgtcgtcaggaaaacggtcaaatctgcgtggtggagagtccggcggacatttacgccattgagcagacggggcagttttcaggtcgttattttgtgttgatgggacatctgtcaccgctggacggcatcggtccggatgatatcggccttgatcgtctggaacagcgtctggcagaggaaaaaatcactgaagtgatcctcgccaccaaccctacggttgaaggtgaagctaccgctaactacattgccgagctttgcgngcaatatgacgtggaagccagccgaatcgctcatggcgtaccggttggcggcgaactggaaatggtcgatggcaccacgctgtcacactcccttgccgggcgtcataagattcgtttttaagcaaacgagagcaggatcacctgctctcgcttgaaattattctcccttgtccccatctctccctcatcctgtttttaaccttaaaatggcattattgaggtagacctacatgaaaggacaagaaactcgtggttttcagtcagaagtgaaacagcttctgcacctgatgatccattctctctattccaataaagaaatcttcctgcgtgagcttatctctaacgcctccgatgcggcggacaagttgcgtttccgtgcgctctctaacccggacctgtacgaaggtgatggcgaactgcgcgttcgtgtctctttcgataaagacaagcgcacgctgaccatctccgataacggcgtggggatgacccgcgacgaagtgattgaccatctggggactatcgctaaatccggtaccaaatcattcctcgaatccctgggttctgaccaggcgaaagacagccagctgatcggtcagtttggtgttggtttctactctgcgtttatcgtggccgacaaagtgaccgtgcgtactcgcgcggcaggcgaaaaaccagaaaacggcgtcttctgggaatcggctggcgaaggtgaatataccgttgccgacatcaccaaagaagatcgtggtactgaaatcaccctgcatctgcgtgaaggcgaagacgagttcctcgatgactggcgcgtgcgttccatcatcagcaaatactccgaccatatcgcgctgccggtagagatcgaaaaacgcgaagagaaagacggcgaaaccgttatctcctgggagaaaattaacaaagcgcaggcgctgtggactcgtaacaagtcggaaatcaccgatgaagagtacaaagagttctacaaacacatcgccca

SEQ ID NO: 138 - DNA, 12798 bp, Escherichia coli
  Strain O55:H7
  modified_base (5749)..(5749): a, c, g or t
  modified_base (7308)..(7308): a, c, g or t
  modified_base (8666)..(8666): a, c, g or t
  modified_base (11071)..(11071): a, c, g or t
ttaacgatccgctgacctggagccacaaccgtgttgaaggtaagcaggagtacaccagcctgctgtacattccgtcccaggctccgtgggatatgtggaaccgcgatcataaacacggcctgaaactgtatgttcagcgtgtgttcatcatggacgacgcagaacagttcatgccgaactatctgcgcttcgtgcgtggtctgattgactccagcgatctgccgctgaacgtttcccgtgaaatcctccaggacagcacggtaacgcgtaacctgcgcaatgcgctgaccaagcgtgtgctgcaaatgctggaaaaactggcgaaagacgacgcggaaaaataccagaccttctggcaacagtttggcctggtactgaaagaaggtccggcggaagatttcgctaaccaggaagcgatcgccaaattgctgcgttttgcttctacccataccgattcttctgcgcagaccgtgtctctggaagactacgtttcccgcatgaaagaagggcaggagaaaatctactacatcactgcagacagctatgcggcagcgaagagcagcccgcacctggaactgctgcgtaagaaaggcatcgaagttctgctgctttccgaccgcatcgatgagtggatgatgaactatctgactgagttcgacggtaaaccgttccagtcggtgtctaaagttgacgagtcgctggaaaaactggctgacgaagttgatgagagcgcgaaagaagcggagaaagcactgactccgttcatcgaccgtgtgaaagccctgctcggcgagcgcgtgaaagatgtccgtctgactcaccgtctgaccgatacgccagcgatcgtttcgaccgacgcggacgaaatgagcactcagatggcgaaactgttcgctgcggcgggccagaaagtgccagaagtgaaatacatcttcgaactgaacccggatcacgtactggtgaaacgtgcggcagatactgaagatgaagcgaagttcagcgagtgggtagaactgctgctggatcaggcactgctggcagaacgcggcacgctggaagatccgaacctgtttattcgtcgtatgaaccagctgctggtttcctgatgtaatgccggatgaccttcgtgtcatccggcatttttcttttcattatctgcactttccgcaaattatctcgccattaaccgtttcagcccctggtgcctttcttgaggcaatcgcctgatggtggtatcgtttatcgctttttcaaaaaattcgacacattttaaggggattttcgcaatgcgtatcattctgcttggcgctccgggcgcggggaaagggactcaggctcagttcatcatggagaaatatggtattccgcaaatctccactggcgatatgctgcgtgttgcggtcaaatctggctccgagctgggtaaacaagcaaaagacattatggatgctggcaaactggtcaccgacgaactggtgatcgcgctggttaaagagcgcattgctcaggaagactgccgtaatggtttcctgttggacggcttcccgcgtaccattccgcaggcagacgcgatgaaagaagcgggcatcaatgttgattacgttctggaattcgacgtaccggacgaactgatcgttgaccgtatcgtcggtcgccgcgttcacgcgccgtctggtcgtgtttatcacgttaaattcaatccgccgaaagtagaaggtaaagacgacgttaccggtgaagaactgactacccgtaaagacgatcaggaagaaaccgtacgtaaacgtctggttgaataccatcagatgacagcaccgctgatcggctactactccaaagaagcggaagcgggtaacaccaaatacgcgaaagttgacggcaccaagccggttgctgaagttcgcgctgatctggaaaaaatcctcggctaatcaagccgcagcagatctgctttcgggcaggtctgctcatccacctcaggcaatacctctcacagcaattagttcttcttcctcacttttccgctacaattatcaacaagttgaatcgataagaggcggtaatgcgtcagactaaaaccggtatcctgctggcaaacctgggtacgcccgatgcccccacacctgaagcggtaaaacgctatctgaaacaatttttaagcgacagacgcgtggttgatacctcacggttgttatggtggccattgctgcgcggcgtgattttgccgctgcgctcgccgcgtgtggcgaagctgtatgcctctgtctggatggaaggtggctcgccgctgatggtttacagccgccagcaacagcaggcgctggcacaacgtttaccggagacgcccgtagcgctgggaatgagctacggctcgccatcactggaaagcgccgtagatgaactcctggcagagcatgtagatcatattgtggtgctgccgctttatccgcaattctcctgttctacggtcggtgcggtatgggatgaactggcacgcattctggcgcgcaaacgtagcattccggggatatcgtttatacgtgattacgccgataaccacgattacattaatgcactggcgaacagcgtacgcgcttcttttgccaaacatggcgaaccggatctgctgctgctctcttatcatggcattccccagcgttatgcagatgaaggcgatgattacccgcaacgttgccgcacaacgactcgtgaactggcttccgcattagggatggcaccggaaaaagtgatgatgacctttcagtcgcgctttggtcgggaaccctggctgatgccttataccgacgaaacgctgaaaatgctcggagaaaaaggcgtaggtcatattcaggtgatgtgcccgggctttgctgcggattgtctggagacgctggaagagattgccgagcaaaaccgtgaggtcttcctcggtgccggcgggaaaaaatatgaatatattccggcgcttaatgccacaccggaacatatcgaaatgatggctaatcttgttgccgcgtatcgctaaagctgagcggtaaagaactgagcgccgtcgcgaagagcctcgtcggcggttttcatcatccgtgaataatgcaaaaaggcgtgcagcgtgcctgggtagagtttgaactcacaggactgctgatgcgccgctaacgtctggtaaagcagacggctgtcatccagcagcggatcgaactccgccccggcaataaaacagggcggaacttcgcgagtgagatcattattaaacagacagtaatacggcgactcgcggtccgcgtcgttgcttaaatacgcctcttcatacatctgcaaatcctgttgcgttaagccatcccagacaccgcccaacagacgacgagtcacggaatcccgtaatccgtaaagcccataccacagcaaaacgcccgcaactttaccgcaatcgatctgtttatcacgcaaccacaacgcactggcgagcgccagcatggcacctgcggaatcaccggcaaagccaatgcgggacatattgatttgataatcctccgcctgctggtggaaataacaacaagcagccacaatttcctctatcgcttgcggaaaacgcgcttcaggtgaaagggtgtaatcaataccaatcaccgtacattggctgtagcttgccagcaggcgcatgatgcgatcgtgggtatcgagattgccgagaataaaaccgcctccatgcaaataaaatagcgttgccgggctatctggctgcggacaaaagagacgtgtttccacctgcccatattttgttggaaccatgtaagctttggttgccatttctggagcgcccgcattccagaatcggcgctcaagcgtgtaatactgtcgttgctcagcaatcgttcccgttgcgggccagggcggtaaatccggctgaagagtattcacaacggtcttcatttcagcagaaataaggtccagaacaggtaatttgttttccggcttcatacaaaaactcctttcaaattacgtcattgtaaggaaccactgccatgaaaatgcgatcccgcctgctgatattgaaactggctgcgtctcgcgcgctcccgtcagattgtgttaacattcgccgctcagttaaccacccgtaaaaacaaccatgaaatttcccggtaaacgtaaatccaaacattacttccccgtaaatgcacgcgatccgctgcttcagcaattccagccagaaaacgaaaccagcgccgcctgggtagtgggtatcgatcaaacgctggtcgatattgaagcgaaagtggatgatgaattcattgagcgttatggattaagcgccgggcattcactggtgattgaggatgatgtagccgaagcgctttatcaggaactaaaacagaaaaacctgattacccatcagtttgcgggtggcaccattggtaacaccatgcataactactcggtgctcgcggacgaccgttcggtgctgctgggcgtcatgtgcagcaatattgaaattggcagctatgcctatcgttacctgtgtaacacctccagccgtaccgatcttaactatctacaaggcgtggatggcccgattggtcgttgctttacgctgattggcgagtccggggaacgtacctttgctatcagccctggccacatgaaccagctgcgggctgaaagtattccggaagatgtgattgccggagcctcggctctggttctcacctcttatctggtgcgttgcaagccgggtgaacccatgccggaagcaaccatgaaagccattgagtacgcgaagaaatataacgtaccggtggtgctgacgctgggaactaagtttgtcattgccgagaatccacagtggtggcagcaattcctcaaagaccacgtctccatccttgcgatgaacgaagatgaagccgaagcgttgaccggagaaagcgatccgttgttggcatctgacaaggcgctggactgggtagatctggtgctgtgcaccgccgggccaatcggcttgtatatggcgggctttaccgaagacgaagcgaaacgtaaaacccagcatccgttgctgccgggcgctatagccgaattcaaccagtatgagtttagccgcgccatgcgccacaaggattgtcagaatccgctgcgtgtctattcgcacattgcgccgtacatgggcgggccggaaaaaatcatgaacaccaacggagcaggggatggcgcactggcagcgttgctgcatgacattaccgccaacagctaccatcgtagcaacgtaccaaactccagcaaacataaattcacctggttaacttattcatcgttagcgcaggtgtgtaaatatgctaaccgtgtgagctatcaggtactgaaccagcattcacctcgtttaacgcgcggcttgccggagcgtgaagacagcctggaagagtcttactgggatcgttaagttatcgtcggttcgtaggccagataaggcgttcacgccgcatctggcattttgctctcaatgcctgatgcgacgctggcgcgtcttatcatgcctacatatttttcatattttacatccggcaaccaccgtttaccccgtcaccacttcacccgccggtggcgtttccagcagttccagcatagtacgggcaatttcacgctcgcccatcactacttgattcgcaccacgttcggtgatatacgccacttcatcgtcataatgggcgcgggcaataatctcaatatccggatttttcgcgcgggcagatgncacaatctcacccgcttcataaccgttggggatcgtcaggatcagccattttgcacattccagatgcgccagttgcataatttcttcgttcgccgcattgcccaatactgcgcggaccccgcgctctcgcagctcatcaacacgggttcgtgacgtctcaatcaccaccagcggaatatcagaggcgagcaatttctcccccagcaggctgcctacacgaccgtaacccaccaatagcgcatggttgcaaatatccactgggatctgcttctcttcttcgattgcctcttccagcgtctgctcttccagcgtttcggtcttcgccagatatttctccagtagtgcgaacagtactgggttgagcataatcgacaggatcgcccctgccagtaccaggttttgtccggcctgcggcagtaaattcaatgccattcccagtcccgccaggataaacgcgaactcaccaatctgcgccaggctggcggcgatagttaatgccgtacgttgggagtgaccaaacagtcgcaccaggaaaaacgcggctaacgacttaccaaacagaataatcgccagcgtcgccagcactgccagcggttgctgaatcagaattaacggatcaaacaacatcccgacggagacaaaaaacagcaccgcaaacgcgtcgcgcaatggcagcgtatcgtgggcggcacggtgactcagttcagactcgttcagtaccatcccggcaaagaacgcaccgagtgcaaaggagacatcaaacagctctaccgcaccaaaggcaatccctaacgccagcgccagcaccgacagggtaaacagctcgcgagaaccggttgccgcgctgcgtgccataatccacggcaccagacggcgacctaccagcatcataatggcgataaacgcgatcactttgccgatggtgatccccatatcgactgcaagagtggcaaagcccacatcgccctgttccatcattcctgccactgcgggcagcaacaccagcgtcagaaccattaccaggtcttccacaatcaaccaaccgatggcgatttgcccacgctgactgtcaattaattgccgttcttcaagtgcgcgcagtaacaccacggtactggcggtggaaagacataaaccgaacacgataccggtcattaacgaccagcccagcacggcagagagcgccatacccagcagcgtcgccacggctatctgggcgatcgcaccgggaatggcgatggcctttaccgccatcaaatccttgagcgaaaagtgcagacccacgccaaacatcaacagaatgacgcccagttcagccagttccggcgcaagcttggtatcggcaacaaagcccggagtgaatggtcctgccagcacacccgctaacagatatcccaccagaggagaaatacgtagtttattggccagcatgccgaggataaaggcgagcacaaggccgccaacaatggtggtgataagcggggtggcgtgatgcattccgtctccttttcctggtggttattgtccatttttggccgggaaaaccaaaattacaggtnatagtttatgacaatttcattgatgatgttcatgaataattattgaattttgcagaaaaatggaattagctgcaaaaaagcacggatcggaaaacagaaggcggtttaacagaggaaaggcttatggcgactgtaaaacgatgcagccaaagtttgcctttggctgcaatgaaatcagtctttatgccggttatcaggcaggaatatggtcaacatccccaatagtggcaggaaagcacatattttatagactaactcgatgctggtgtgatcggcgataagccccagaactgccgctcccagacctcccatgccgaaagcaaaaccgaaaaagagtccagaaaccataccgatacgtcctggaagcagctcctgagcgtagaccagaatggcagagaatgccgaagcgaggataaatccaataatcaccgttaaaacccccgtccagtgcaggctggcgtagggtaaaatcagcgtaaacggcgcaacgccgaggatagagccccaaatcacatatttccgcccaattttatcccctacaggcccgccgatcaccgtacctgccgcaacggcaaacaggaaggcaaacagatgaagctgagcattctggatagataatccgaatttttgcatcagataaaaggtgtaatagctgctgatgctcgccatatagaaatatttcgagaaaatgaggattaacagaatgctgaccgccagtaccactttgttgcgcggcagtggattgataatcgtcgctttgggttttcctttattcattcggtgctgtgccgagtaccaacggctgatttgcgccaacaccacgatcgccagcagtgccgcaagcacaaaccaggcaacgttgcctttgccataaggcgcgataatcaccgccgccagcaagggtcccagggaactgccaaagttgccgccgacctgaaagatagattgtgccaggccatgccgcccgccggaagccatacgggccacgcgagaagattccggatgaaagaccgatgaaccggtaccgaccagcgccgccgccagcagaactgcgccaaaactgcccgccagcgcaagcagcaccagaccacttaaggtaaagcacatgccaattggcaacgaccacggcatcggatatttatcggtccagtagccgaccactggttgcagtagcgaagaggcgagctggaaggtgagggttatcatgccaatctgcataaatgtcagagaaaattctgactgaagcagaggataaatcgccagaatcagcgattggatcatgtcgttcagcagatgtgagaggctgatagcacctaaaataccaaacgatgttcgggccttggtcgttgacgcagccncgcccgccacaggctgggtttgttcactcattgccataggaaagtcactttttcagggttgcgatgttaagaatgatcttatttgtgattattacccgactaacatacctgtatgcgccgcctgaaggaagtctcaacgctgaatacagaatttctaatctggatgcagatttatcttcaccggacgcagacttgtctatgatgtcgcgtcatactatttttcaacacgttgaaatcaggtcagggagagaagtatgaaattattgcagcggggcgtggcgttagcactgttaaccacatttacactggcgagtgaagctgctctggcgtatgagcaggataaaacctacaaaattacagttctgcataccaatgatcatcatgggcatttttggcgcaatgaatatggcgaatatggtctggcggcgcaaaaaacgctggtggatggtatccgcaaagaggttgcggctgaaggcggtagcgtgctgctactttccggtggcgacattaacactggcgtgcccgagtctgacttacaggatgccgaacctgattttcgcggtatgaatctggtgggctatgacgcgatggcgatcggtaatcatgaatttgataacccgctcaccgtattacgccagcaggaaaagtgggcaaagttcccgttactttctgccaatatctaccagaaaagtaccggcgagcgcctgtttaaaccatgggcgctgtttaagcgtcaggatctgaaaattgccgttattggtctgacgacggatgacacagcgaagttaggcaatccagaaaacttcaccgatattgagttccgtaagcccgccgatgaagcgaagctggtgattcaggagctgcaacagacagaaaagccagacattattatcgcggcgacacatatggggcattacgataacggcgatcacggttctaacgcaccgggcgatgtggagatggcacgcgcgttgcctgccggatcgctggcgatgattgtcggcggtcactcgcaagatccagtctgtatggcagcggaaaataaaaagcaggtagattacgttccaggtacgccatgcaaaccggatcaacaaaacggcatctggattgtacaggcgcatgagtggggcaagtacgttggtcgggccgactttgagtttcgcaacggcgaaatgaaaatggttaactaccagctgattccggtgaacctgaagaagaaagtgacctgggaagacgggaaaagcgagcgcgtgctgtacacccctgaaatcgctgaaaaccagcaaatgatctcgctgttatcgccgttccagaacaaaggcaaagcgcagctggaagtgaaaataggcgaaaccaatggtcgtctggaaggcgatcgtgacaaagtgcgttttgtacagaccaatatggggcggttgattctggcagcacaaatggatcgcactggtgccgactttgcggtgatgagcggaggcggaattcgtgattctatcgaagcaggcgatatcagctataaaaacgtgctgaaagtgcagccattcggcaatgtggtggtgtatgccgacatgaccggtaaagaggtgattgattacctgaccgccgtcgcgcagatgaagccagattcaggtgcctacccgcaatttgccaacgttagctttgtggcgaaagacggcaaactgaacgaccttaaaatcaaaggcgaaccggtcgatccagcgaaaacttaccgtatggcgacattaaacttcaatgccaccggcggtgatggatatccgcgccttgataacaaaccgggctatgtgaataccggctttattgatgccgaagtgctgaaagcgtatatccagaaaagctcgccgctggatgtgagtgtttatgaaccgaaaggtgaggtgagctggcagtaatccgaaagtgccggatgttcgcatccggcacaatgcttaatcgcggcgggcgatatcagcaaatttggcatcgaggatcttcgccagatcgcctgccgccagttcgatatccagtccgcgcttgccgccggaaacataaatagtggcaaattcttgtgcgggggcgtcgataatcgttggcagacgttttttctgccccagtgggctaatccccccaaccaggtatcccgtcgaacgctgcgcgaccatcggatcggccatctcaactttcttggcacccagcgcttttgctacttttttaaggtccagttgacctgcgaccggcgtaacggccacggcaaggtgtttcatatcaccgttcactgcgaccagcagcgttttgtagacctgatccggattcaaacctaattttttgacgacttcatcgccaaaattggtttcagccggatcgtgctcgtaggtatggatttgaaacgaaatcttgtttttttcgagtantttaactgcgggtgtcatggtaattttcctgccttaaacaaaaaaacgaagcaagcatacgcctgatggcggtccaaaaaaaagagtcatcttgcctaagagtattggcaggatggtgagattgagcgacaatcgagttacaccgtcgcttaaagtgacggcataataataaaaaaatgaaattcctctttgacgggccaatagcgatattggccatttttttagcgcaacatttgcggtaaattcccttctccatacaggtgtagtgcaccgaccgcgaccacatatcgccccggcggcatggcgcgtaatttatcccgccaggcgagatttcgctgatgcatcagcacatcgtacagcgactgactgaacgtattgggcagcgttatttcattattttgcggcggcgcattcagccaccagctcatcatttgttgcagcaaccgtgcgttggtatgccagtgggtcagcgtatcgtccagcagcgccagtcctttgtcagggagctggagcaacatggcaatctggttttccgccccttccagttcaatcacgggtttatgttgttgcttcgccgcctgcaatagctgataatcgataccgtattctgcccgcagccccagtttttgtgcctgcgtcgcctgaagaaccatcgcgatttgccacagcggttgggtagaaaagagtgagggagaaatgcccatctcctggctaatgtgctgcagtttttggagttgctcctcgctaatgcgctcttccagcgcctcgcaggcaggcaaattagcaaaaggcgtatcgctggtggaaacatccgcctcgacgatcagcgcatcggcgtttttgagctttttgagcaaacgggtgggtaggggagccatatcgtggctacccatatgaatactgccaatcagatgaaaatggcgattgccgggaagagagatatcaatggcaggccaggtgtaatgattaccgcgcagcgcggcccaaagcgtttttacccggtacaacagatccatacgacctccctttgtgaaatatcatgctagcgcgcggggagggatggcgcaaatggagttggggacttgtttaatgtgtttgtatgattcagtatgttcttgtatcgctatttacagggaagcaacagttaaaaactatgaaacaggcaacaagaaaaccgacgacacccggagatattcttctctatgaatatctggaaccgctagatttgaaaatcaatgagttagcagagttgctgcatgttcatcgtaatagcgtcagtgcactgatcaataacaatcgtaaactcaccactgagatggcattccgtctggcgaaagtttttgataccacagtcgatttttggctaaacctccaggcggcagttgatctttgggaagttgaaaacaacatgcgcacccaggaagaattgggacggattgaaacagtggctgaatatttggcacgccgtgaagagcgtgcaaaaaaggtcgcgtaaggccaaaacatcgcttcatctcgtaggccggataaggcgttcacgccgcatccggcatccgagcaccattgcctgatgcgacgcttacgcgtcttatcaggcctacaaacctgtgcctgaaccgtaggccggataaggcgtttacgccgcatccggcagtcatgcgtcgatgccaaatgcgccaccctaaagcagcgcatccgcaatgacgtacttattccttcggtttaaa

SEQ ID NO: 139 - DNA, 8826 bp, Escherichia coli
  Strain O55:H7
  modified_base (1778)..(1778): a, c, g or t
  modified_base (5355)..(5355): a, c, g or t
  modified_base (8575)..(8575): a, c, g or t
aaccggttggcgttactcactacggtaatcgacgagagcgccattgccgctccggcaactaccgggttaagcagtgttccagtaaacggccacaaaataccggcggcgaccggaataccgatactgttgtagataaacgcgccgagcaggttctgcttcatgttgcgcagcgttgcgcgggaaatagcgagcgcatccgcaacgcccatcaggctatggcgcatcagggtaatcgccgcggtttcaatggcaacatcactgccgccgcccattgcaatgccgacatccgcctgggccagcgctggcgcatcgttaatgccgtcgcccaccattgccacctgacgtccttcactttgcaggcgtttaatcgcttcggctttaccgtccggcagcaccccggcgatcacctcatcaatccctgcttctttggcgatcgcattggcggtggttgggttatccccggtcaacatcaccagacgatatcccgctttatgcagacgttgcagcgccgccacgctatcactacgcaacggatcgcgtacagccagcagggctaccgctttcccgtcaaccgccagcagcacaggcgttgccccttgcgatgcctgagctgaaatatctgcttcaatcgctttagtatcaacttgctggtcatttaacagcgcctgattgcccagcaataacgcatgaccttcagcttcaccgctcacgcccagcccgcgcaatgtgcggaaaccgttgacctgcggcagctgcatatcgcttgctttatcgaggatcgcccgcgccagcggatggctggaaccttgttccagtgccgccgccagacgcagcgcctgcgcttcgtcaaaatcagcaaatgttttcactgcgacaacctgcggcttcccttcggtcagcgtcccggttttatcgaacactacggtatcgagtgtactggcgcgttgcagcgcgtcggcgtcccgcaccagcacgccaaactcagccgcccgcccgacgccggaaataatcgacatcggcgtcgccagccccagcgcacacggacaggcaataatcagcaccgtggtggcaatcaccagggtatagacaatctgcggtgccggaccaaagaaataccagattgccgcactgacaagcgcaataaccactactaccggcacaaatacggctgagattttatccgccagctgaccgatttctggcttgctgctctgggcctggcgcaccatacgaataatccttgatagcgtggtatggctgccaaccgcactggcgcgaaacagaacgctaccgtcctgtaccactgtcccggcatggacgctatcgccttcgcctttttgctgcgggataggttcgcccgtcagcatcgcttcatccagccatgcttcgccctgggtaatctcgccatctactggcacgcggtcgcccgtcgtcaggcgcagtagcatgcctggctgaacttccgccagcggcacgcttttttcaccttcgtcagtaaccaggcgcgccgtcggcggagttaaatcgagtaatttctccagcgcctttgaagaacgctgacgtgcgcgcgcttccagcatatgaccgagattaatcagaccgataatcatcgcactggcttcatagtaaagatgccgcgcttccatcgggaaccactgcggccacaggttgacgctcatcgaatagagccacgccacacccgtacccagcgccaccagcgtatccatcgtcgccgcaccgttcagcaggcttttccatgcactgcggtaaaaatggcngccggcgaaaaccatcactgccagggttatcaggccgataaccaaccacaggctgcggttgtcagcggtgaccatcatgttatcgccgatcatcccccagaccattaccgggatacccacagccagtgcaacaattgcctgccagcggaagcgcttcatcgtagcgacggcggtttcttgctggcgctcgcggcgtttcgcgtcatcttcaatcgcttccgcgccgtagcccgctttttccaccgcctgcactaaatcttgtggggaggcactgcccatcaccagcgcagtacgctccgccaggtttacccgtgcctgagtgacgcccggtacgctttgcagcgcattttgtacgcgggtgacacagctggcgcagctcatgccgctcagcagcaactgctggctgtcatcgtcatcggcggtcgctgccggaagcgcctcagaaaccgctgtcagtgcttccgacgggattgatgactccgccagcggtttagcctttgggtggcttacagatgcgtcataacccgcttgtttgatggtttcgatcagctgttctgcactggcagtcccggtaacgtgcgcttcagtgatagacacatccgcttgttccacatccgggcgctgttcgagactttctttcacgcgtttaacgcagtgaccgcaggacaggccgtccagggtcaggtcgatagtttgtgacataaaacactcctttaagacagttttgactggctgtgataaaggttaaaccttccagcaaggggaaggtcaagaaattaataacccaggcgagtaaaagtccgtaaagattaaaaaatcggctcgatttgcatcaggattagacatttatctctttgttttcctgtagttaagttgcgggtgctaagttaaatcaggatgcctgaaaatcggcaccggggtgaggaattacctcccgcatctataaaaaggagttaacaaaagatgttagatgcaaacaaattacagcaggcagtggatcaggcttacacccaatttcactcacttaacggcggacaaaatgccgattacattccctttctggcgaatgtgcctggtcaactggcagcagtggctatcgtgaccagcgatggcaacgtctatagtgcgggtgacagtgattaccgctttgcgctggaatccatctcgaaagtctgtacgttagcccttgcgttagaagatgtcggcccgcaggcggtacaggacaaaattggcgctgacccgaccggattgccctttaactcagttatcgccttagagttgcatggcggcaaaccgctgtcgccactggtaaatgctggcgctattgccaccaccagcctgattaacgctgaaaatgccgaacaacgctggcagcgaattttacatatccaacagcaactggctggtgagctggtagcgctctctgacgaagtcaaccagtcggaacaaacaaccaacttccataaccgggccattgcctggctgctgtactccgccggatatctctattgtgatgcaatggaagcctgtgacgtgtacacccgtcagtgctccacgctcatcaatactgttgaactggcaacgcttggcgcgacgctggcggcgggtggtgtgaatccgttgacgcataaacgcgttcttcaggccgacaacgtgccgtacattctggccgaaatgatgatggaagggctgtatggtcgctccggtgactgggcgtatcgtgttggtttaccgggcaaaagcggtgtaggtggcggtattctggcggtcgtccctggagtgatgggaattgccgcgttctcaccaccgctggacgaagaaggcaacagtgttcgcggtcaaaaaatggtggcatcggtcgctaagcaactcggctataacgtgtttaagggctgatcatgatgaacacggaaggtaataacggtaacaaacctctcggtctatggaacgtcgtttccatcggcattggggcaatggtgggggcggggatcttcgcgctgctggggcaggctgcgttgctaatggaagcctcgacctgggtcgcctttgcttttggcggtattgtggcgatgttttccggttatgcctatgcgcgtctgggggcgagctatcccagcaatggcggcattatcgacttctttcgtcgcggattaggcaacggcgtcttttcgctggcgctctcgttactgtacctgttgacgctggcggtgagcatcgccatggtcgcccgtgcttttggcgcttatgccgtgcagtttttgcatgaaggcagccaggaggagcaccttattttgctctacgcgttggggatcattgcggtgatgacgcttttcaactccttaagcaaccatgcggtagggcggctggaggtgatcctcgtcggcattaaaatgatgatcctgttattgctgattattgccggtgtctggtcgctgcaaccggcgcatatttccgtctctgcgccccccagctccggtgcgttcttctcctgtatcgggataaccttccttgcctatgcgggctttggcatgatggcgaacgcggcggataaagtgaaagatccgcaggtcattatgccacgggcgtttctggtggcaattggcgttaccacgttgctttatatctcgctggcgctggttttgcttagcgatgtatcggcattagagttagaaaaatatgccgataccgccgtagcgcaggctgcttctccgctgctcgggcatgtgggttatgtgatcgtcgtcatcggcgctttactggcgacggcttcagccatcaacgcgaacctgttcgccgtgtttaacatcatggacaacatgggcagcgaacgcgaactgccgaagctaatgaataaatccctgtggcggcagagtacctggggcaacatcattgtcgtggtgttgattatgctgatgacggcggcactaaatttaggctcactcgccagcgttgccagcgccacctttttgatttgctatctggcggtgtttgtggtggcgatccgcctgcgtcatgatattcacgcctcgttgccgattcttatcgtaggtacgttggtgatgttgttggtgatcgttggctttatctacagcctgtggtcccagggcagccgtgcgttgatatggattattggtgcaatcttactcagccttattgtggcaatggtcatgaagcgcaataaaaccgtataacacctctctgcgcgcagtactgcctgtactgcgcctttgtctttaattcaaattacctttcttattcctttaataaataagtcacaaaaaaatgatatatacgcgataaatctgtgatgctaatcacttattaccgtggattattcttaatgtgtatgatggtaatctaaaagtcgtagtgtattctaaataaataacgtataagctttttagctgcatttctttgcccatatcaatgatcgacaaaagagatgcacaagttattacccttcttaataaaacgagactggttataaaaaccagttaaaataatgacctggaaggaagtgacttatctatggcgcgattccagtttaaaaaccgtaaaaataatggacttatttttnttataagttttatggtgatgggagaagctgcaattgctgcaccgctgccacaatgggcgaatgccccagcggtaacgccagttgcccaattatctttacaggaaagtatattacgcgcctttgcgcgaaatcccggtgtcactcaacaggcggcgcagataggtattggcgaagcgcaaattgatgaagccaaaagtgcctggtatccgcacgttggattaaccggcaacgcggggccgtcccgacaaacggactccagcggcaggcttgataacaacgtttcgtatggcataaccctgacacaactggtgtatgactttggtaaaactaacaacgatatcaatctgcaaactgccgcccgtgacagctaccgctttaaattgatggcaaccttaaccgatgttgcagagaaaacggcgactgcctacatggaagtcagtcgttatcaggctttgtgcgatgcggctcaacgcaatattcactcgctggaaaacgtctacaacatggcggcattgcgcgctaacgcaggcctgaactcatcgtcggatgaattacaggcccagacgcgtattgccggaatgcgctcaacgctggagcaatatcaggcgcagatggcgagcgccaaagcgcaactggcggtgctcactggcgtacagccggaggcgatagccgcgccacctgctgaattagccgagcagccggtatcgctgaagaatattgattaccagtccatcccgctggtgctggcggcagaaaacttacgccagtcagcacagtacggcgtggaaaaagcgaaagcgcaatactggccaacgctcagtattcaggggggtaaaacgcgctaccagaccagcgaccgctcgtattgggatgatcagctacaactgaacgttaacgcgccgctgtatcagggcggcgcggtttctgcccaggtgcaacaggccgaagggcaacaaaaaatctctgcctcgcaggtcgaacaggcaaaactggatgtgctgcaacgagcgtctgtggcatatgcgaactggaccggagcacggggtcgtgaagaagccggtttagcgcaatccgaaagtgcgcacaaaacgcgagatgtgtaccaaaatgaatataaattgggtaaacgcagtctgaatgatctattaaccgtcgagcaagatgtctttcaggcgcaatcggctgaaataaatgccaattatgatggctgggtcgccgccgtaaattatgccgctgcggtgaataaccttattccattagcgggaattaaacagggcttatacaacgacttacccgacttgaaataatcctgccattattaatagtgggccgttgttaagtgattacctttgtcttatttagataaatggactcgctaaggatgtgcgccatttatcaggaatgccattatgagcctgattattgatgttatttcgcgtaaaacatccgtcaaacaaacgctgattaatcctggcgacgtcacggttgttatttatgagccttccgtggtgcaggttcatgctcaggcctctgccgttgcgcgttacgtccgtgaaggaaatgacctgctgatctatatgcaggacggcacggtgatccgctgcaacggttatttcctgcaagcggcgaatacagctgaacaatcggaactggtgtttgccgatggtcaacagctaacccatatcacctttgccgatactgctgcgggtggattagcccccgtagaactgactgcccagaccactgcgattgaaagcattgcgccatttcttgataccgttgctcagaccagcgccttcccgtggggttggctggcgggggcggcggtaggtggtggcgcgcttggtgcactgctggcaagcggtggcgatggcgactcgaaaacagaagtgattaataaccctacgccacctgctgagcctggcaacgccacaccatcatttttagttaccgataatcagggcgatcagcgcggcattctagccaccaatgacatcaccgatgacaccacgccaacctttagcggcagcgggcaggcgggggcgactattcagattaaagacagtaacggcaatactattgccagtactcaggtagacaacaacggtcactggagtgtctcgttacccacgcaaagtgcaggtgaacatacctggtcagtggtgcaaattgtcggcagtaccatcactgacgccggttcgataacgttaaccatcgacaatagtcaggccagcgtgcaggttgccaccaccgcaggcgataacattattaacgccagcgaacaggccgccgggtttacgctttctggcaccagtagccatctggcgcagggaacagaactcaccgttacgctaaacggcaaaacctacacgaccagcgtaggcgctaacggtgcctggagcgtgcaggtgccgaccgccgatgcacaggcgttaggcgaagggaatcaggcggtgctggtcagtgggaaagacgccacaggcaatacggtcaccggcgcgcagctactaacggtcgatacccaaccgccaacgcttgccatcaacaccatcgctcaggacaacattatcagtgctgcggaacataacgtcgcgctggtactgagcggcacgtcgaatgcagaagcggggcaaaccgtaacactgaccgtcaacgggaaaagccatacagcaaccgtcggtagcgacggaacctggcaagtgacgctgcctgccacggaagtccaggcactggcggagggtaattacgctgtcaatgccagtgtcagcgatcgggcagggaacaccaccagccacagcgcgaatttcacggtagacacctcagcacccgtggtcagtgttaataccgtggcgggcgacgatattcttaataatgccgagcaggccgtcgcgcagatcatctccggacaagtcagcggtgcttctccaggcgatacggtaacggtgaaattgggcactcatgtcctgacgggcatcgtgctggcagatggcagctggaatgtggcgctggacccagcggtaacccgcacgctggatcgcggagccaatacgattttcgtcaccgtgacagatgctgcaggaaatactggcgcggcgtctcgagcaatcacgctggtcggtgtttctccgttgatcaccattaacaccgtctccggcgatgacattatcagtggcgcagaaaaaggtgcgccactgacccttaccggtagcactcaacaggntgagacaggacaaaccgtcacagtaaccctggctggacagagttttaccactaccgtgcaggccgatggctcctggagtctgacggtacctgccgccgcgatgggaaatctgcctgacggcgcggtggcgattaccgcttctgtgacggatctcagcggcaataccggcaacacttcccgcaccattaccgtcgatagccaggccccggccttaagcattgatccactgaccgctgataacatcattaacg

SEQ ID NO: 140 - DNA, 3630 bp, Escherichia coli
  Strain O55:H7
caggatctgcccatcaccggcaccaccgacgctcagccggggcagacggtgaccgttacgttaaatgggcagacgtatcagggcgtcgtgcagccagacggcacctggagcgtgactgtgcccgccgccaacgtgggcgcactggctgacggcaacgctacggtcaccgccagcgtgaacgatgtcgccggtaatccgagcagcgtttcacgcgtggcgctggtggatgccacgccgccggtggtaaccattaatccggtggcgaccgataacgtcatcaacacgccggaacatgctcaggcgcaaatcatcagcggcacggttactggcgctcaggcgggcgatatcgtcaccgtgacgctgaataatgtggattacaccacggtggtggatggttccggcaactggagtctgggcgttccggcctcggtggtcagtgggctggcggacggcagttatcctgtcagcgtctcggtaaccgacaaagccggaaacacgggcagccagtcattgaccgtcacggtcaataccgccgcgccccttatcggcattaacagcattgcgggcgatgatgtgattaacgccagcgaaaaaggggccgatctccagattaccggcaccagcgatcagcctgttaacaccgccatcaccgtgacgctgaacgggcaaaattacaccaccacgaccgacgcctccggcaactggagcgtcaccgttccggcatcggcggttacagcattaggccaggccaactatacggtaacggcggcggtgaccagcgatatcggcaacagcgccaccgccagccataacgtgctggtcgacagcgcgctgcccggtgtgaccattaatccggtggcaaccgacgatattattaacgccgccgaagcgggcgtggcgcaaaccatcagcgggcaggtgactggcgcggaagatggcgacacggtaactattacgttgggtggtaatacttatacggcgacggtgggcagcaatctcacctggagcgtggacgttccagcggcagatattcaggcgctgggaaatggcgatttaacggttaatgcctcagtcaccaatcaaaacggcaacaccggcagcggcacgcgggatatcaccatcgacgccaatctgcccggcctgcgggtcgatacggtggcgggcgatgatgtggtcaatatcatcgagcacgggcaggcgctggtggtcaccggcagcagctcggggctggctgaaagcacgccgcttaccgttacgattaataatgtggaatacaccactgcggtgcaggccgatggtagctggagcgtgggcgtcacggcggcgcaggttagcgcctggcctgcggggacggttaatattgccgtttcaggggaaagtagcgccggaaactcggtgagcattacgcatccggtgacggtggatctcactccggcagcgatcaccatcaacaccatcgccacggacgatgtgattaacgccgcagaaaaaggcgctgatttaaccctttccggcaccaccactaacgtagaactcggtcaaaccgtcaccgtcacctttggcgggaaaaattacactgccagcgtagcgagcgatggtagctggactgccaccgtacccgccgccgatctggcgtcattacccgagggcagcgcctccgcactggccagcgtcagcaatatcaacggcaatagcgcctcggcggtgcacaactacagcgtcgacagcagcgcgccaaccatcattatcaataccgtcgccagcgacaatatcgtcaacgccagcgaagccgatgcgggcgtgacggtgagcggcagtaccaccgccgaagcggggcagattgttacgataacgcttaacagcccgaccgtgcagacctatcaggcaacggtgcaggcggacggcagctggagcatcaatattccggcggcagatcttgaggcattgaccgatggcagccacaccctgaccgccacggtcaatgacaaagcgggcaatccggcgagcaccacgcataatctggcggtggatctcaccgttccggtgctgaccatcaacaccattgcgggcgatgacattattaacgccaccgaacacgggcaggcgctggtgatttccggttccagcaccggcggagaagcgggggatgtcgtcaccgtcacgctaaacagtaaaacctacaccaccaccctggacgcctccggcaactggagcgtcggcgttccggcggcggatgtcacggcgcttggcagcggcccgcaaactgtcaccgccacggttaccgatgcggcaggcaacagcgacaatgagacacacacggtcaccgttaacctcaccgcaccaaccattgacatcaacaccatcgccaccgatgacataattaacgccagcgaaaaaggcgcggatctgcaaatttccggcaccagtaatcagccagcaggcaccacgattacgctggcgcttaacgggcaaaattacaccgcgacgacggacgctgcaggcaactggagcaccacggtgccagcttccgcagtaggtgcgctgggcgaagccagctacacggtgacggcgaacgtcaccgacagcgcaggcaacagcaattccgccagccataacgtgcaggtcaataccgcgctgcctggcgtcaccattaacccagttgcgaccgacgatattattaacgccgccgaatcgggcaatgcgcaaaccatcagcggccaggtgacgggtgcggcggcgggcgatacggttaccgtaacgcttggcgggaaaacttacaccgctaccgtgcaggggaatttaagctggagcgtggacgttccggcggcggatattcaggccatcggcaatggcaatctgacggttaacgcttcggtgaccaacggcgttggcaatactggcagcggttcgcgagatattactatcgacgccaacctgccaggtctgcgcgttgacaccgtggcgggcgatgatgtggtcaatagcatcgagcacgctcaggcgctggtgataactggtagcagcagcgggctggcggcgggcgcggcgctgacggtggtgattaacacggtcacttacgctgcaacagtattagccgatggcacatggagcgttggtgttccggcggcagacgtgagtaactggcctgcgggtacggtgaatatcacggtaagtggcactaacacagccggaacaacatccaccatcacccatccggtcaccgtcgatctggcggcggtggcgatttccattaacaccgtttccggcgacgatgtgattaacgccgccgaaaaaggggcagatttaaccctttccggcagcacctccggcgtggaagtggggcaaacggtcaccgttacctttggcgggaaaacctacaccgctaccgtagcgggcgatggtagctggacaaccaccgtacccgccgccgatctcagcgtgttacgcgacggcgacgccaccgtgcaggccagcgtcagcactattaacggcaacacggcttcggcaacccacgcctacagcgtcgatgccacggccccgacgcttgccattaacaccatcgccaccgacgatattctgaacgctgccgaggcgggcaatccgttaaccatcagcggtagcagcaccgcc

SEQ ID NO: 141 - DNA, 374 bp, Escherichia coli
  Strain O55:H7
ggggcagacggtaaccgtcacgcttaatggtgtgacttacagcggctccgtccaggcggacggcagctggagcgtcagcttaccgacggcggatctcagcaatctgaccgccagccagtacaccgttagtgcctcggtaagcgataaagcgggtaacccggcgtccgctaaccacgggctggcggtggatctcaccgtgccggtgctgaccatcaacaccgtctccggcgatgacattattaacgccgccgaacacggacaggcgctggtgatctccggctccagcactggcggcgaagcgggtgatgtcatcaccgtcacactaaacagtaaaacctacaccaccatgctggacgcttccggcaactggagcg

SEQ ID NO: 142 - DNA, 5843 bp, Escherichia coli
  Strain O55:H7
  modified_base (280)..(280): a, c, g or t
  modified_base (599)..(602): a, c, g or t
  modified_base (4052)..(4052): a, c, g or t
  modified_base (5122)..(5122): a, c, g or t
  modified_base (5842)..(5842): a, c, g or t
ggcggctgacgtcactgcgcttggcagcggcccgcaaactatcactgcggcaattaccgacgcggcaggcaacagcgatgacgccagccgcacggtcaccgtgaatctcgccgcgccaaccattggtatcaacaccatcgccaccgatgacgtgattaaagccacggaaaaaggcgcggacctgcaaatcaccggcaccagtaatcagcctgcgggcaccaccattacggtgacgctgaacgggcaaaattacaccgctactaccgatagcaacggcaantggagcgccacggtgccagcgtcagcggttagcgcattgggtgaagccaactacacggtaacggcaaacgtcactgatacggcaggcaacagtaattccgccagtcataatgtgctggtcaacagcgccttgcctgccgttaccattaacgcggtggcgactgacgatattattaacgctgccgaatcgggaaatgcgcaaaccatcagcgggcaggtgacgggcgcagcgcagggggatacggttaccgttacgctgggcggcaacacctacaccgccacggtgcagtctaatttaagctggagtgtggacgttccgnnnncggatattcaggcgctgggcaacggcgacctgacggttaatgcctcagtcaccaatggcgtcggcaacaccggcagcggctcgcgcgatatcacgatcgacgccaatctgcctggcctgcgggtcgataccgtggcgggcgatgatgttattaacagcattgagcacaatcaggcgctggtgatcaccggcagcagcagcggattaacggcgggaacggcgttaacggtcgagattaacaacgttacttatggcgcgacggtattagccgacggcacgtggagcctcggtgttccggcggtagacgtcagcaactggccagcgggtacggtgaatatcacggtaagcggcaccaacagtgccggaacaacctccaccattacccatccggttaccgtcgatctggctggggtcgccatcaccattaacactctctctggtgatgatgtgatcaacgccgtcgaaaaaggcgaaacgctggtcgtaagcggcagcaccagcggtgtcgaagccgggcagacggtgaccgtcacctttggcggcaaaaattacaccaccacagtggaagctaacggtagctggacggtgaatgtgccgcctgccgatctcgctgcgctaccggacggcgcgggcaacgtgcaggcgagtgtcagtaatattaacggcaacagcgcccaggccgatcgcgcgtatagcgttgatgccaccgcgccgcttgtgaccatcaacaccatcgccagcgacgatatccttaacgtgagcgaagctggcgcggggatcaccatcagcggcactaccacggcgcaggccgggcagacgctcaccgtcacgctcaataacaacacgtaccagaccaccgttctggcggatggcacctggagcgtgaatgttccggcagcggatttaagcggattaaccgccagcagttacaccgtgaccgccacggtgagcgacaaagcgggtaacccggcaagcgccgaccacgcgctggcggtagatatcactgcgccggatctcaccattaacaccgtcgcgggcgatgacattatcaacgccatcgaacatggtcaggcgttggtggtcagcggcaccagtacgggcgcggcggcgggtgatgtggtaaccgtcacgctgaacggtaaaaactacaccaccacgctggatgcctccggtaactggagcgtgggcattccggcggcggatgtcacggcgctggcgaccggtagccagaccatcaccgccagcctgagcgatcgcgcgggcaacagcgacagcacgactcacgatgtgaccgttgatcttagcggcccgacgctgaccattaacaccgtctccggcgatgacattattaataatgcggagaaaacccaggatctgaccatcagcggcggctccagcggtctggcgactggcaccacggtcaccgtgatgttgaacggcctggcgtacagcgccaccaccgatagttccggcaactggagcgttaccgtgcctgcttcggcggtcggcgcactgggtgaggcggtgtatcagattagcgccagcgccaccgacagcgcgggcaacagcggcagcaccacccatacggtgaatgtcgaatcgctcctgcctggggtgatcattaataccgtggcgggcgatgacattatcaacgccgctgaaatcgttgtggcgcagaccatcagcggtcaggtcacgggaacggcggttgccgggaatacggtgattgtcaccattggcggcaatcaatataacgccaccgtgcagtcagatttaagctggagcgtcagcgtaccggcgaacgttttgcaggcgctgggtaacggtgaactgaccatcagcgcctcgttgaccaattccgcaaataataccggcaccgcgacgcacgatatcgtgatagatgccaacctgccaggtctgcgcgtcgataccgtggcaggcgatgatgtgattaacagcatcgagcacactcaggcgttggtgatcaccggtagcagtagcggactggcggcgggcgcggcgttgacggtggttatcaatagcgtcacctacggcgcaacggttttagcggatggtagctggagcgttggtgttccggtggcagatgtcacaaactggcctgcggggacggtcaatattgccgtctctggcaccaacaccgccggaaccacaaccagcattagccatccggtcacggtcgatctcgctgccgtggcgatcaccatcaacaccctttccactgacgatgtgattaacgccgccgagaaaggctctgatttgcagctctccggcaccacctccggcgtggaagcggggcaaaccatcaccgttatcttcggcggcaaaagctacaccaccacggttgccgcggataatacctgggggctgacgatccctgccgccgatgttgcaaccttgccagacggcgcagcaaacgtccaggccagcgtcagcaatgtcgcagggaacagcacccaggcaacgcatgcttacagcgttgatgccactgcgccctccgttaccatcaacaccatcgccacggacgatattcttaacgccgccgaagcgggatcggcgctgaccatcagcggcaccagcacggcggaagccgggcagacggtgaccgtaacgctaaacggcgttaattacagcggcaatgtgcaggcagacgggagctggagcgtcagcgtaccaaccggcgatttagctagccttaccgccagctcgtataccgttaacgcctcggtcagcgacaaagccagaaatccggcttcggcaacgcataatctgacggtggaccttgccgctccggtcgtcaccatcaacacggtggcgggcgatgacatcattaacgccacggaacacggacaggcgcagatcatcagcggctcggcaacgggcgcgactaccggtaatacggtttccgtgacgattggcacgaccacctataccaccgtgctggacgccaacggcaactggagcatcggcgtgcctgccagcgtgatttccgcgctggcgcagggcgatgtgaccattaccgctacggtcaccgactccgcaggcaacagcggcacggcctcgcacactgtcaccgtggcgctcggcgctccggtgctcgccattaacaccattgccgtcgatgacatcatcaacgccacggagaaaggcgcggatctggcgattaccggcaccagcaaccagcctgcgggcacgcagattaccgttacgctcaacgggcaaaattacaccaccactgccgatgcttccggtaactggagcgtgaccgttccggcgtcacgggtgagcgccctcggtgaagccacctacacggtgaccgcagccgccactgacgccgatggcaacagcggttccgccagccataacgtacaggttaataccgcgctgccgggcgtcaccattaacgtggtggcaacggacgatattattaacnccgccgaagcgggcgtggaacagaccatcagcgggcaggtgacgggtgcggcggcaggcgacacggtgaccgtcacgctcggcggggcgacttacactgccacggtgcaggcgaatttaagctggagcgtcgatgttccggcctccgcgctacaggagttgggcaacggcgaactgaccatttcggcttcggtgacgaacagcgtaggcaatactggtaacggcacgcgcgaaatcaccatagacgcgaatctccccggtctgcgggtcgacaccgtggcgggcgatgatgtggttaatattatcgagcacgggcaggcgctggtgattaccggcagcagctccggtctggcggcgggcagcaacgtcacgctgaccattaacgggcaaacctatgttgcggcggtgctggcggatggcacctggagcgtcggcgttccggcggtggatgtcagcgcctggcctgcgggatcggtgacgattgcggcgagcggtagcacctctgccggaaatccggtaagcgttacgcatccggtgacggtcgatctctcggcggtggcggtgagcatcaacgccattaccgccgatgatgtgatcaacgctgccgaaaaaggcgcggcgttaacgctctccggcagcacctctggcgtcgaagccggacaaacggttaccgtcacctttggcggcaaaacttacagcgccacggtggctgcgaatggttcctggagcacctcggttccggcggcagatatggcggccctgcgtgatggcgatgccagcgcacaggccagcgtcagcaatgttaacggcaacagcgccaccacgacccacgcttacagcgttgatgccagcgcgccaacggtgaccattaataccattgcgggcgatgatattcttaacgccgccgaagccggagcggctctgaccatcaccggcagcagcacggcggaagcggggcagacggtgaccgtcacgctcaatggcacaaactacaccggcaccgtacagacggacggcagctggagcgtcagcgtaccgtcagccgacttaagcaccctgaccgccagcaantacaccgtgaacgcggcggtgagcgacaaagccggaaacccggcctcggttaatcacaacctgacggtggatacgtccgttccggtcgtcaccatcaacacggtggcaggcgatgatgtgatcaacgcgacggaacacgcccaggcgcagatcatcagcggctccgccactggagcggcaaccggtagcaccgtgacggtgactatcggcacaaatacctttaccacggtgctggatgccagcggcaactggagcgtcggcgttccggcaagcgtcgtctcggcactggcgaatggcacggtgaccatcaatgccagcgtcaccgatgccggaggaaacagcggcagcgctacccatcaggtgacggtcaataccgggctgccgaccattacctttaacgccatcagcggcgataacatcctgaacgccgatgaaaaaggccagccgttgaccatcagcggcggcagtacggggctggcgacgggcgcgcaggtcaccgtcacgctcaacggtcacaactacagcgccaccaccgacgcatcgggcaactggaccttaaccgtgccggtgagcgatctggcggcattaggtcaggccaactatacggtcagcgccagcgccaccagtgcagcaggcaacaccgccagcagccagacgaatttactggtcgacagcggcctgccggacgtcaccatcaacaccgtggcaggcgacgatatna

SEQ ID NO: 143 - DNA, 2400 bp, Escherichia coli
  Strain O55:H7
  modified_base (46)..(49): a, c, g or t
  modified_base (927)..(927): a, c, g or t
  modified_base (1244)..(1244): a, c, g or t
  modified_base (2397)..(2397): a, c, g or t
agcgggggccgatcaaaccatcagcggggtggtgactcgcgccgcnnnnggcgatacggtcaccgtgacgctgggcgggaacacttacaccgctacggtacagagcaacttaagctggagcgtcagcgttccgacagccgatctccaggcgttgggcaatggtgatttgaccattaccgcctcggtcaccaacgctaatggcaacaccgggagcggcacgcgggatatcaccattgatgccaacctgccggggctgcgcgtagataccgtggcgggcgatgatatcgtcaacagcatcgagcacgggcaggcgctggtgatcaccggcggcagtagcggcctgaatgcaggtgctgtgctgacggttaccatcaacagtgtggcgtattccgccacggtgcaggcggacggaagctggagcgttggcattccggcggcaaacgtcagcgcctggcctgcggggccgttaacctttgaggtagacgggcaaagcagcgccaataacccagtccgcgtcagccatccgttcaccgtcgatttaacggcggtggcaatcagcatcaacaccgttgccagcgacgacgtgattaacgccgcagaaaaaggcaccaatctgactctttccggcagtaccagcgggattgagagcgggcaaaccgtcaccgtcacttttggcggtaaaacctacactgcaagcgtcgccgccaacgggagctggagtgtaaacgttccggcggcagatctggcaactctgccagagggcgcggcgaatgtgcaggccagcgttagcagcgcgagcggtaacagtgcctcggcgacccatgcgtatagcgttgacgccagcgcgccgacgctcaccattaacaccatcgccagcgacgatatccttaacgccgcagaagccggaagcccgctcaccatcagcgncaccagcaccgccgaaaccgggcagacggtgaccgtcacccttaacggcgcaacctacaccggcactgtgcaggcggacggtagctggagcgtcagcgttcccacttcagccctgggcgcgctcaacgcaagcaattacaccgtcagcgccacggtcaatgacaaagcgggcaaccccggcagcgccagccataatctggcggtagacaccaccgcgccggttctcaccattaacaccgtggcgggcgatgacatcatcaacgatgccgaacatgcgcaggcgctggtgatctccggcaccagtagcggcggggaancgggcgatgtggtgagcgttgtgctcaacggcaaaacctacaccaccaccctggatgcctccggcaactggagcgttggcgttccggcggcagatgttacggcgctgggtagcggtgcgcagaccatcaccgccagcgtcagcgatcgggcaggcaacagcgacgacgccagccgcaccgtgaccgtcagcctcagcgcgccagtgattagcatcaacaccatcgcgggcgatgatgtgatcaacgcgacggaaaaaggatctgatctggcgctttctggcaccagcgatcagcctgcgggtacggcgatcaccgtcaccctgaacggacaaaactacagcgccaccacggatgcctccggcaactggagtgttaccgtgcctgcctcggcggtcagtgcgctgggcgaagcgacctacagcgtgacggcgagcgtcaccaatgctcagggtaacagcagcaccgccagccataacgtgcaggttaataccgcgctgccgggcatcaccattaatccggtggcgacggacgatattatcaacgcttcagaggcaggcagcgcgcaaactatcagcggccaggtaaccggtgcggcggcgggcagcaccgtcaccgttgaactgggcggtaaaacttacaccgccaccgtccaggctgatttaagctggaatgtgagcgtacctgccgccgactggcaggctctgggtaacggtgagttaacggttaatgcctcggtgaccaacgccgttggcaacaccggtagcggcacgcgcgatatcaccatcgatgccagtctgcctggcctgcgggtggataccgtcgcgggtgatgatgtggtcaatatcatcgaacacgctcaggcgcaggtgatcaccggcagcagctccggctttgccgcaggcacggcgttgacggtggtgattaacaaccaaacttacgccgccacggtgttggcgaacggtagctggagcgtcggcgttcctgcgacggatgtcagtaactggcctgcgggaacgctgaatattaccgttagcggggcgaacagtgccggaacgcaaaccagcattacccatccgctgactgttgatctcaccgccgtcgccatcagcatgaacagcatcaccagcgatgatgcgattaacgccgccgaaanagg

SEQ ID NO: 144 - DNA, 3996 bp, Escherichia coli
  Strain O55:H7
  modified_base (3)..(4): a, c, g or t
  modified_base (626)..(626): a, c, g or t
  modified_base (906)..(906): a, c, g or t
  modified_base (1018)..(1018): a, c, g or t
  modified_base (1070)..(1070): a, c, g or t
  modified_base (1106)..(1106): a, c, g or t
  modified_base (1176)..(1176): a, c, g or t
  modified_base (1186)..(1186): a, c, g or t
  modified_base (1827)..(1830): a, c, g or t
  modified_base (3992)..(3993): a, c, g or t
cgnnaacgctctccggcagcacgtccggcgtcgaagcggggcaaaccgtcaccgtcacctttggcggcaaaacctacaccaccacggtggcggcaaacggtagctggagcaccaccgttccggcggcggatttggcggccctgcgtgatggcgatgccagcgcccaggtgcgggtgactaacgtcaacggcaacagcgccacagcaacgcacgaatacagcgtcgatagcgccgcgccaacggtgaccatcaacaccattgccagcgataacatcatcaacgccagcgaagcggcggcgggcgtaacggtgtccggcaccagcaccgcgcaaaccgggcagacgctcaccgtcacgcttaacggcactaactaccagaccacggtgcagacagacggcagctggagtttaacgctgcccgccagcgacttaaccgcacttgctaataacggctacaccctgaccgccacggtcagcgatctggcgggtaaccctggcagcgccagcaaaggcgtgaccgtcgataccactgcgccggtgatcagttttaacaccgtggcgggcgatgatgtgattaacaacgtcgaacacattcaggcgcagattatcagcggcaccgccacgggngcggtggcgggcgaccgcctggtggtgaccatcgccgggcagcagtatgtcaccagcaccgatgccagcggcaactggagcgtcggcgtgcctgccagcgtgatttccggccttgcggatggcacggtgaccatcagcgccaccattaccgatagcgcaggcaacagcagcacgcagacgcacaacgtacaggtgaacacggcggcagtgtcgctctcggtcagcactatcagcggcgataaccttattaacgccgccgaagcgggcagtgcgctgaccntgagcggcactggcactaatttcgcgacaggtacagtggtgaccgtgttgcttaacggcaaaggctacagcgccaccattcagagcaacgggagctggagcgtgaacgtgcntgcggcggaagttgcggcactcagtgatggcaccagctacacggttagcgcntccgctcaggacagtgccggaaacagcgccacggcntcgcgcagcgtggcggtggatctcaccgcgccggttatcagcattaacaccgtttcgacggacgaccgcntcaacgccgncgaacagcagcagccgttaacccttaacggctcgaccagcgcggaagtggggcagacggtcaccgtcacctttggcggcaaaacctataccgccacggttgccgccaatggtacctgggcgctgaacgtgcctgcggtggatctggccgcgctcgggcagggcgcgcagaccattaccgccagcgtgaacgatcgcgccggtaaccccggacaggccacgcacgccctgaccgtcgataccgttgcgccaacggtcaccatcgccacggtggcgggtgacgatattatcaacaacgccgagcagcttgccgggcagaccattagcggcaccaccaccgccgaagtgggccagacggtgaccgttacctttaacgggcaaacctggagcgcaacggttggcagcggcggaagctggtcggtgtttattccggcgcagcagtttgccggattaagcgacggcagctacaccattagcgcgacggttagcgatcaggccggaaaccccggcagcgccagccgtggcgtgacgctgaacggcgatgtacctactgtcaccatcaacacctttgcgggcgacgatgtggtgaatgcagcggaacacggctcatcgctggtgatcagcggcaccaccaccgcgcccnnnnggcagacgctgaccctgaccttaaacggcaaaacctacaccaccacggtgcagacgggcggtagctggagctacaccctcggcagcgccgatgtcaccgcgctggcggacggcaacgcctacgtgattaacgcctcggtgagcaatgccattggcaacaccggtagcagtaatcacaccattaccgtcgatctcagcgctccggcgatgggcattaatatcgattccctgcaagccgacactggccttagcgccagcgactttatcaccagcgtcagtccggtagtggtcaacggctcgctcaccgccgcgcttgccagtaacgagacggcgcaaataagtatcgacggcggcacaacctggaccacgcttaccgttaccggcacgacctggcgctataacgacagccgcacgctgaccgatggcaactatctctatcaggtgcgggtgattgacgcagcgggcaacgttggcgcgaccgacagccagaatgtggtgatcgacactaccgcgccagatcccgcggtgaaaaccatcgccatcagcgcgatcaccaccgatatgggcttgatcactaacgattttgtcaccagcgacacgacgcttgcggtgagcggcacgctgggggcgacgctttctgccggtgagttcgcgcaaatcagcattgatggcggcaccacctggcagaatctttcggtaagcggtttgacctggagctatcttgacgggcgtacgctgaccgatggcaactacaactaccaggtgcgggtgatcgacactgccggaaatatcggcgcgaccgccagccagattgtcactgtggacactaccgcgccgctggcgagcaaaaccatcgccattgcgggcatcagcgatgacaccgggttaagcagcagcgattttgttactcgcgacaccacgctgaccgtgcgcggcacgctcggcgcggcgcttgccgccgatgaacgggcgcaaatcagcctcgacggcggcgtcacctggactacgttaaccgtcgttggcaccagctggagctatgccgatggtcgcacgcttactgacggcacctggaactacacggtgcgggtggtggatctggcggggaacgttgggcagaccgcaacgcaaaacgtggtggtcgacaccaccagcccggaagcggcgaaaagtatcaccattaccggtatcagcgatgacaccggaaccagcagcagcgattttattaccagcgacaccacgcttaccgtgcgcggcgtattgggcgcggcgctcggcgctaatgagttcgcgcaaatcagtaccgacaacggcgcaacctgggtgaacgtgaccgtcgccgcagacagcctgaactggagttacgttgacggacgaaccctcaccaacggcaccaccacctggcaggtgcgggtggtcgatctggcgggcaacgttggcgcaacgagcagccagtcggcgctgatcgataccgttaacccggcgcaggtgctcaccatcgccagcatcagcaccgacacggggagttcggcaactgactttatcaccagcgacaccatgctcacgctgaccggttcgctgggggcggggcttgccagcggcgaagtggcgcagattagccttgatagcggcgcgacctggacaacgctcaccaccaacggtacacagtggacttacaccgacagccgcacgctgaccgacggcagctacgtttatcaggtgcgggtgctggatctggcggggaacaccggcccggtggtgtcgaaaacggtggtggtcgatacgattaaccccaccgccacaccaacgattgtgtcgtataccgatgatgtcgggcagcggcaggggacattaagcagttcgcaggccaccgacgacactacgccgctgctgaacggtgtactttccgcgccgcttgccagcggtgaagtggtttacctctaccgtaacgggctgctgttaggggcggtgacgatggtcggcgctctgaactggacctacagcgacagcgggctggtgagcggtgcctatacctacagcgcgcgagtggtggatttggcggggaatatcacctcctccagtgattttgtcctgacggtcgatacctctattccgaccacgctggcgcaaatcaccagccagaccacgcgcgatactacgccgatnntta

SEQ ID NO: 145 - DNA, 8066 bp, Escherichia coli
  Strain O55:H7
  modified_base (4181)..(4181): a, c, g or t
  modified_base (5913)..(5914): a, c, g or t
  modified_base (7934)..(7935): a, c, g or t
tcaccgccgcgcttgccagtgggcagtatgttgaagtggtgatcaacggcaaaacctacacctctgaaccgggcggcgcggtagtggtcgatccggcgcacaacacctggtatgtacagttgccggataccgatgcgctgacagtttccgcgaccgcctataccgttactgcgcaggtaaaaagttcggcgggtaacggcaataacgccaatattagcaacggcacggtgacggttaacgcggcgattgattacacaccgacctggactaccgccagcaaaaccaccgcctgggggctgacctacggcctcgactcgcacgggatgtggacggtgctggcaaaccagcaggtaatgcaatcgactgacccactcacctggtcgaagaccgcgctgacgctgtatcagagcggcaacaactacgccaccagctccattgccgattacgaccgtaacggcacgggcgatctgtttatcacccgtgatgactacggtacgggctatattaacggctttaccaataacggcgatggcaccttttccagcgctattcaggtcaccgtcggcaccctgacgtggtacggctcgattgtggcatttgataaagagggcgacggctatctcgacttctggattggtgacgctggcgggccggactccaacaccttcctgtggaacaacgcaggcacgctggtaggcaactccaccacgtcgaacagcggcggtagcgccacggtgggcggggcggtgacggggtatctttcgctcaacgaaggttctggcgtcgatctgaacaatgacggcaggatcgacctggttcagcacacctataacctgaacaactattacacgctgtcttcgctcatcaaccaggggaatgggacgtttgtctgggggcagaacaccaccaataccttcctgagcggggcgggcagtggcgctatgagcagcagcgtttccatgacctgggccgatttcgatggtgacggcgatatggatctcttcctgcccgccagccagggaagagctaactacggctcgctgttattcaacaccaacggcgtactgggtagcccggtggcggtgggcgcaacggcaaccacctacgccagccagtttagcctggcggtggactggaaccacgacggcctgatggatatcgcccgtatcgcccagaccgggcagtcgtatctttatactaacgtcagcaacgccagcaactggacgcaatcggccctcggcggcagccagagcggtaccaccagcggcgtggcggcaatggactacgactgggacggcgcggtggatgtgctggtgtccaaacagtcgggcagcgtgttcctgatccgcaacaccaacacggtgagctacggcacttcgctacacctgcgcatcaccgatcccaacggcattaacgtctattacggcaataccgtgaagctgtacaactcggcgggagtgctggtcgccacgcaaatcatcaacccgcagtcgggtatgggggttaacgacacctcggcgctggtcaacttctacgggctgaatgccggagaaacctacaacgcggtgctgatcaaatccaccggcaccaccgccagcaatatcgaccagacggtcaacaccagctggggcggtttacaggccaccgatgccactcacgcttacgatctcagcgctgaagcgggtaccgcgagcaacaacggcaagttcgtcggcaccggctataacgacaccttcttcgccaccgcaggcaccgacacttacgacggttccggcggctgggtgtacagctccggcaccggaacgtggctggcgaacggcgggatggacgtggttgatttccggctttcgacggtgggcgtgacggctaacttaagcagcactgccgcgcaggccaccggttttaacacctcgacatttaccaatatcgaaggcatttccggctcgaattttaacgacattctgaccggcagcagcggcgataaccaactggaagggcgcggcggcaacgacacgctcaacatcggcaacggcggccacgacaccttgctctataaactgctcaacgccagcgacgccactggcggcaacggctcagacgtggtgaatggctttacggtagggacatgggaaggcaccgccgacaccgatcgcattgatattcgtgaactgttacagggcagcggctacaccggcaacggcaaagccagctacgtcaacggcgtggcaacgctggatgcgcaggccggaaacatcggtgactttgtcaaagtcacccagagcggcagcgacaccatcgtgcagatcgaccgcgacggcacgggcggcacttttgcgacaactaacgtggtcacgctgacgggcgtgcacaccgacctcgccaccttgctggcgaatcatcagttgatggtggtgtagataatgaaaaaaaatgcccagtccgtggaagcctggctggaggcgatgatcgccgtggcgcgctattatcggctcgatttttctcaggagaatgtgcgcgcgaccgtcaactgggagcgcgacagtaagcgggaggagttactcaccgacatggcgcggcagttagggatggggttgcggttggtggagttttccgccgattcgcttaacccctggcgtctgccgctgatcgcggtgtttgataatcagcagattggcgtgatcacccgtcgcgacaatcatgacaatatcagcgttcagttcagcggtgacgaagggctggaaactacacttaacgtcgcggatattgaagataaaatcgtcgaactggcgctgctgcgccctctcagcgccatccctgacgcgcgggtggatgactatattcgcccgtatcaggcgaactggttctggagtctttcgctaaaagactggcggcgctacggcgatattatgctggcgtcactggtggcgaacgtgctggcgctggcggcgatgattttctcgatgcaggtttacgatcgggtggttccggcgcaatcgtacccgacgctatgggtgcttttcgccggggtgatgatggcgatcctgtttgagttctgtatgcgcatggtgcgtacgcatctatctgatgtgatcggaaagcgggcagacctgcgtatttcggatcgcgtttttggtcatgcgctacggctgaaaaacaacgtgcgatcgaaatccaccggatcgtttatctcgcagatccgcgaactggaatcagtgcgggagcttattacgtccaccaccatcggcgcggtggcggacctgccattcttcctgctgtttgtctttattttgtggatgatcggcggctggctggtgctggtggttttgctggcgctgccgttgctggtgatccccggcctgctggtgcaacgcccgctggcgcggctggcgaacgaaggaatgcgcgagtcagcggtacgcaacgctacgctggtggaagccgtgcagtcgattgaagatattaaactgctgcgcgccgaacagcgttttcagaatcagtggaaccacaccaacgacgtggcctcgtccatcagcatgaagcaacgttttctcaccgggctgctgctcacctggacccaggaagtgcagtccatcgtctacgtggtggtgctgctggtgggctgctttatggtgatgaacggcgacatgaccaccggcgcgctggtcgggacgacgatcctggcttcgcgcaccattgcgccgctgtcgcagatatccggcgtgctctcgcgctggcagcaggcgaaagtagcacgtaacggccttgatgaactgatgaagcgcccggtggatcagccggaacacggcaaactggtgcataaagcggtgctgcacggtaattatcagttcagcaacgcggtgttttattacgacgaagaagagaagattgccgatgtagcgattggcaaactcaacattcaggctggtgagaaaatcgccattctcgggcgcaacggcgcgggtaaatcgacgctactgcaaatgctcgccggaatgcgtatcgcccagcaggggcaggtgttgctggataacatcagtatcgggcagcttgatccggcagatctgcggcgagacatggggctactcagccagaccgggcgactgttctttggttcgctgcgggaaaacctcaccatggggatgccggaagccagcgatgaagatatcgaacgcgcgttaacnctcagcggagcgctgccctttgtgcagaagcagaaaaacggcctcaactacatgattcaggaagggggatttggcctctctggtggtcagcggcaaacgctgctgctggcgcggctactcatctctcagctgaatatcgtcctgctcgacgaacccagcgcctcactggacgaaatggcagaagcgtatttaatcgaacaactgaaacagtggattgggcatcgcacgctgattatcgccactcaccgcacggcgatgctgcaactggtggataggataatcgtgatggatcaggggcggattgtgatggacggcgcgaaagaggccattttgcgtgaacagggcgagctcacagcgcgacgggtggtgttgcaggagaagaataaggggtctgcggcatgaacggacaactgcaatataaccgtggtctgactgaaccccgcctgccgcgttcggcgctggcggtacgcgttaccgctgtgatgctgctctgttttctcggctgggcgtggtacttccagcttgatgaagtcaccaccggcagcggcacggtagaaccttccgggcgcgaacaggtggtgcagtcgctggaaggcggaattctgtatcatctcgacgtgaaagttggcgatattgtcgaacagggccagccgctggcgcagcttaaccgcaccaaaacggaatccgacgtccaggaagcgatgtcgcggctgtacgcggcgctggcaacctcggcgcggctgcgggcggaagtgagcaataaaccgctggtcttccctgacgaactgaataaattccccgaacttatcgagtcggaaacggcgttgtacaacactcgccgcgacgggttgaacaaagccaccaccgggctgacgcaggggattagcctggtcaatcgcgaactggcgatgacccagccgctggtaaaacagggggcagcgagcagcgtcgaagtactgcgcctgcaacgccaggccaatgaactggaaaacaaactcagcgacgtgcgcacgcaatactacgttcaggcgcgcgaagagttagcaaaagccaatgcggaagtggaaacccagcgttcggtgatccgtggacgggaagactctctcaccaggctcaactttaccgcgccggtgcgaggcattgttcaggatattgatgtcaccacggttggcggcgtcatcgcccccggtggtaaactgatgaccatcgtgccgctggatgagcaactgctgattgaggcaaaaatctccccgcgcgatgtggcgtttatccacccggggcaaaaatcgctggtgaaaataactgcctacgattactccatctacggcggcctgccgggagaagtggcggtgatatcaccagacaccgtgcaggatgaagtgcggcgcgatgtttattactatcgggtgtacattcgcactttcagcaaccatctggaaaacaaaagcaaacagcagtttccgatattccccggtatggtggcgacggtcgatatccgcaccggcaaaaaaagcgtgctggattatctgttgaaaccctttaacaaagcacaggaggcgttgcgcgaacgatgaacattagcgatgtagcaaaaattaccggcctgaccagcaaagccattcgcttctatgaagagaaggggctggtgacgccgccgatgcgcagcgaaaatggttatcgaacctacacgcagcagcatctcaacgaattgaccttactgcgccaggcgcgnnaggtgggctttaacctggaagagagcggcgagctggtgaatctgtttaacgacccgcagcgtcacagtgccgacgtcaaacgtcgcacgctggagaaggtggcggagattgaacggcatatcgaagaactgcaatctatgcgcaaccagctactggcgctggcgaatgcctgccccggtgatgacagcgccgactgcccgattatcgaaaatctctccggctgctgtcatcatcgggcggggtgaaaatcagtgaatccccgtttgcaccgaaagaatatgctgcaaactttctaccataatgcgccccgactgaaataagccttcctggatttcgttgttaacattcacagcgtgaaccagggaggctaataatactacttgcaagaaggcaaaaataaacgcaccgataatcataatatgcgtcaggggtattttcctttgctccttcattttaaataacccacaaactggccttctttcattaaggcgacttttcctgtgtgatgataaacaatgacgttatatagacctgactgataaacagtggcatctttattgtcttcatcaattgcacataatgaatcattgagataagcaaagtttttactgctcattctaaaggtcatgccaaatcctttataaatggctttctttgccgcctgggcgtgttgtgcggcttctgcatttttaaatgcctgtgcctcggatgcacttaaaatagccgcctgacgctgctgttctgcgaggtaacaggtgtcatgactgacgccctgcgcctggcaatctgcgatgcgggaagtgggtgaactacagccagccagtaatataaccgccagcagggaaaacgatttaatggagctattcatcattgttaaccttaaataatgtacaaattaatgaagaggtgaacccggcaagcttccttgctcttatttatattgaggattgaaatattagaacgaatatcccacgccgacacctgcgccgaaatcagattgtgtatccgcagaaataccggctttaagtaccgtatgcgttccggcattaaatgatgttccgacagacaccgcagattcaccgttgaaggttcccgctcccgctgacaccatcatcacgtcaccggttttaacctgtggttgtgaggcgatagcgatggcagatgcagttcccgcattggcttctttacgattgtcatcaacttcgttttttagcgaactgaaatggttattgagcgtgttaatttgctggctgttatctgcaacccgtttttgggtgttggttaactgttggtgcgtttgggttacgtcttgtgacaggctgtcaatttgttcatgtgcctgggcagactcctgcgccagactttgcatttgtttatcgtattgagtcctttcattttgctgttgtactgccacatcggttgtcagcgcattcattttctgcccttgttcagtggcggtgcgctgattagcctcattttgagccgccagtctggcattaatcatttcctgataatgcgcggtattttgcgtatctccagtcgcggcgagcgttttttgtgtggctacgatctgcgcctgttgctctgtaatttgcgtttgctgggcgtcagttaccgcagactgtcgggcgttgatcatgctctgataacgggcagttgtctgtacatcacctgtagcggcaacggttttttgtcctgcgtcaggatctgtctggacagtgggagtctgagtggtatcaggtgtttcagaagggatgtagtgatgttcagtcaaataggtatacgcagcggggctgttgtctgtgcgttctaaaaagcgggtaatcttctgctcaatctccgattgcgacatgccagagttaatggctgaaagctctgttgccgccgcttcaatggtatcaccagctaaaacaacagggctggatgttgctgaaattatgagtgccagtaaagctacgtttacagttttcattcattttctcttgttcaaaataagtcgtattaatgtttctataagaannaaataatattgttttaagaaataaactgcgttgcaatttaatcgaaatctacgccgccatttgtgtgatgtaaagcgcatttttgtctgttgtaagcgtaaacaccatcaataaaaaacaaaaatggtttc

SEQ ID NO: 146 - DNA, 9401 bp, Escherichia coli
  Strain O55:H7
  modified_base (903)..(903): a, c, g or t
  modified_base (3134)..(3134): a, c, g or t
  modified_base (5642)..(5642): a, c, g or t
aaataaaaaaggaaatcatttcgtgctctttcaatgtaaaaaagagtaaagacttgttttgataagcgaaataaattctgtttctggactaaacgtgaagcggttcctgatgtgtgctaaaatgcgtttctttgataaatctcaatttttaagaggtttacgccaggcaggaaaatttaaatgaatgaatttgagaagatttttaatgaaatgaatctggaccgggcattgctaccgatcctttttcgttcgaaccggtcgacagtgtggaagtatttaagcggcgatagtacggctcctgcctctgccatgtcgctgattatgctgttgcagttgatacagaaacgaaaccccgatctgttagccgaatggttaacgctttctgatttcaccattccgccagaagtttacctggaccagcctgattactggaaagggtgggtgtatacgcaacacaaggtcaataaaaacgtcctggaatatctaaaaaaacactatccggatgaagaccaaaaaagtatgagtaaaggccgggaagagtaaattgccaatgccagttaacatttaacatggcggaggcggcctacggttttggcgtgatatgacgcgcccgcgtcgcatcaggcgtcggtgcacgactgccggatgcggcgtaaacgccttatccggcctacgattcgggcgcagacttccgggcatgataagacgcgtcagcgtcgcatcaggcgatgaccgcacggatgatcagcgttatcccttctatcgcaatgacttcaacatgcgtacctgcgccgagatcctcgctggcgctgacaggccatgaactgtcaccgacgcgcatatgaccgcgcccgttgaccagcggagattccagcacaaaacgtcggccaatcagctgctgcncgcgctggtttaaatgactgtcgctgtgcttttgttcgcgcacccgccgcgacaaccatttccaccacagccaggcggcgagcagcgtcaggacggcaaacatcaccccttgccactcccaacccagcggcaccagccagaccaccaggccagtaatcactgctgccacgccactccacaacaaataaccatttccgcccagcatctcggctgccagcagcaaaccgccgagactgagccagaaaatatgtggatgaacgactattaactccatcatggctgagtccgcttgttggcgctgtctttcaccagctcggcaatcccggcaatcgaccccatcaggctgctggcctctaatggcatcatcactactttgctgttactggaggaaccgatctgctgtaacgcttcggtgtatttctgcgctacgaagtagttcaccgcctgaatatcaccggaggcgatggcttcagacaccattttggtggcgcgggcttctgcttcagcggaacgttcacgcgcttcagcctgtaaaaacgccgactgacgttcgccttccgctttcaggatttgcgactgtttttcaccttcggctttgaggatttccgcctgacggatcccttccgcttcaagaatgtaagcgcgtttggtacgttccgctttcatctgcgcgttcattgaagagataagctctgccggtgggcgcacgtcgcgaatttcaatacgggtgactttaatcccccacgggttggtggcctcatcgacaatacgcagcaggcgtgagttgatgctgtcgcgctgagagagcatttcgtcaagttccattgaacccaacacggtacggatgttagtcatggtcaggttgatgatcgccagctccagattgctgacttcataagccgcgcgtggcgcgtcaatcacctgaataaaacagactgcgtcgatggtaacgttggcgttatctttcgagataacttcctgggaagggatatcgagcacttgctccatcatattgatcttgcgaccaatgcgatccataaacggcaccaccagactgagccccggctgtaacgttttggtatagcgaccaaaacgttctaccgtccattgatagccctgcggcacgattttgacgcccgcgccgacaatgaccagcgcgacaaaaatgagaatcgggataaagataagcatcggaaaaacctcctgttgtaccgtccataatcagcaaaattgctgcttgattaaacaaattatacctgattactgaaagagagttcccccttattcctgcgaaggataaactgtttttagtaaaaatcagaaaaagggaacagcgatgcaggaaaatagtcctttgcttcagctacaaaacgtaggatatctggcgggtgatgcgaagattcttaataacatcaatttttcgctgcgtgctggcgaatttaagttaattaccggtccttctggttgtggcaaaagtacgctgctaaaaatagttgcttcattgatcagcccaaccagcggaacgttactgtttgaaggtgaggatgtcagcacactaaagccagaaatctaccgtcagcaagtctcttactgcgcccagacgccgacgctgtttggcgatacggtatacgataatctgatctttccctggcagatccgtaaccagcagcctgacccggccatttttctcgattttcttgaacgcttcgccttgccggacagcattttgacgaagaatatcgccgagctatctggtggtgaaaaacaacgcatctcattgattcgtaacctgcaatttatgccgaaggttttattgctggatgaaatcaccagtgcgctggatgaaagtaataaacataacgttaatgagatgatccatcgttatgtgcgcgagcaaaatattgccgtgctgtgggtgacacacgataaagacgaaattaatcatgcggataaagtgattacactgcaaccgcatgccggagaaatgcaggaagcacgctatgaactcgcataatattactaacgaatcattagcactggcattaatgctggtagtggtggcaatcttaattagccataaagaaaaactggcgctggagaaagatattctctggagcgtcgggcgcgcgataattcagctgattattgttggctatgtgctgaagtatattttcagcgtggatgatgccagcctgacattattgatggtgttatttatctgctttaatgcngcgtggaacgcgcaaaaacgcagtaaatatattgctaaagcttttatctcatcgtttattgccattacggtcggggcgggaattaccctggcggtgctgattctctcagggtcgattgaatttatcccgatgcaggtgatccctatcgccgggatgattgccggtaacgccatggtagcggtggggttgtgttacaacaatttagggcaacgggtcattagcgaacagcaacagattcaggagaaactgagtcttggcgcgacgccgaagcaggcttcagcgatattgattcgcgacagtattcgcgcggctttaattccgacggtcgattcagcaaaaacggttggcttagtgagtttaccaggaatgatgtccgggctgatatttgccgggattgatccggtgaaggcgattaaatatcagattatggtgacctttatgctgctctcaaccgccagcttgtcgaccataattgcctgctatttaacctatcgtaagttttataattcgcgccaccagttggtggtgacgcaattgaagaagaaatgatgcgatgccggatgcgcagcatcgcatccggcgttgtggttcatgtgccgatcaacggaatatcaatacaacaatgcatacagctggcggcgatacttcgacgccagtgcatcacccgtacccagcgcagcgaggatctcctggaacgttttacgcgtctgaccgtctgcggcggtgagatctttacgcagatgcccgaacagcaactccagcgcctcttcattgcgcccaacctgatgcagttgcagcgccagttgcgtcgccagtgcggcatcttctggattctccgccacctgctgttgcaactgttgaatttccggcgtatcagccgcctgcttcagcagttcgatttgcgccaccagcccctggtagcgggtgtcctgatcctgcaacggaatggttttcagcaccgcttccgcatcttcagaacggttcagcgcaatcagcgtttctgccagcagcaggccgatctccccgttctgattcgacaactgccaggcgtctttcagcaatggcagggcatcggtgtaattgccttcctgcatcagttgcatcgcctgctgcgctttcagctcttcttcgcgcggcagcactttatccagcagggcgcggatcgcctcttccggttgcggcccctggaagccatctaccggttgcccgttctggaacagatacacggtcggaatcgcgcgcagaccaaactgggcggcaatcatctgctccgcgtcgcagtccagcttcgccagaataaattgcccgttgtactgcgccgcaaggctttccagaattggggttaactgcaaacagtgctggctacgttcagaccaaaaatagaacagcaccggagtggtcatcgactgttcaagaacctgttgcaggttagattcgttaatgttgacaatattttctacggacatggagtcgctctctgttgtcgatattttctttgacatgggggcttaagcgcgcgcttcaactcacccctgcaatattttgtccatcacgcgccccggcagcaggcgcttaagcaccattaccgcccaggtcaccagcgttaccggatagcgcatcttcggcttctcgctaataaaagcatggcgtactttgtccaccaccgcttccggtcccaacgtaaagcgggcggcgatgccgggattttcgactggtttatcactttgcgtctggttgacgttgtcggtgaagcgagtacgaatgggaccgggttcgatcaggctgactttaattccgctgcggcgcagctccatgcgcagcgcgtctgaccacgcctccagcgcatatttactggccgcgtaagcgccacgacccggtgtggagattaatcccatcaccgatgaggtcatcacaatacgcccttcaccgtgcggcaacatcgcgggtaacaggcgcatggtgagctggtgtgcgccgaaaaagttggcggaaaactgctgttccatctgcgcacggctgatggtggaaagggggccatacatgccgaatccggcattgttaaagatcccatacagacaattatcggtcagggcgatcacctcgtcggctgcgcgatcaacactttctggtgaatccagatcgatcaacacgccggtaaatcccatgctgttcatgcgctcaacatcatccggtttccggcaacctgccagcacatgaaaaccctggcgttttaattcgagcgcgctttccaggccaattccactggaacatccggtaattaagaccgatttttgcataactttacctgtcaggatctccgttgctttatgagtcatgatttactaaaggctgcaactgcttcgccatccagtcggcaataaacggctgggcgtcgcggttgggatgaataccgtcatcctgcatccattgtggcttgaggtagacctcttccattaaaaagggcagcagcggaacatcaaactctttggcgagtttggggtaaatggngctaaaggcttcattataacggcgaccatagtttgcaggcagacgtatttgcattaacaatggttcagcgttggcggctttgacatcctgcaaaatctggcgcagcgtttgctcggtttgctgtggctgaaaaccacgcaaaccgtcattgccgcccagttcaaccagcacccaacgcggctgatgctgtttcagcagagccggaaggcgcgccagcccttgttgcgaggtgtcgccgctgatgctggcattgactaccgacgttttactctgccacttatcattcaacaaggcaggccaggccgcgctggcagacattcgatacccggcgctcaggctatcacccagaatcaataacgtgtccgctgcggcggcacggaaggttaacaggaccagaaacaggaagggcaaatgccagcggaaaacattgttgaagttcatcatcttaagaagtccgtcggtcagggggagcatgaactctccatcctcaccggagttgagctggttgtcaaacgtggcgagaccatcgcactggtgggcgagtcgggatcgggtaagtcaaccttgctggcgatcctcgccgggctggatgacggcagcagtggcgaagtgagtctggtgggacaaccgctacataatatggacgaagaagcgcgggcaaagttgcgcgcgaagcacgtcggctttgtttttcagtcatttatgttaattcctacccttaacgcgctggaaaacgtcgagcttccggcgctgctgcgcggtgagagtagcgcggaaagtcgtaacggagcgaaagcgttgctcgaacagttagggctgggtaaacgtctggatcatcttccggcacagctttccggcggtgaacagcaacgagtggcgctggcacgagcctttaacggtcgacctgatgtgctgtttgccgacgaacccaccggtaaccttgaccgccagacgggcgataaaattgccgacctgctgttttccctcaaccgtgagcatggcaccacgttgattatggtgacccacgacctgcaactggcggcacgctgcgaccgctgcttacggctggtgaacgggcagttgcaggaggaagcatgattgcacgctggttctggcgcgaatggcgctcgccgtcgctattaattgtctggctggcgctaagcctggcggtggcctgcgtgctggcgctgggcaatatcagcgatcgcatggagaagggcttaagccaacaaagccgggagtttatggcgggcgatcgggcgttgcgcagttcgcgcgaagtgccgcaagcgtggctggaggaagcgcaaaagcgcggcctgaaagtcggcaagcagctgactttcgccaccatgacatttgcaggcgacacaccgcagctggcgaacgttaaagcggtggatgatatctacccgatgtatggcgatctgcaaaccaatccccctggcctgaaaccgcaggcgggcagcgtattgctggccccacgcctgatggcactgcttaacctgaaaacgggcgacaccattgacgtgggcgatgccaccttgcggattgccggagaagtgattcaggaaccggattccggttttaaccccttccagatggctccgcgtctgatgatgaatctggcggatgtcgataaaaccggagccgtgcagccggggagtcgggtcacctggcgctataaattcggcggcagcgagaaccagctcgacagctatgagaaatggttgttacctcagcttaaacccgaacaacgctggtacggtctggaacaggacgaaggcgcgctggggcgatcgatggaacgctcgcaacagttcctgctgctttcggcacttctgaccttgctgctggcagtggcagcagtggcggtagcgatgaatcattactgtcgcagtcgctacgatctggtggcgatcctcaaaacgctgggggcagggcgagcgcaactgcgtaagctaatcgtcggtcagtggttgatggtgctgacgctttcagccgttaccggtggggcgataggcctgttgttcgaaaacgtgttgatggtgctgctcaagcccgttctgcctgctgcactaccgccagccagcctctggccatggctatgggcgctgggcaccatgacggtcatctcgctgctggtggggctacgaccataccgcttgttgctggcaacgcagcctttacgcgtattacgtaatgatgtggttgcgaacgtctggccgctgaagttttatctgccgattgtcagtgtggtggttgtgctgctgctcgccggattaatgggtggcagcatgctgctttgggcggtgctggcgggcgcggtagtactggctttgctgtgcggtgtgctgggctggatgctgctgaatgtacttcgccgcatgacgctgaaatcgctgcctctgcgcctggcggttagccgcctgttacgtcagccgtggtcaacgttaagccagctttcggcattttcgctctcctttatgctgctggcactgctactggtgctgcgtggcgatctgctcgaccgctggcagcagcagttaccgccagaaagcccgaactactttttaatcaacatcgccacagaacaggttacgccgctaaaagcgttcctcgcggaacatcagatagtcccggaatcgttttatccggtggtgcgagcgcggctgacggcgattaacggcaagccgacagaaggcaatgaagatgaggcgctcaaccgcgaactcaatcttacctggcaaaatacgcggcccgatcataatccgattgtcgccggtaactggccgccaaaagctgatgaagtttcgatggaagaggggctggcgaaacgcttaaacgttaccctcggcgataccgtgacttttatgggcgatacccaggagttccgcgctaaagtgaccagcctgcgcaaagtggactgggaaagtctgcggcctaatttctattttattttccctgaaggggcattagacgggcaaccgcagagctggcttaccagtttccgctgggagaatggcaacggcatgttgacgcaactcaaccgccagttccctaccattagcctgttagacattggcgcgattttaaaacaggtcggtcaggtgctggagcaggtaagtcgggcgctggaggtgatggtggtgctggtcaccgcctgcggtatgttgctgttgctggcacaggtgcaggtgggaatgcgtcagcgtcatcaggagctggtggtgtggcgcacactcggtgcggggaaaaaactgctgcgtaccacgttgtggtgtgagttcgccatgcttgggtttgtttccggcctggtggccgcaattggtgcggaaacggcactggcagtgttgcaggcgaaagtgtttgattttccgtgggagccagactggcgattgtggattgttctgccgtgcagcggtgcgctgctgctgtcgcttttcggcggctggctgggcgcgagactggttaagggtaaggcgctgttcaggcagtttgcggggtgatgagagtaaataaggggcgttctggttgaatggaacgccttgtttaaattaattctacaatatgtttcattgatgatgttattgaattggtgatttcctatctttctattgctgatattaatctgaatcggtggagtttaataattttaaatatagccctacaaaaataactcagactaataaaatcataaatcatatgcgttgaatggatattatccatatagtgaatttgttgatgatgaattcatct

SEQ ID NO: 147 - DNA, 7327 bp, Escherichia coli
  Strain O55:H7
  modified_base (254)..(255): a, c, g or t
  modified_base (670)..(670): a, c, g or t
  modified_base (2552)..(2552): a, c, g or t
  modified_base (2555)..(2556): a, c, g or t
  modified_base (3210)..(3213): a, c, g or t
  modified_base (3765)..(3765): a, c, g or t
  modified_base (4408)..(4408): a, c, g or t
  modified_base (5160)..(5161): a, c, g or t
tttaataaaatattgaaagtgacctgtaataacagttgttgttgattgagaacaaataagtttatgtgaaaaatatataaatacattagctggtcttgtgtgtcattttattttttttgttgctaacacagggatatgaacaataactaaaagggcactttatatgagcggaaaaccagcggcgcgtcagggagatatgactcagtatggcggtcccattgtccagggttcggcaggtgtaagaattggcgcgnnaactggcgtggcgtgctcggtgtgcccgggcgggatgacttcgggcaacccggtaaatccgctgctgggggcgaaggtgctgcccggcgagacggaccttgcgctgcccggcccgctgccgttcattctctcccgcacctacagcagctaccggacccggacgcctgcgccggtggggatttttggccccggctggaaagcgccttctgatatccgcttacagctacgcgatgatgcactggtactcaacgacaacggcgggcggagcattcactttgagccgctgctgccgggggaggcggtgtacagccgcagcgagtcaatgtggctggtgcgcggtggtaaggcagcgcagccggacggccacacgctggcgcggctgtgggggggcgctgccgccggatatccggttaancccgcatctttacctggcgaccaacagcgcacaggggccgtggtggatactggggtggtcagagcgggtgccgggtgctgaggacgtactgccagcgccgctgccgccgtaccgggtgcttaccgggatggcggaccgcttcgggcggacgctgacgtacaggcgtgaggccgccggtgacctggccggggaaatcaccggcgtgacggacggtgccgggcgggagttccgtctggtgctgaccacgcaggcgcagcgggcggaagaggcccgtaaacagcacaccgcttctttatcttcccctgacaccccccgccctctttcagactcagcgttccccgacacactgcccggtaccgaatacggtcccgacagaggtatccgcctttcggcggtgtggctgacgcacgacccggcatacccggagagcctgcccgctgcgccactggtgcggtacacgtatacggaagccggtgaactgctggcggtatatgaccgcagcaatacgcaggtgcgcgctttcacgtatgacgcgcagcacccgggccggatggtggggcaccgttatgcgggaaggccggagatgcgctaccgctacgacgatgcggggcgggtggtggagcaactgaacccggcaggcctgagttaccgctaccagtatgagcaggaccgcatcaccgtcacggacagcctgaaccggcgtgaggtgctgcatacagaaggcggggccgggctgaagcgggtggtgaaaaaagaactggcggacggcagcgtcacgcacagcgggtatgacgcggcaggaaggctaacggcgcagacggacgcggcgggacggcggacagagtatggtctgaatgtggtatccggcgatatcacggacatcaccacaccggacgggcgggagacgaaattttactataacgacgggaaccagctgacggcggtggtgtccccggacgggctggagagccgccgggcatatgatgaaccgggcaggctggtatcggagacatcgcgcagcggggagacagtacgctaccgctacgatgatgcgtacagtgagttaccggcgacgacaacagatgcgacgggcagcacccggcagatgacctggagccgctacggtcagttgctggcgttcaccgactgctcgggctaccagacccgctatgaatacgaccgcttcggctagatgacggcggtccaccgcgaggaaggcatcagcctttaccgccgctatgacaaccgtggccggttaatctcggtgaaagacgcacagggccatgaaacgcggtatgagtacaacgccgcaggcgacctgactgccgttatcaccccggacggcaaccggagcgagacacagtacgatgcgtggggaaaggcggtcagcaccacgcagggcgggctgacgcgcagtatggaatacgaccttgccggacgcatcaccacgctgaccaacgagaacggcagccggagtgagtttacctacgatgcgcttgaccggctggtacagcagcgcggctttgacgggcggacgcaacgttaccactatgacctgaccggaaaactcacgcagagtgaagatgaggggcttgtcaccctctggcactacgacgaatcggaccgcctcactcaccgcacggtgaacggcgaaccggcagagcagtggcagtacgacgagcacggctggctgacagaaatcagccacctgagcgaaggccatcaggtggcggtgcattacggttatgatgataagggccgcctggccggggagcgccagacggtgcataacccggagacgggggaactgctgtggcagcatgagacagagcacgcatacaacgaacagggtctggcaaaccgcgtcacgccggacagcctnccnngggtggagtggctgacctacggcagcggttatcttgcggggatgaagctgggcgggacgccgctggtggagttcacgcgcgacaggctgcaccgcgagacggtgcgcagcttcggcaataacgcatacgaactgaccagcacatacactcccgcaggccatttacagagccagcgcctgaacagccaggtgtatgaccgtgactacgactggaatgacaatggcgacctggtgcgcatcagcggcccgcgacagacgtgggaatatggctacagcgccacgggcaggctggagagcgtgcgcacccttgcatcagacctggatatccgcatcccgtatgcgaccgacccggcgggaaaccggctgccggacccggagctacacccggacagcacgctcacggcgtggccggataaccgcatcgcggaggatgcgcactatgtctaccgacacgatgaatacggcaggctgacggagaagacggaccgcatcccggcgggtgtgatacggacggacgacgagcggacccaccactaccactacgacagccagcaccgcctggtgttctacacgcggatacagcatggcgagccactggtcgagagccgctacctctacgacccgctgggacggcgaatggcaaaacgggtctggnnnngggagcgtgacctgacggggtggatgtcgctgtcgcgtaaaccggaggtgacgtggtatggctgggacggagacaggctgacgacggtgcagactgacaccacacgtatccagacggtatacgagccgggaagcttcacgccgctcatccgggtcgagacagagaacggcgagcgggaaaaagcgcagcggcgcagcctggcagagacgctccagcaggaagggagtgagaacggccacggcgtggtgttcccggctgaactggtgcggctgctggacaggctggaggaagaaatccgggcagaccgcgtgagcagtgaaagccgggcgtggcttgcgcagtgcgggctgacggtggagcaactggccagacaggtggagccggaatacacaccggcgagaaaagttcatctttaccactgcgaccaccggggcctgccgctggcgctcatcagcgaagacggcaatacggcgtggagcggggagtatgatgaatggggcaaccagctgaatgaggagaacccgcatcacctgcaccagccgtaccggctgncggggcagcagtatgataaggagtcggggctgtactacaaccggaaccggtactacgatccgttgcaggggcggtatatcactcaggacccgatagggctggaggggggatggagtctgtatgcgtatccgctgaatccggtgaatggtattgatccattagggttaagtcccgcagatgtagcgctaataagaagaaaagatcaactaaaccatcaaagagcatgggatatattatctgatacttatgaagatatgaagagattaaatttaggtgggactgatcaatttttccattgtatggcattttgtcgagtgtctaaattaaatgacgctggtgttagccgatcggcgaaagggctgggttatgaaaaagagattagagattacgggttaaatctgttcggtatgtacggcagaaaagtaaagctatcccattctgaaatgattgaagataataaaaaagacttggctgtaaatgaccatgggttgacatgtccatcaacaacagattgctcagatagatgtagtgattatattaatccagagcataaagaaacgataaaggctttacaagatgctggctatctcaagtaatctatcaaagatgataatatttattattgctattataatcattgttnttttatgcgtaattacttatctttatttatacaaagatgaatctcttgtaagtaaacattacataaactatatggcaataccagaaaatgatggagtttttacatggctcccagatttttttccgcacgtagcggtggatatatcaatatacacaaatgtagaagatgattatttttttcttatttttccctaacaaatgatgatgggggtaggtttaagaaaacattgacagtgagggccagggaacaagtggcgaaaatcgtatcaaagaatgatccagatacaaaaaaagtgtggtgtaaatatggtaagataccagggcaaggggatggtgtaaacctttttttgttggtgaaattaatgttacgcattattttataacaaatattggagctggattgcctgatgcttgtgcagagtaattgcttgaattaagagtctatcccatatcgaagtcgtcaacttcgtagtgaggaaaagtaaaattcctgactgagaaaagacatgtcggctattgtgtaaagccatatagctcagacgatgaatatctactcgtattcagttgtttattgagggtgagttccgaccctgaaacaacaaataaaatgaacagtcagagagtttacatagaattgcactggtcttttacgatatctgacattgtgtaatacatattcagccatgcattaattaaaatgttacgtgtttaatgtgagtccctatctgaaaataaataatccttccggattannataaattcttgccgggaaagaaagaggaaataaaccattagcggaaaaccagcggcacgccagggtgacatgccccagtacggcggcccgatagtccagggttcagcgggggtactgatagtcgcgccgactgcatcgagaactccatacaactttttacggaacgtcacctgataaaatttgttcagtatcgtcttttgagattctcaaggttatggagtaaccagacagaacggacaccactgtcggagataaaaaccccctgtttacgcagttcgttgctggcccggtgctgaccatgtgtcgggaaagcgacggcgtaatcaacaacagcctgttcagttgcctcatcggtacggttcttaaggttaggagcgcggcgactacgattaatctgcgcatccacaccgccttcagcgaccagttcgcggtaacgataaaacgtatcacgcgaaacgcccatgattttacaggcttttgatacgttgctgagttcttcagccagattgagcaaaccggctttgtgtttgatgacgggattggcagtatgaagcatgagagttacctcttgttttggataaggattcgacactcatatcaaaaccggtaactctcaacctttcaaggccatgtgtcagatcaagtcgcgactaatacaaatacgtccctcattactgcgccttaacccattccgccacttccgcccactcaccgcgaaagacaactttttccgcttttttctcaagctgatagcgatacatctggtcgtaatattcttcaagtaacggcaccagccaggccagatgaccgtcggtgctgccggtggtgagttgcgttgtcagtgctgcatccagccttgcagccagttcgttatatcgctgtagccccagccgacgcttaatagccgaaagtccgtgatgcaggtattcgcaatattcctgccagccctgttcgtcgccgtacgcgtgggtaaaatcatgatgcatacgcaagaaatactcttcgttcaggcgctcaagacggatctcaaacggatcttctaccaccgcaatcgccgcctgagtcattcgctcgcgcaggcattccggcaggtgattcgaaccgatcatccggctttcgtcttccagcacccacaggcgcaaattctgacgggcgtcggtttttagcatttcggcagccagcaggttttcaaaactcgcctggctaagttgtggttgtaacgtgcgaccaaacgccgaaccgcgatgacgcgccaacccttccagatcaacaccgttcggctgttgctgcactaacagcgttttaccgctgccggtacaaccgccaatcagcactatcggtttttgtgccagttcaatagtcgcctgaatcgcggtctggcgcagtgccttataaccgccttccaccagcggataatcaatccccgctgcatgcaaccagctttgcacaatatgtgagcgctgaccgccacgggcgcagcagagaataccttgcggattttgcaggcaggctgcccgccaggcgtccatgcgctgctgacgaatttcacccgcaaccagtttatgtcccagcgccagcgctgcgtctgagccttgctgtttatagcaggtgccaacggcggcgcgttcatcgttattcattaacggcagattgatagcggcgggcattgcgccttgctcaaactcgataggggcgcgaacatcaataatgggcgtatcagcaatcagcagggcacgatagtcctgttccgtgtgtctctcttgcatagttaaaagtgaacctcaaatcagcttgcgcgctattttacgcgccaacgcgcaaggaaacttgatttttaactgcgtgggttgccgaaaatttctaaaaatccgctgatttccggcctgcgctgggtaaacaaggtcacaatatcttctaccgctttgccgctgccaaatttgcgccatgccagactcaatggcgaaggagggcgcatcgttgggattacccggctgaccagttgttgattatcgatcattgactggcaaagcgattttggcaaaaaaccaatgccaacgcccgccagatgggcggcgattttcgtttccatatcaggaacaataatctctttttgccctggcaatcgccaggcgacgcgtttggttaaggtgcgggcgctgtcttcaa

SEQ ID NO: 148 - DNA, 13595 bp, Escherichia coli
  Strain O55:H7
  modified_base (1417)..(1417): a, c, g or t
  modified_base (2232)..(2235): a, c, g or t
  modified_base (2269)..(2272): a, c, g or t
  modified_base (2650)..(2653): a, c, g or t
  modified_base (4595)..(4595): a, c, g or t
  modified_base (5754)..(5754): a, c, g or t
  modified_base (5919)..(5919): a, c, g or t
  modified_base (5930)..(5930): a, c, g or t
  modified_base (7456)..(7459): a, c, g or t
  modified_base (7667)..(7667): a, c, g or t
  modified_base (9345)..(9345): a, c, g or t
  modified_base (9661)..(9661): a, c, g or t
  modified_base (11333)..(11333): a, c, g or t
  modified_base (11931)..(11931): a, c, g or t
  modified_base (12019)..(12019): a, c, g or t
  modified_base (13282)..(13285): a, c, g or t
  modified_base (13289)..(13290): a, c, g or t
accgccggaaagcgccgcaactgcgcttctgttagcggctcttcaacgttcgccagcggatgatccgccgccatgacaaatcgccattgcaccgatcctaagggatcaagactaaaggtatttgccagcgcctcggttcccgtgacgccgatagccagtgaaaaaccttcgtacaatagcgagtcccagacgcccatatagatttgtcgggagatgtgaaactgggtaaaggggtaacgttcattcagccacgccagcaactgggcgacggcctgggggttgtagagcaggttgttgatgacaatattcacctggcgttccacgccatcattcacctgttgcagctcgctgggcatactttccagccagctcagccagtctctggcctgggaaagtagatgctcgccagccgctgtcaacgttacgctacgagtcgtgcgaaaaaacagcgccactccggtattctcttccagaagtttaatgcgataactgatcgtcgccgtggttttacataatcgttctgccgcttttgaaaaacttcccgtttcagcaaccgcaatgaaagtccgcaaggtttctggatcgaacatcttcaggtatccccttttaaatccgcaagttgcgtgattttcttatcctctgatttatcagtatttttacatgataaccctgttcaatttgtggactaaatctagttttggaaaaatattccaacttttgtgttgatgttgttctcttaaggttttagattgcctgttattgaaaccaagctgaccggtcggcgttggttgaacggaattatgttacaaggacaaaaagatgaaacttcaggtattaccgttaagtcaggaagcctttagtgcttatggcgacgtaatcgaaacgcagcaacgggattttttccatattaacaatggcctggtggagcgttaccacgatttggcgctggttgagattcttgagcaagaccgtacgcttatcagcattaaccgagcgcaaccggcgaatctgccgctgaccattcacgaactcgaacgtcatccgctgggtactcaggcctttatcccgatgaaaggtgaggtgtttgtggtggtcgtagcgttaggtgacgacaaaccagacctgtcaaccctgcgggcgtttattaccaacggcgaacagggagtgaattaccatcgtaacgtctggcatcacccacttttcgcctggcagcgcgtcaccgattttctgaccatcgatcgcggcggcagtgacaactgtgatgttgaaagtattcctgaacaggaactctgttttgcgtgacgcctgcaaccgacttgcataagataaactaattgttcattgtttatgctcacttgtaggtcggagttaacgtaggtatgacggaagttagacggcgcggcaggccaggacaggnggagcctgtggcacagaagggcgcacaggcattagagcggggaattgcgattctgcaatatctggaaaaaagtgggggaagttcgtcggttagcgatatttctctcaatctggatttgccgctctccacgacctttcgcttgctgaaggttttacaggcagcggattttgtctatcaggacagtcagttaggctggtggcatataggattaggtgtctttaacgtcggtgcggcgtacatccataaccgcgatgtcctctccgtcgccgggccgtttatgcgccgcctgatgttactttccggcgaaacggtcaatgtcgcgatccgtaacggcaatgaagcggtattaattggtcagttagagtgtaaatcgatggtcaggatgtgcgcgccactgggcagtcgtctgccactgcatgcttccggtgcgggcaaagcgctgctttatccgctggcggaagaggagttgatgagcatcattctgcaaaccggtttgcagcagtttacgccaactacgcttgtggatatgcccaccctgctgaaggacctggaacaagcgcgtgaactgggctataccgtagataaagaagagcatgttgtaggtctgaattgcatagcttcagcaatttacgatgatgtaggtagcgttgttgccgctatctccatctccgggccttcatcaagactgacagaagatcgttttgtcagtcagggtgagctggtcagagacaccgcccgcgatatcagcacggcgttgggactgaaagcacatccatagtgtctgtcgcatcccgctctgcggagcgggttttttnnnnaaaatttgaaagttggaaaatttttccaattaannnnggtaggaataaaatggcaaaaatgagagccgttgacgcggcaatgtatgtgctggagaaagaaggtatcaccaccgccttcggcgttccgggagctgcaatcaatccgttctactcagcgatgcgtaagcacggcggtattcgtcacattctggcgcgtcatgtggaaggtgcttcgcacatggcggaaggttatacccgcgcaacggcagggaatatcggcgtatgtctggggacttccggtcctgcgggcacggacatgatcaccgcgctctattccgcttctgctgattccattcctattctgtgcattaccggccaggcaccgcgcgcccgtctgcataaagaagattttcaggccgtagatattgaagcaatnnnnaaaccggtcagcaaaatggcggttacagttcgtgaagcggcgctggtgcctcgcgtgctgcaacaggcatttcacctgatgcgttctggtcgtccgggtccggtactggtggatttaccgttcgacgttcaggttgcggaaatcgagtttgatcctgacatgtacgaaccgctgccggtctacaaacctgctgccagccgtatgcagatcgaaaaagctgtagaaatgttaatccaggccgaacgtccggtgattgttgccgggggcggggtaatcaatgctgacgcagctgcactgttacaacagtttgctgaactgaccagcgttccggtgatcccaacgctgatgggctggggctgtatcccggacgatcatgaactgatggccgggatggtcggtctgcaaaccgcgcatcgttacggtaacgcaacgttgctggcgtccgacatggtgtttggtatcggtaaccgttttgctaaccgtcataccggttcggtagagaaatacaccgaagggcgcaaaatcgttcatatcgatattgagccgacgcaaattggccgcgtgctgtgtccggatctcggcattgtctctgatgctaaagcggcgctgacactgctggttgaagtggcgcaggagatgcaaaaagcgggtcgtctgccgtgtcgtaaagaatgggtcgccgattgccagcagcgcaaacgcactttgctgcgcaaaacccatttcgacaacgtgccggtgaaaccgcagcgcgtgtatgaagagatgaacaaagcctttggtcgcgatgtttgttatgtcaccaccattggcctgtcacaaatcgctgcggcacaaatgctgcatgtctttaaagaccgccactggatcaactgtggtcaggctggtccgttaggctggacgattccggcggcgctgggggtttgtgccgctgatccgaaacgcaatgtggtggcgatttccggtgacttcgacttccagttcctgattgaagagttagccgttggcgcgcagttcaacattccgtacatccatgtgctggtgaataacgcctatctcggcctgattcgtcagtcacaacgcgcctttgacatggactactgcgtgcaactcgctttcgagaatatcaactccagcgaagtgaacggttacggcgtcgaccacgtaaaagtagcggaaggtttaggttgtaaagctattcgcgtcttcaaaccggaagatattgcaccggcctttgaacaggcgaaagccttaatggcgcaatatcgggtaccggtagtcgtggaagttattctcgagcgtgtgacaaatatttcgatgggcagcgaactggataacgtcatggaatttgaagatatcgccgataacgcagcggatgcaccgactgaaacctgcttcatgcactatgaataagggagataaataatgttacgtttctctgctaatttatcgatgttatttggtgaatatgattttctcgcccgttttgagaaagctgcgcagtgtggttttcgcggcgttgaatttatgtttccttatgactacgacattgaagaattaaaacaggtgctggcgagtaataaactcgaacatacgctgcacaatttaccggcgggtgactgggcggcgggggagcgcggtattgcctgtattcctggccgtgaagaagagtttcgggatggcgtagcagcagcgattcgttatgcccgtgcgctgggtaataaaaaaattaactgtctggtcggtaaaacgccggctggtttcagcagtgaacagattcacgcaacgcttgtagaaaacctgcgttatgccgcgaatatgctgatgaaagaagatattttattactgattgaacctattaaccattttgatattcctggtttccatctcaccggaactcggcaggcgctgaaattgattgatgatgttggttgctgcaatntgaaaattcagtatgacatttatcacatgcagcggatggaaggtgaattaaccaacactatgacgcaatgggctgataaaattggtcacctgcaaattgccgataatccgcatcgcggcgaaccggggaccggagaaattaattatgattatctctttaaggtaatcgaaaattctgactacaacggttgggttgggtgtgaatataaaccccaaaccaccacggaagccggtttacgctggatggatccgtaccgttaaaacgtaacgctattcagacaatgcttttttaggctgctaagttggcaggggatcgtgttgtctgaattcaggaatagcgacatttaaaaagaggttaattatgaaactgggatttattggcttaggcattatgggtactccgatggccattaatctggcgcgtgccggtcatcaattacatgtcacgaccattggaccggttgctgatgaattactgtcactcggtgctgttaatgtcgacaccgcgcgccaggtaacggaagcagcggacatcatttttattatggtgccggacacacctcaggttgaagaagttctgtttggtgaaaatggttgtaccaaagcctcgctgaagggcaaaaccattgttgatatgagctccatttcaccgattgaaactaaacgtttcgctcgtcaggtgaatgaactgggtggtgattatctcgatgcgccagtctccggcggcgaaatcggcgcgcgtgaagggacgttgtcaattatggttggcggtgacgaagcggtatttgaacgtgttaaaccgctgtttgaactgctcggtaaaaatatcacccttgtgggcggtaacggcgacggtcaaacctgcaaagtggcaaatcagattatcgtagcgctcaatattgaagcggtctctgaagctctgctgtttgcttcaaaagccggtgcagacccggtacgtgtgcgccaggcgctgatgggcggctttgcttcctcacgtattctggaagttcacggtgagcgcatgattaaacgcacctttaatccaggtttcaaaattgcgctgcaccagaaagatctcaacctggcactgcaaagtgcgaaggcactggctctgaacctgccaaacactgcgacctgccaggagttatttaatacctgcncggcaaacggtggcagccagttggatcactctgcgttagtgcaggcgctggaattaatggctaaccataaactggcctgatacccgcaataaaaatggccgatatcaaaaaatgaatcggccagcaatattaaaaaagaaagcagccaaagatgttgcttcagtnttaaaaataanatttttattttattttttcctcatagctagattaaaacaacgttattcgatacgtgaaattaagagggatttatggaacatcagagaaaactattccagcaacgcggctatagcgaagatctattgccgaaaacgcaaagccagcggacctggaaaacatttaactattttaccttatggatgggttcggttcataacgttcccaattatgtgatggtcggcggcttttttattctcggcttgtctacctttagtattatgctggcaattatcctcagcgcctttttcattgccgcggtaatggtattaaacggcgctgcgggcagtaaatacggcgtaccgtttgccatgatcctgcgtgcttcttacggcgtacgtggcgcactgtttcccggattattaagaggcggtattgctgccattatgtggtttggcctgcaatgttacgcggggtcactggcctgcttgattctgattggcaaaatctggccgggatttttgactctcggtggtgatttcactctgttaggcctttctctaccgggcttaattactttcttactcttctggctggtcaacgttggtataggttttggcggtggcaaagttttaaataaattcactgccattcttaacccgtgcatctatatcgttttcggcggtatggcgatttgggcgatttcgctggtcgggctcggtccaatctttgactacattccgagcggtattcagaaagcagaaaacagtggattcttgttcctggtggtgattaacgcggtagttgcggtctgggcggcaccggcggtgagcgcatccgactttacgcaaaacgcccactcgtttcgtgagcaagcgctggggcaaacgctgggtttagttgtggcctatattctgtttgcggtcgcgggggtatgtattattgccggagccagtattcattacggcgctgatacctggaacgtgctggatattgttcagcgttgggacagcctgtttgcctcgttctttgcggtactggttattctgatgacgactatctccactaacgccactggtaatattattccggctggttatcagattgctgccattgcaccgacaaaactgacctataaaaacggcgtactgattgccagtattatcagcctgctgatctgcccgtggaaattaatggaaaatcaggacagtatttatctgttcctcgatattatcggcggaatgcttggtccggtaattggtgtcatgatggcgcattattttgtggtgatgcgtgggcaaattaatcttgatgaactgtacaccgcacctggcgattataaatattacgataacggttttaacctcaccgcgttttcagtaactctggtggccgttattttatctcttggcggtaagtttattcccttaatggaaccgttatcgcgtgtttcatggtttgtcggcgtcatcgtcgcctttgcttgagttaaaaaccaatctgtattttacaaggagtttgttatgtcttttgatttaatcattaaaannnncaccgttattttagaaaacgaagctcgcgttgtagatatcgccgttaaaggcggcaaaattgctgctatcggtcaggatctgggcgatgcaaaagaagttatggatgcgtctggtctggtggtttcgccgggcatggttgatgcgcacacccatatttctgaaccgggtcgtagccactgggaaggttatgaaaccggtactcgcgcngcggcaaaaggtggtatcaccaccatgatcgaaatgccgctcaaccagctgcctgcaacggttgaccgcgcttcaattgaactgaagttcgatgccgctaaaggcaagctgactatcgatgcggcacaactcggtggcctggtgtcttacaacatcgaccgtctgcatgagctggatgaagtgggcgttgtcggcttcaaatgcttcgttgcgacctgtggcgatcgcggtatcgacaacgacttccgtgatgtaaacgactggcagttcttcaaaggtgcgcagaagctgggcgaactggggcagccggtgctggtgcactgcgaaaacgcgctgatctgtgacgcactgggcgaagaagcgaaacgtgaaggtcgcgtaactgcccatgactatgtggcttcgcgtccggtatttaccgaagtggaagcgattcgccgcgtgctgtatctggcgaaagttgccggttgccgtctgcacgtttgccatatcagcagcccggaaggcgttgaagaagtgactcgtgcacgtcaggaaggtcaggacgttacttgtgaatcctgcccgcattacttcgtactggataccgatcagttcgaagaaatcggtactctggcgaagtgttcaccgccgatccgcgatctggaaaaccagaaaggcatgtgggaaaaactgtttaacggtgaaatcgaccgcctggtttccgaccactcaccatgccctccggaaatgaaagccggcaacatcatggaagcatggggcggtattgccggtctgcaaaactgtatggacgtgatgttcgatgaagcggtacagaaacgcggaatgtctctgccaatgttcggcaaattaatggcgactaacgcagcagatatttttggtctgcagcaaaaaggccgtatcgccccaggaaaagatgccgacttcgtcttcattcagccgaatagcagctatgttcttaccaatgacgatctggaatatcgccacaaagtcagcccgtatgttggccgtaccattggcgcgcgtatcacgaaaaccatcttacgtggtgatgtgatttacgacatcgaacagggcttccctgttgcgccgaaaggtcaatttatccttaaacatcagcagtaatctggcccctgcaatgcccgtccttgcggcgggcattctccggttaaggtgtgtttatgttcaattttgcagttagcagcgaaagcctgttatcaggatttcagtggtttttctttattttttgcaacacggttgtggttcctcctacgctactttctgcttttcagttgccgcaaagtagcctgcttacgctcacgcaatatgcttttcttgctaccgcactggcctgcttcgctcaggcgttttgcggtcatcgtcgcgctattatggaagggccggggggcctgtggtggggaaccatcctaactatcacccttggcgaagcatcgcgcgggacaccgatcaacgatatcgctaccagcctggcggtggggattgcactctccggcgtgctgacgatgttgattggttttagcggattaggtcatcgcctggcgcggttatttacgccgtcggtgatggtcttgtttatgttgatgctgggcgcgcagctgaccactatctttttcaaaggtatgctcgggctgccgtttggcatagccgacccgaattntaaaattcagttaccgccgttcgcgctctcggtggcggtgatgtgcctggtactggcgatgattatctttctgccgcaacgttttgcccgttatggcctgctggtcggcaccataaccggctggttgttgtggtacttttgctttccttcttcgcattcgctctccggtgagttgcactggcagtggttcccgctcggcagtggcggtgctttgtcgccggggattattctgacggcggtgattacaggtctggtgaatatcagcaatacctacggtgcgattcggggcacggatgttttttatccgcagcagggngcggggaatacgcgttatcgtcgtagctttgtggcgaccggatttatgacactgataaccgtgccgctggcagtaattccattttcaccgtttgtttcatccattggtttattaacccagactggcgattacacgcggcgttcgtttatttatggcagcgttatttgcctgctggtggcgctggttccggcactcacgcgactgttttgcagtatccctttacccgtgagtagtgcggtcatgctggtttcttatctacctttactcttttccgcgctggtgtttagccagcaaataacgtttaccgctcgcaatatttatcgactcgcattgccgttatttgtcggcatatttttaatggcattaccgcctgtgtatctgcaagaccttccattaacgcttcgtcctctgctcagtaacggcttattggtcgggattttactggctgttcttatggataaccttattccgtgggaacgcatcgaataatttgttgaaaaaggattgataatgaagattgtcattgcgccagactcttttaaagagagcttaagtgcagaaaaatgttgtcaggcaattaaagccgggttttcgaccctctttcccgatgcgaactatatctgtttgccgatagcggatggcggcgaagggacggtggatgcgatggtcgccgcgacgggcggcaacatcgtgacgcttgaagtctgcgggccgatgggcgaaaaagtgaatgctttttatggcattaccggcgacgggaaaacggcggtgattgagatggcggcagcaagtggcctgatgctggtcgcgcctgaaaagcgtaatccgttgctggcctccagttttggtacgggggagttaattcgtcatgcgctggataacggcattcgccatattattctcggcattggcggcagtgcgacggtcgacggcggtatgggcatggcgcaggcgctcggtgtgcgtttccttgatgccgacggtcaggtgctggtggctaacggcggcaatttagcgcgcgtggcaagcattgagatggaggaatgcgatccgcgtctggcgaactgccatattgaagtagcatgtgacgttgataacccgctggtaggggcacgcggcgcggcggcggtgtttggcccgcaaaaaggggcaacgccggagatggtcgaagaacttgaacaggggctgcaaaattacgcccgtgttttacaacagcaaactgaaattaatgtctgccagatggcgggcggtggcgctgcgggcggtatggggattgcggcggcggtattcctcaatgcggatattaaaccgggtattgagattgtactgcgggcggtcaacctggagcaggcggtgcagggggcagcactggtgatcaccggggaagggcgcattgactcgcaaacggcaggcggtaaagcgccgctgggcgttgcgtcggtggcgaagcagtttaatgtaccggtgattgggattgctggcgtattgggtgatggcgtggaagtggtgcaccagtacggcattgatgcggtattcagcattttgccacgtctggcacctttagccgaagtgctcgccagcggtgaaaccaatctcttcaacagcgcgcgaaatattgcctgcgccattaaaataggtcagggaattaaaaactgacccttacctttaaagnggatgcgatttatatcgcataagagtgcagtactcatgccggatgcggcatgagtaccatatccttcctgaaaatcgcgcaaattctatatattgcagagatcatgtaggcctgataagcgaagcgcatcaggctatgttgcaaaaaaagccacggtataaaccgtggcaaaatccaacatagctaaaaataatcaggcgagtggtatgacttaaatctctacgtcgcggttacaatctttcgagtaaatatagctgaacgcttcaccacgccctacgccataaccagcctgtaaagaataagcgcccataaagatgtaatcgccttttttcaccgggatccagttattgtcgaggttataaaccccctgaccggaaagaatataggcaccgtgttcctgaacatgtgtttcgatataaccgtggctggcacctggtgcaaaagaaaggatatgcatgttcatatcaaaacctaactctttgggcaggaaatccagcaggatcacatcatccataccttcatagtgaatgcgttccagttcgctggcattgccagaaaccagccacggtgcatagccttctaccggaacatagcggcncttatataaaaagatttggctgtcttcggcctgggcgttaacaaacgtcattaaggagccaggcgggcaataaagatagccaccttcncttaaggaaaatgttttgccttcggctttggcagtgatatttccagagatcacatacaggaacgtttcaatgccttcgccaccgaagccctgttggttgccgccgttttgatgcagtgtgaccagataatcaacaaaagaggcacccagctttggcgtggagaggattgtcgcgtcacaattttcaaagcccggaataatattttttaccagaccgtctggtgttaacagtgcgaaattaccgtgtttcacaatcgcacggttagccagtaaatcatcgcggtaaccggtgacgttatttaaatatcccatttatgactccttatttctgccaggcaagttgataaagcatgagtgccaacgttttgaccccttcggcaaggtcggtaatattggtgcgttccgccgggttatggctgatcccgttgatgctggggataaaaatcatgcaggttggtacgcgaggcgcgaaaatttgcgcgtcgtgcccggcaccactgtgcatcacccggtaattcagtttttcactttcacacaattctgtcagggtggcgaccaggtccttattcatcggcacgggttcttcgtccatccataaatcgatatcaatacgaatgtccatttcatcgcaaatcgcccgcatgtcgttttctaactgttgggtgaaatcacgcagcacggcggcgtcggtatgacgacaatcaatggtgaacgtggttttacccggcaccacattcaccgtattcgggcgcggctctactttcccaaaggtcagaaccagcggatcgcccatctttttcgctttttcgatcgactgatggcaaatgcgactgaaagcgtaaaccgtatcacgacgataacccatcggcgtggtgcctgcatggtttgattcgccgttcagcgtcaccgtatagcgacgttgcccgacaattgcattcaccacgccaattgattgcccattactttccagcacacagccctgttcgatatgcagttcgacaaaggctttaatatcctgacgcggagttagcggggcgtccggcagagtaaatccgcaagccttcatcgcatcgacaaaactatttcctttggcatcacagatattccgcacgtcgtcaggattcgccagcccaaagatatttttactgccccagaaaacatacgggaagcggctgccttcttcttccgccatcgccaccacttcaaccgtacgcagcggtgcgccgtattgagttttcagccagtcaattgccagccgcgccgnnnncgcnncgaattgcccgtcgaggttaccgccgttaaccacggtatcgatatgcgaaccgctcagaatcacttcctgtggatattcggtgccactcaggcgaccgtataaattccccacttcatcgaaacgtgtttccagcccacttgcggccattctttttttaaattgctgctgggtttccagccattccggcgaataaagtaaacgggtcatcccacccgctgggtcagcgccaaaagaggaaagccagggcagcgcttcttctatggtttgacgaaaatgtgtaatcataagaaagtcctgtctcaat

SEQ ID NO: 149 - DNA, 1189 bp, Escherichia coli
  Strain O55:H7
  modified_base (1188)..(1188): a, c, g or t
aaagggatttttcgtttcgtatgacgtgttataaagcgcgtcggaaattaaatactggtaaatatcatcaacaatttcgatgccttcgacggcggcttggcgttgtttaatatcctgatcctgtccgggataataaacctgattaaaaccgggcgcgggggtaatggcatttaattcgcgcatggtctggctaagatgttgacggaataattcgctggaggagaaaaagttcgggttaataactacatgtaattgccccaaattacgcccggcgtgtaaatcgtcatacatcgaactaacctgtcgcccgaacggtaagccgagtaagacgcctgagaggacgtcaatcatcatcatcaggccataccctttcggcccggctgcggggagcagagcatgtaccgcgaacggatcggttgttggtgcaccgtttttatcgaccgcccaggtatccgggatagacatattacgcgagcgggcgtcgaggacttttccccatgcctgtacggtagtcgccatatcaaaggtaaggatctcgtcgccttctcccggcgcggcaaaggccagtgggttagtaccgtagtaaatttccgcgccgccaaacggcaccaccatcggatcggactggcacatcgaaatgccaattaatccggcgcgggctgcctgctgcacaaaataagagattgcgccgctgtgacccatccggctgataccgaccaccgcaacgccattttgctgggcggttttgatggcatgttccatacccattttcgccgcgacctgtccggcggcattgtcggcatgtaaaattgccgagcacggcccggtttcctcaagacgaaactccggttcgcggttggtgccgccttttgaaatgcgttccgcgtagtattccacgcgcaccgcgccatgagagtggatccctctggcatcggcataaaccaatacttcagccacggttgcagcgtgctcacgttttaacccagcctggcagagtttattctcaattagctggtggagtgtttcccgactgattttcatctgtcttcctttttaacgacggtgtgaagcatgactgcaattaacatacagggaaaatatctggattatgtgatccagacaggcaaaaaaatatagttagaatttatttgataatccgctcgcttttaacctggtttttaaaacaanc

SEQ ID NO: 150 - DNA, 1778 bp, Escherichia coli
  Strain O55:H7
  modified_base (645)..(648): a, c, g or t
taaaaaataacacgtaatagcatggcggttatttgaattcttttgttaataatccctgtgtgatattcatcaccttatttactcgttgtcatcgataccgtaatcgccacattaacactgctcgtgcaattgccatgggtgcaatttttaaggagttgttatgatccacgcctttattaaaaaagggtgttttcaggattcggtcagtttaatgattatttcacgaaaactcagcgaatcagaaaatgttgatgatgtttccgtaatgatgggtacgcccgccaataaagcgttattagataccacaggtttctggcatgacgattttaataacgccacgccgaacgatatttgcgtggcaattcgtagcgaagcggcggatgcggggatcgcgcaggcgattatgcagcagcttgaagaggcgctaaaacaactggcgcaggggtcaggcagcagccaggcgttgacgcaggtgcgtcgctgggacagtgcctgtcagaaattacccgatgccaatctggcgctgatttcagtggctggcgagtatgcggcggagctggcgaatcaggcgctggatcgcaacctcaacgtgatgatgttctccgataacgtcacgctggaagatgaaatccaacttaaaacccnnnngcgggaaaaaggcttgctggtgatggggccggactgcggtacgtcgatgattgccggcacgccgctggcttttgctaacgtgatgccggaaggcaacattggcgtcattggcgcttccggtaccgggattcaggagctgtgctcgcagattgcgctggcaggggagggaattactcacgcgattggccttggcggccgcgacctcagccgtgaagtgggcggcatcagtgcgctgacggcgctggaaatgctcagtgcagacgagaaaagcgaagtgctggcatttgtttcaaaaccacctgccgaagcggtgcgtctgaaaattgttaatgccatgaaagcaaccggcaaaccgacggtggcgctgtttttaggttataccccggcggtggcccgcgacgagaatgtctggtttgcctcctcgctggatgaggccgcacgcctggcttgcctgctttcacgcgttacggcgcgacgtaacgcgataatgcctgccagcagcggatttatttgcggtttgtataccggcggtacgctggctgccgaagcggcgggattacttgccggacaccttggcgtggaagccgatgatgcccatcatcacggcatgatgctggacgccgatggccaccagattattgacctcggcgatgatttctacaccgtcgggcgtccccatccgatgatcgacccaaccttacgcaaccagttaattaccgatctcggcgctaaaccgcaagtgcgtgtgctgctgcttgatgtcgtgattggcttcggtgcgaccgccgatcctgccgcctcgctggtaagcgcctggcaaaaagcctgtgctgcgcgttcagacaatcaaccactgtatgccattgccacggtgacaggcactgaacgtgacccgcaatgccgctcgcagcaaatcgccacgctggaagatgcggggattgcggtcgtgagttcgctaccggaagccaccttgctggcggcagcgttaattcatccgctctcgcctgccgcacagcaacacacaccgtcattactggaaaacgtcgccgtgattaacatcggattacgcagttttgcgctggagctacaaagcgccagcaaaccggttgtgcattaccaatggtcgccag

SEQ ID NO: 151 - DNA, 12412 bp, Escherichia coli
  Strain O55:H7
  modified_base (2238)..(2238): a, c, g or t
  modified_base (2241)..(2242): a, c, g or t
  modified_base (5129)..(5129): a, c, g or t
  modified_base (8672)..(8672): a, c, g or t
  modified_base (8754)..(8754): a, c, g or t
  modified_base (8789)..(8789): a, c, g or t
  modified_base (9623)..(9623): a, c, g or t
  modified_base (9707)..(9707): a, c, g or t
  modified_base (10579)..(10582): a, c, g or t
  modified_base (11241)..(11244): a, c, g or t
  modified_base (11246)..(11247): a, c, g or t
aaaaaactggctcgtttattagaacgtttgcaataaggggttctcatgtttacatcagtggcgcaagccaatgctgcggttatcgaacaaattcgtcgcgctcgtccacactggctggatgtgcaaccggcttcttcacttatcagcgaactaaacgagggcaaaacactgcttcacgccgggccgccaatgcgctggcaggagatgaccggacccatgaaaggggcgtgcgtgggcgcatgtctgttcgaaggttgggcgaaagatgaagcgcaggcgctggcaatactggagcagggggaagtgaacttcattccttgtcaccatgtgaatgccgtcgggccaatgggcggtattacttctgccagtatgccgatgctggtggtcgagaacgtgaccgacggcaaccgggcgtactgcaacctcaacgaaggtatcggcaaagtgatgcgttttggcgcttacggcgaagatgtcctgactcgccatcgctggatgcgcgatgtgttaatgccagtattaagcgcggcgctggggcgcatggagcgcggtatcgatcttactgcgatgatggcgcagggcattacgatgggcgatgagttccatcaacgcaatattgcttcctcagcactgttaatgcgtgcgctggccccacaaattgctcgcctcgatcatgataaacagcacatcgcggaagtgatggatttcctcagcgtgaccgatcagttcttcctcaacctcgcgatggcttactgcaaggcggcgatggatgctggcgcgatgatccgcgcaggcagcatcgtcacggcaatgacccgcaacggcaatatgttcgggattcgggtaagcgggctgggcgaacgctggtttactgcgcctgtaaacactccgcaaggtctgtttttcaccggcttctcgcaggagcaggcgaacccggatatgggcgatagcgcgattaccgaaacctttggtatcggaggtgcggcaatgatcgcagcgcctggcgtaacgcgctttgtcggtgcgggtggcatggaagcggccagggctgtatctgaagagatggcggaaatttaccttgaacgcaatatgcagttgcagatcccaagctgggattttcagggcgcgtgcctgggactggacattcgtcgcgtggtagaaaccggcattacgccactcatcaataccggtatcgcccataaagaggcggggatcgggcagattggcgcaggcaccgtgcgggcaccgctggcgtgctttgaacaggcgctggaagcactggctgaaagcatggggattggttgaggaacgcgtaatgacgatcatccatcctctgcttgccagtagtagcgcaccgaattatcgccagtcctggcggttagcgggagtgtggcggcgggcgattaacctgatgacggaaagcggcgaactgttaacgctgcatcgtcagggtagtggtttcggccccggaggatgggtgcttcgccgtgcgcaattcgatgcgttatgcggtggattatgcggcaatgaacgaccacaggttgtggctcaagggattcgcctcgggcgtttcacggttaaacagccacagcgttattgtttgctgcgtattacgccgcctgcgcatcctcaaccacttgcagctgcatggatgcaacgcgcggaggaaaccgggcttttcgggccactggcgttggcggcaagcgatccgctgcctgctgagttacgccagtttcgtcactgttttcaggccgcgctcaatggcgttaagaccgactggcggcactggctgggtaaaggccccggattaacgccaagtcatgatgacacgctgagcggaatgctgctggcggcctggtattatggtgctttagatgcgcgctccggtcgtccgttttttgcctgttccgacaatctgcaactcgttaccacagcggtgagcgtcagttatttacgttatgccgcgcaaggatatttcgcctcgccactcctgcactttgttcatgctctgagttgcccgaaacgtaccgctgttgcgattgattcgctgctggcgctggggcatacgtcaggggcagatacactgctggggttctggcttggccaacaattattacaaggaaaaccatgaaaacactggttgtagctcttgggggcaacgccttactccagcgcggtgaggcgctgacggcagaaaatcaatatcgcaatatcgccagtgctgtacccgcgctggcncgnntggcccgttcttatcggctggcgattgttcacggcaacgggccgcaggtggggctgctggcattgcagaatctggcgtggaaagaggtagaaccgtatccgctggatgtgctggtggcagaaagtcaggggatgattggctatatgctggcgcagagtttgagcgcacagccgcagatgccgcctgtcacgacggtgcggacgcgcattgaagtttcgcctgatgatccggcgtttttgcagccagagaaatttattggtccggtttatcagccagaagaacaagaggcactggaagcggcttacggctggcagatgaaacgtgatggtaaatatttgcgccgggtggtggcgtctccgcaaccgcgtaaaattctcgacagcgaagccatcgagttgttgctcaaagaggggcatgtggtgatttgcagtggcggcggcggtgtgcctgtgacggatgacggagcagggagtgaagcagtgattgataaagatctcgccgctgcgttgctcgccgagcaaattaacgccgatggactggtgatcctcaccgatgctgatgcggtatatgaaaactggggaacgccgcagcaacgtgccattcgccatgccacaccggatgagttagcgccatttgccaaagccgatggttcgatggggccgaaggtaacggcggtgagtggttatgtcagaagccgtggtaaacccgcgtggattggggcgttatcgcgaattgaagagacgctggcgggcgaagcggggacctgtatttcgctgtagtgatgagagcatccggcaatcggcgcaccatgcctgatgcgacgcttgacgcgtcttatcaggcctacaatgggtaccggatcggtgtaggccggataaggcgttcacgccgcatccggcaatcaaatgagcaccaggttaactgaacttactctgcgcccacatcacgccgctggcatattccggcggcagcagcgggatcaaggcttccagcgtcgcggacagacgcgatgtgtcgctgtcggtcaaattcagatgccccactttacggcccggacggacttctttgtcgtaccagtgcagatgcaccagcggcagtttcagccagtcataattcacatcgctaccaatcagattgatcatcaccgacggattattcaccactggttgcggtaacggcagatcggtaatcgcccgcagatgtagctcaaactggctgatgctggcaccgttttgtgtccagtgaccgctgttatgcacacgcggtgccagttcgttgatcagcagaccttgcggggtgacaaaacactccatcgccatcacgcccacatagcccagctcctgcataatcgccgacagcatctcttcggcttgcgcttgctgctgcgcattggcctgcggaaaagcgacgctggtgcgcaaaataccgtcctgatgcaggttatgcgtcagcggataaaacacggtgctgccatcaaagcagcgcgcgccaaccagcgacacttcaccagagaagtttatgccctgctcgacaatacattcgccgtagcattcagccggtaactgctcggtttcatcggcgcgtaaacgccattgaccgcgtccgtcatagccaccagtgcgacgcttaacaatcgccagctcacctaaacgatcaaacaccgcaggccactcgctgcgttcggcaagtaactgccacggtgcagtcggcaggtggagcttatcgaaaagctgcttctgagtcagacggtcagcaataatcgggaacacatcgcggttcacaaaggccggatggcgcgccagctcgcgggttaatgctgtttccggccagcgttcgatctcagcggtaatcacgctttgttgaaaaggcaccgccgccggttcagcgtccagcccgaccggccagacagcaatgcctaacggttcgcctgcctgacgcagcatacggcctaactgcccgttaccgaggacgcaaacctgtttcatgccgcacctcgcgggtccgggttttccagcacttcatcagtttgtgctttgcgccagtcattcagacgctggtgcagttctttatcatgagtcgcaagaatttgtgctgccagtaatgccgcgtttgccgcgccagctttaccaatcgccagcgtacccaccggaatgccgcgtggcatttgtacgatggagtagaggctatcgacaccgctcagtgcggcgctctgtactggcacgcccagcactggcaccagcgttttggcggcaatcatgcctggcaggtgcgctgcgccgcctgcgcccgcaataatcacctgataaccgttctcttcggcactttcggcgaagctgaatagtttatcgggggtgcggtgagcagaaaccacttcaacgtggtgcgggacattcaggatttcgaagatttcggcggcgaactgcatggtagcccagtcgcttttggaccccatcacgatggcgacacgcgccggattattgcgggaagacatgcgtcttaaaactcctgtggtgcacaactctcggctttagagggcacagagaatagcacggaaagagagcaaggaaaacggttgcgtggctgtgaaatcagcaaagttgcgggttttttaaaacggaaaatgaatcagctcaacgtcatccgccgtgactttcaccatcgaaccttccgtatgccaggcacccagtaccacgcgaaaagcaggttgctgattggcgataagttcatgcaccgccgggcgatgggtatgcccgtggatcagccattgcacctgatgtttttccatcgcactgactaccgcgttttggttaacgtccatgatcgccagcgatttactgctgttggcttctttactgttcgcgcgcattcgcacggcaatgcgtttgcncacaaacaacggcagagcgaggaatagcgtttgcagccagggtttgtggactttggtgcgaaaagcctgataacccgcgtcatcggtgcacagcgtgtcgccatgcataatcagcacccgacgaccataaagttcgagcactttttcttccggcaataacgtcatgccactttcacgggcaaagcgtttgccgagcagaaaatcacggttgccatgaatgaaataacagggaacgccggaatcggacaccgctttgatcgctgccgccatctggcgatggagtgggttgggatcgtcgtcgccaatccatgcttcaaacagatcgccaagaatatacagcgcgtcggccttgcgggcttctcccgctaaaaaacgcagaaaaccggcggtgatcgccggttcttccacgcagagatgaagatctgcaataaagagtgtcgccacgattactcgctaacggtcacgctttcaatgataacgtcttcttttggcacgtcctggtgcataccgctacgaccggttgcaacacctttgattttgtctaccacgtccatgccttcaaccacttcagcaaacacgcagtagccccaaccttgcaggctttcgccagagaagttcaggaagtcgttatcaaccacgttgatgaagaactgtgcagttgcagagtgcggagcctgagtacgggccattgccagcgtaccacgggtatttttcaggccgttgttggcttcgtttttgatcggttctttggtggctttttgtttcatgcccggttcaaaaccgccgccctgaatcataaagccgttgataacacggtggaaaatggtgttgttgtaaaaaccttcgcggcagtagtccaggaagtttttaactgtttcaggtgctttatcgtcaaaagttttgatgacaatatcgccgtgattggtgtggaaagtaaccatttttgcatcctgttccgtttgattggtgcttcaacccagttcgggtcatatatagggtggtgttatagcataaccgcacgatcggatcatcacgcaatgtatgctgattcgcgcgggaaatatgggtattatacgcaactcaattacccacacatgtctaaacggaatcttcgatgctaaaaatcttcaatactctgacacgccaaaaagaggaatttaagcctattcacgccggggaagtcggcatgtacgtgtgtggaatcaccgtttacgatctctgtcatatcggtcacgggcgtacctttgttgcttttgacgtggttgcgcgctatctgcgtttcctcggctataagctgaagtatgtgcgcaacattaccgatatcgacgacaaaatcatcaaacgcgccaatgaaaatggcgaaagctttgtggcgctggtggatcgcatgatcgccgaaatgcacaaagattttgatgcgttgaacattctgcgcccggatatggagccgcgcgcgacgcaccatatcgcagaaattattgaactcactgaacaactgatcgccaaaggtcacgcttatgtggcggacaacggcgacgtgatgttcgacgtcccgaccgatccaacttatggcgtgctgtcgcgtcaggatctcgaccagctgcaggcaggcgcgcgcgttgacgtggtcgacgacaaacgcaacccaatggacttcgttctgtggaagatgtcgaaagagggcgaaccgagctggccgtctccgtggggcgcgggtcgtcctggctggcacattgaatgttcggcaatgaactgcaagcagctgggtaaccactttgatatccacggcggcggttcagacctgatgttcccgcaccacgaaaacgaaatcgcgcagtccacctgtgcccatgatggtcagtatgtgaactactggatgcactcggggatggtgatggttgaccgcgagaagatgtccaaatcgctgggtaacttctttaccgtgcgcgatgtgctgaaatactacgacgcggaaaccgtgcgttacttcctgatgtcgggccactatcgcagccagctgaactatagcgaagagaacctgaagcaggcgcgtgcggcgctggagcgtctctacactgcgctgcgcggcacagataaaaccgttgcgcctgccggtggcgaagcgtttgaagcgcgctttattgaagcgatggacgacgatttcaacaccccggaagcctattccgtgctgtttgatatggcgcgtgaagtaaaccgtctgaaagtagaagatatggcagcggcgaatgcaatggcatctcacctgcgtaaactttccgccgtattgggcctgctggagcaagaaccggaagcgttcctgcaaagcggcgcgcaggcagacgacagcgaagtggctgagattgaagcgttaattcaacagcgtctggatgcccgtaaagcgaaagactgggcggcggcagatgcggcgcgtgaccgtcttaatgagatggggatcgtgctggaagatggcccgcaagggaccacttggcgtcgtaagtaattgcgctattgccggatgcgagttttcgcatccggttatcgtctgcgccaccacaacattcccatcagtagcatccccggcaaccacacccacatcaattcagaaataatcacctgatgcccgtacgctgtggtgtaacgagacaatgcaaacggcgcgactttaatcacctgccagggagcgaaaaagcgttcatctgaccacggccacagccagccaacccctttaccgccagtggttaccgaatccagcaagctgtgcgatagcaacgagacggttaaaaacagccagcagcgaatcagcccagccctgaaccatcgacgtccaatcagcacacataacagcgggacaacaaacgcaaacaccagcgaatgggtaaacccgcgatgaccaaaaacattgccgtaagcaacgccaaaattaaacgacaagacgtcggcatcgggcagcatcgccaggatgattccggcaaataacaggcgcggagggatgactttcgaacccaaccctaaaccaatgcataggggaacggcggcgtgcgtaataacggttggcatgatggtcgcttcggcaaaatgtcgatgctatcagcatggatgaacggggcgtagagggcaaaagtctgaaaagagaaccggcctgttgatacaggccgggaaagggatcaggcaacaacctgtacgctgtgacctgcaaaactcactgtctgcccggcgacgattttgcagcgtttgcgcgtttcaaccgcgccgtcgactttcacctggccttcggcaatcgcgattttcgcctgcgcgccgctttcgctccagccttccagtttcagcaagtcgcacagctcaacgtgcggatgtttacctaaagaaaatgtcgccatgttactcaccctgtggatcatgatattcaacgcacgcctgtagcgtgttttcaatcagcgtggcaaccgtcatcgggccaacgccgcccggaacaggcgtaatgtatgaggcgcgtttagccgcgtcttcaaacacgacgtcgcccacaactttgccattttccanacggttgatgccgacatcaatcacaattgcgccttctttgatccagtcaccaggaataaagcccggcttgccgacggcaacnatcaacagatcggcattttctacgtggtgacgcanatttttagtgaaacggtgagtcacggtggtggtgcaacctgcgagcaacagttccatgctcatcgggcggccaacgatattcgatgcgccaatcaccacggcgttgaggccgaaggtatcaatgttgtaacgctcaagcagcgtgacaataccgcgcggggtgcagggacgcagacgcggcgcgcgctggcacagacgaccgacgttataaggatggaaaccgtctacgtctttgtccgggtgtatacgttccagcactttgacgttatcaatacccgccggtaacggcagttgaaccagaatgccatcgatggtgttgtcggcattcagcgcatcgataagctccagcagctccgcttcgctggtggtttccgggaggtcataagagcgggagacgaacccgacttcttcacaagccttacgtttgcttgcgacataaatttgcgatgcagggttactacccaccagcacaacggccagtcctggtgcccgcagtccggctgcaatacgcgcctgaactttttgagcaacttcagagcgcacctgctgcgcaatcgttttaccgtcaataatctttgctgccatcagagagaggattccatctgttacgtaggtcgaaggggatgcgcctattttgtcagaagcggggcgcgctgtcaggtttcgtttcagatttatcgcgtgaagcgacctcttgcgaaggttaggcgcactgtcgctgagattgaaagcttcatttttcgtccatgatggcgttgtaaatctggaactgatttatttccttgtttaaggattaagataatttaagaaatacctgacaatataaaaagaatnttcagcctggtaatttaccgcttcaggtctatatttgtgttgaatatattttgcgcggaagtattcatctaacggggctctctnttttttagaatagagtgcatattttcaattaagacattcttagaggataaaaaggaatttactactatcagtgtcttaaataaagtaatcggttatatacggatgtggagtcgataaatgagattgaaggaatatatatgaaattaagatttatttcgtctgcgctggctgccgcactattcgccgctacgggtagttatgctgccgttgtagatggcggtacaattcactttgaaggtgaactggtgaatgctgcctgttcagtgaatactgactcggcagaccaggttgtcacactcggtcaatatcgtaccgatattttcaatgctgttggtaatacctctgcattaattccattcaccattcagttgaacgactgcgatcctgttgttgccgctaatgctgccgttgcattttctggtcaggctgatgcaatcaatgataatttattggccattgcatccagtaccaatacaacaacagcaacgggtgtcggtattgaaatacttgataatacatccgcaattctcaaacctgatgggaatagcttctcaaccaaccagaacttgatccccgggaccaacgttcttcatttttctgcacgttataaaggcaccggtacaagtgcatcagcagggcaagcaaatgctgacgcgacttttattatgagatacgaataatcaaaaccacgttgttttgaattatatatcacgtcttataacaaagtaatgtaccggttgtctgaagcggtatggtggcaatgtaaatcgaaatcatgttcactttgtatcatgccgctttattaaatgaaaagggaatgatgtgttgtaagaaaccaaagcaatcatttctttatatttcttatttttgcnnnnaggaatacacaaggcgtattaactatgatgactaaaataaagttattgatgctcattatattttatttaatcatttcggccagcgtccatgctgccggagggatcgcattaggtgccacgcgtattatttatcccgctgatgctaaacagactgcggtatggattagaaatagccataccaatgagcgttttctggtcaattcgtggattgaaaacagcagcggtgtaaaagaaaagtcattcatcattacaccgccactatttgttagtgaacccaaaagcgaaaatactttgcgtattatttacaccggtccaccgctggcagcagatcgtgagtctctgttctggatgaatgttaagacgattccttcggtagataaaaatgcattgaacggcaggaatgttttgcaactggcgattttatcgctcatgaagttatttctccgtccaattcaactacaagaattacccgcagaagcgccggatacactcaagttttcgcgatccggtaactatatcaatgttcataatccatcacctttttatgtcaccctggttaacttacaagtgggcagccaaaagttggggaatgctatggctgcacccagagttaattcacaaattcccttaccctcaggagtgcagggaaagctgaaatnnnngnncgttaatgattatggttcagtaaccccggtcagagaagtgaacttaaactaaccgaatcatctgacaatatcagagctaattatgaaaatacccactactacggatattccgcagaggtatacctggtgtctggccggaatttgttattcatctcttgccattttaccctcctttttaagctatgcggaaagttatttcaacccggcatttttattagagaatggcacatccgttgctgatttatcgcgctttgagagaggtaatcatcaacctgcgggcgtgtatcgggtggatctctggcgtaatgatgagttcattggttcacaggatatcgtatttgaatcgacaacagaaaatacaggtgataaatcaggtgggttaatgccctgttttaaccaggtactccttgaacgaattggccttaatagcagtgcatttcccgagttagcccagcagcaaaacaataaatgcatcaatttactgaaagctgtacctgatgccacaattaactttgattttgcagcgatgcgcctgaacatcactattcctcagatagcgttgttgagtagcgctcacggttacattccgcctgaagagtgggatgaaggtgttcctgctttactcctgaattataatttcaccggtaacagaggtaatggtaacgatagctatttttttagtgagctcagcgggattaatattggcccgtggcgtttacgcaacaatggttcctggaactattttcgcggaaatggatatcattcagaacagtggaataatattggcacctgggtacagcgcgccattattccgctgaaaagtgaactggtaatgggagacggcaatacaggaagtgatattttcgatggtgttggatttcgtggtgtacggctttattcttccgataatatgtatcctgatagccagcaagggtttgccccaacggtacgtgggattgcccgtacggcggcccagctaacgattcggcaaaatggttttattatctatcaaagctatgtttcccccggcgcttttgaaattacagatttgcacccgacatcttcaaatggcgatctggacgtcaccatcgacgaacgcgatggcaatcagcagaattacactattccgtattcaacagtgccaattttacaacgcgaagggcgt

SEQ ID NO: 152 - DNA, 1527 bp, Escherichia coli
  Strain O55:H7
  modified_base (944)..(944): a, c, g or t
gacggcgggcgattttcgtagcagtaatagtcagcaatcatcgcctttcttttttcagggcacggcactcggcggtttaccacaggaatttactgcctacggcgggacgcaattatctgccaattacaccgcctttttattagggctggggcgcaacctcgggaactggggcgcagtgtcgctggatgtgacccatgcgcgcagtcagttagccgacgacagtcgtcatgagggggattccattcgcttcctctatgcgaaatcgatgaacaccttcggcaccaattttcagttaatgggttaccgctattcgacacaaggtttttatacccttgatgatgttgcgtatcgtcgaatggaggggtacgaatatgattacgattatgacggtgagcatcgggatgaaccgataatcgtgaattaccacaatttacgctttagccgtaaagaccgtttgcagttaaatatttcacaatcacttaatgactttggctcgctttatatctctggtacccatcaaaaatactggaatacttcggattcagatacctggtatcaggtggggtataccagcagctgggttggcatcagttattcactctcattttcgtggaatgaatctgtagggatccccgataacgaacgtattgtcggacttaatgtttcagtgcctttcaatgttctgaccaaacgtcgctacacccgggaaaatgcgctcgaccgcgcttatgcctcctttaatgccaaccgtaacagcaacgggcaaaatagctggctggcaggtgtaggtgggaccttactggaaggccacaacctgagttatcacgtaagccagggtgatacctcgaataatgggtatacgggcagcgccacggcaaactggcaggccgcttacggtacgctgggggtcgggtataactacgaccgcgatcaacatgacgttnactggcagctgtctggcggtgtggtcggacatgaaaatggcataacgctgagccagcctttaggggataccaatgttttgattaaagcgcctggcgcaggcggtgtacgcattgaaaatcaaactggcattttaaccgactggcgcggctatgcggtgatgccgtatgccacggtttatcggtataaccgtatcgcgcttgataccaatacgatggggaattccatcgatgttgaaaaaaatattagcagcgttgtgccgacgcaaggcgcgttggttcgtgccaattttgatacccgcataggcgtgcgggcgctcattaccgttacccagggcggaaaaccggtgccgtttggatcactggtacgggaaaacagtaccggaataaccagtatggtgggtgatgacgggcaagtttatttaagtggtgcgccattgtctggtgaattactggttcagtggggagacggcgcgaactcacgctgcattgcgcactatgtattgccgaagcaaagcttacagcaagccgtcactgttatttcggcagtttgcacacatcctggctcataaaggaaattatcaat

SEQ ID NO: 153 - DNA, 1519 bp, Escherichia coli
  Strain O55:H7
  modified_base (1351)..(1351): a, c, g or t
  modified_base (1357)..(1360): a, c, g or t
  modified_base (1515)..(1516): a, c, g or t
ttattattggcgatggcatgtttgtgtctggcaaacatatcctgggctactgtttgtgcaaatagtactggcgtagcagaagatgaacactatgatctctcaaatgtctttaatagcaccaataaccagccagggcagattgttgttttaccggaaaaatccggctgggtaggtgtctcagcaatttgtccacccggcacgctggtgaattatacataccgtagttatgtcactaactttattgttcaggaaactatcgataattataaatatatgcaattaaatgattatctattaggtgcgatgagtctggttgatagtgtgatggatattcaatttcccccgcaaaattatattcgtatgggaacagatcctaacgtttcgcaaaaccttccgttcggggtgatggattctcgtttgatatttcgtttaaaggttattcggccctttattaacatggtggagatccccagacaggtgatgtttaccgtgtatgtgacatcaacgccttacgatccgttggttacacctgtttataccattagttttggtggccgggttgaagtaccgcaaaactgcgaattaaatgccgggcagattgttgaatttgattttggtgatatcggcgcatcgttatttagtgcggcagggccgggtaatcggcctgctggtgtcatgccgcaaaccaagagcattgcggtcaaatgtacgaatgttgctgcgcaggcttatttaacaatgcgtctggaagccagtgccgtttctggtcaggcgatggtgtcggacaatcaggatttaggttttattgtcgccgatcagaacgatacgccgatcacgcctaacgatctcaatagcgttattcctttccgtctggatgcagctgcggcagccaatgtcacacttcgcgcctggcctatcagtattaccggtcaaaaaccgaccgaagggccgtttagcgcgctggggtatttacgcgtcgattatcaatgaggtacggagaatgagaagagtattctttagctgtttctgcgggttactgtggagttccagtggatgggcagctgaccctttaggaacgattaatatcaatttgcacggtaacgttgttgatttctcctgtaccgtaaacacagcggatattgataagacggtagatttaggcagatggcctacgacacaattactgaacgctggcgataccacggcactcctcccttttagcctgcggctggagggatgtcctccgggttcagttgcgattttatttacgggaacgccggcatctgatgccaacctgctggctctggatgatcccgcaatggcacaaaccgtcgccatcgaattacgtaanagcgannnntcccggctcgcactgggggaggcgagcccgactgaggaagtagatgcaaatggcaatgtcacactaaacttttttgccaattatcgagcgttagccagcggtgttcggccaggtgtggcgaaagcggatgcgatatttatgatcaattataattnntat

SEQ ID NO: 154 - DNA, 226 bp, Escherichia coli
  Strain O55:H7
tcgtataatttggcgtagtcgataagctctacaattgaatgcaaacctagcttgccataaawattagatttatgcgcactaactgttttattgctaagtaataacttatcggcaatttctttattagataatccgctaactagataacgtaatatggttacttcacgattagatagcacagtgaccgttgaactattcgtactacatttattgctttttatatagt

SEQ ID NO: 155 - DNA, 703 bp, Escherichia coli
  Strain O55:H7
  modified_base (666)..(666): a, c, g or t
gtttcgctgggaaaaaacgtgtatccggagaggatcatctgaacggcatgaaaaatatcattctgatcattgcatttactgacaaaaccgttagcaccagcttgtatcgctctgccagcataaaagcattctgatttcgatgataaaaataacactttcactgtgctctggatttgtttgatccttttcaggaaggtaaaaccgtctgttccgggcaagtctatatccataatgattaaatcaacaggacggggtcggagataatcgatggttatgcggtaatcatccgttttcaggacaatctgcaattcactgtttttttgcaacagaacttcaatagacattctgatgataggatgagtatccataatgatcaccgacgttggtttcatagttaccagtctcataggagcggacaattttccgttagggcggtaaattgtactttgatacatgaaaatacgggttttcttgattcagacgcgcagcggtgtgcgtttgtttgccgctatagcgaaataaatcagaaaatcagacgcggtcgttcacttgttcagcaaccagatcaaaagccattgactcagcaagggttgaccgtataattcacgcgattacaccgcattgcggtatcaacgcgcccttagctcagttggatagagcaacgancttctaagtcgtgggccgcaggttcgaatcctgcagg

SEQ ID NO: 156 - DNA, 8774 bp, Escherichia coli
  Strain O55:H7
  modified_base (262)..(265): a, c, g or t
  modified_base (1443)..(1446): a, c, g or t
  modified_base (1632)..(1634): a, c, g or t
  modified_base (1660)..(1661): a, c, g or t
  modified_base (1997)..(1997): a, c, g or t
  modified_base (2942)..(2943): a, c, g or t
  modified_base (5710)..(5710): a, c, g or t
  modified_base (6174)..(6176): a, c, g or t
  modified_base (6370)..(6370): a, c, g or t
  modified_base (8770)..(8770): a, c, g or t
ttctttatttatgcccgtcttatccgtttccgctttgcccttcaccacatcactttttgtcgctgtttggcgagataattcaacggtgtcaggccgtaaaacgccttaaaaacagagataaagtacgacgtgctgctatagccacataattgcgccacctgagtgatatttttgttatccatcaataacatctgtacggcgtaacgcatacgacactctgtgacaatctggctatagctggtattttcgttttttaatttcnnnntgagcaggctggggcttaaacatagcgaactggcgacaattcgcagattccagtaatgctgaatatcgctttgaataatgcggcagacgctgtcgcggacgctgctgcgtaagatatacatcagtagggcaataaaccgcgattgctcaagaaagttagacaatacggtaaaaagcaatgcgcgcgtcaactccgcttcgcagggtttgctgggttgctgcttgctgtggttggcggctagccggaacacttccggtgtacggctatgacaagcgataaccggggtagccagccgcgaccagggctttacacaggttaagttcttatttaaaaacaacagataatcgttgatgatgttacggttgatgtgggtgattaatacgtgatttaacgttgagagttcaatgacgttattgttgcacgcgaaggcggccaggtagtttttcggaagggtaaacgtagcatggttattgacgcttacctctacctctttttcggtcaggatcaccacgcaaggttcactgctgctcaattgcatttcgcactcctcagatatcagaaactccgctcaaaggatctatgcttcctgcatgagtgatcggcccgttcgccgataacgatcttctttctttagcacgctttttagcaattaatcttgatggaattctgacgagagcgaaagaggtaagccaggtcgtacccgacttacctggaggagatttaatactcgagaatgccgtgcgcgacgggcaaatagcgcagagagaaatagagagtgtctttaccgcaagaggaacgtttcgctaacagcgaggcaatttctgcgtccggtttcggtttcgctgtaaaggttttgcctttgccggcgacaaacagttcataaacaatgccgcttgctggggcggagctttggcaatcggcgctggcctgtagataacgttcacgctgttcagcggtaagtttatccacgccgctgccatcctgtacccagacattaacgccggttgctttaacgtgttccagcagttggcgatagccatctggcgacatgtttccggcgaaaaaactactgatataaaccggttttgctgaaacatcgctaatcagccgctgcgcgttgtttaaccatgttagcaaaggctgacgggcggcttcgctgcgccagttcaggtcgtcannnncagcgctgaagtaccagccatccggcgttacgccaggtacggcactccataatctggcttgctggagatcggcagccagcaggcgattaagatagctttccagcgccgcggatgactgtttctggtgcataaaaaattccggatcggcgttcagcccgacaatcagcttcaggccagcctgttgcnnngctgcggcccgcttaaacaataacgnncgctgttctggctgggtgaatgcatcgccgtaacgggtccattgcaaaaccagggtatcgaagccttgcaaacgtaactgactcatcagcccctgccactgggtatcggtaacctgactatcacggttttgtggttgccagataatacctttcatcgcaaaggaaaaagggctgaccaaaagcagtgtcagcaatacgaaaatgaacttacgcatttaccagtgcactccaatggtgagaaacgcgttgttgcgctctccgttacgttgattaatcgccttaaaggtatgttgatactcgacgccgagactgactttgtgcggccaggcgtcgtantgcgtctcgccggtccagatattccagcggaccccgacaccgccaagctgcgcgccctgagtgcctttatcacgatagccgttgtcctgaacgtgagcgtaaggctcaatagtctgtccgttagctaccttctgatgccagctgacgcgataatctgccgtccacgcctgaatatcctggcggatatattgcgccgcatcgaggtacaggttttgggcaaaccagcctgaaccgttcgggtgccattcgtcgctgtatttgccgccattaaagaatgaggcgctggcgcgcagcatggtatcggatgcgccattttgcccgttcagcggcaactgctgttcgacggcgaggaaaaagatctgatcgcgcagcggcttccagcgcagaccggtgccggacatcggatttttcaccggcatcatcaccccgttttctccggtatcggcaaagaagcggctataaactgagagcaggtcgccttccagcagcatattgcgtccgatgcggtattcggcttccagttgcccgtagctacgatagcttttccctggcgctgcgccgccaacattattgttagcggtactcattgccccggaacgcaagccgatggaagaatcgaaactgaacgtccagcggcgaccgacctcctcatgcagacggcggaaattgaagcgttgctgattttgctctggggtcagtggggttatcagcgcctgattatcaatgtcatcaatcaccagccgggcgtagtgctgcgtcgcaggcatgtcatccagacgctggttcacataggccagttgtcggatcagtgccggatcgtccggtagccctttatgcgcctgttcgagcatttcccgcgactgtgcgatatcaccgctatcccacaaggcgtaaccaagcgctgcctgggtgttgctattattcggttccagttccagcgcggcnngcaaatcactcaccgcggccgggacattatgacgttggcgataaattgtcgcccgcgcaacgtaagcgttggcagaaggcgcaatattgattgagcgcgtgagatcgttcagtgcgagttccggctgaccaggaatgtaacgttgcgcatgcagccaccagtagagggcattgcttcccagtccacgttgttctgcctgttgtagccagcgatcgcgagccgcaccatttcctgccgcctgggcggtattggcagcagcaagcagatcctcattgctcatgtcgtgaagactgattttctgcctggccgccagtgcggtggcgtagtcctcaacctgatacgcctgataggctaccgcacgatgttgccaggcgttcggttgtcgttgttcggcctgaagccatgcatacaacgccacaccgggtagcgtgtcccgataacactttgccagacggttccaggcggcggcatcgtaggaaggcgacatatcgcccagcaagcgaactattgccgggcaattatctgcaatacccggcaactgactttgccactgacgttgctccgccagcggtaagggtttcgataaaatcgccaccttcgccggcgttgccaggtaaggatgactttccagcagagacgccagtcgcgccattaaagtctggctgatacgcgcatcgccctggaaaggatagcgttgcagcaataaatcggcagcttcccgtgactgctcgttctgcatcagttgccaggttagttgatccaggcgggtaagatttgccgattcttgctgatacagcaagcgtgccagacgcagagcttcagccttgttacgggtcgccacgctgacagcataacgctcctcaagcatttcattggcggggagggtggcgagcagtttttgcgctgcgtcgtactgaccttcttttaacagcaccggtagcgtcgcgccaacaacatactggcggttatcggcaaactgcaccgtataattcgccaatgcctgaacggggttggcgctgtatttagataacagatagagccaacttttctcttgtgcgtccgtggtaaacagcggcttattttcaatgagataatgctggaggcgtgctttttcgccacgataagccagcgcggtcgcgtaagtaatatatgactgaggatcggtgaagatcccctgtgattgcagtgctaggatccgatcgtccagctgcccggcaagaagcacgtcaaaccactgacggcgttctgccgcgcttaatgtgttctgctggcgtgcttcattgtatagcgtatctgcctgggaccattgtttcaggtagattgcccgttgcagcagatcggttcgcagcgtttttccttccggcgatgcagcaaacgtcgcatcgttcagttgcgctctggcgacaggtaactgtgccagccgcagggcattctgcccgacttcactgcgacaacgcagggtcggcgcagcatcgcacgctttttgctgggcaagcagttcttcaacagttgtaatgcttttcacttcaaccggaatagccgccagactgcgctcaagtcgggcatctcctgggtgacgtttcagttgatcctcaagcaacagccgcgcccggtcatcatgaccaaaatggcgataggcttccgcaaggtataaagtcagcggaatattatccggcacctgctggtgtatatattcaaattcgcggatggcggttgcttcgtcgttatttttctgtgccttcagcgccttatcgagacggggataaataacaaaatggcgataatcgctcagccccagctcttctgcgctggtgccgatattgtctgcgagtgcgctggtactcaataaagacgtcagcagtaaaccagaccatccgatgacgcgattaaggttattctccttcatgttcggactccagttgcgcaacctgttctgtgtttaaacctgctttgagtaatagtgattgcatcgaaacttgtaattcgcgttgaattgtcaggacgcgatccaacgtttcctggctgataacgccttcggtgaccaaaaacttgccgagcggcagagaactgcgttcatggcgcaataacaacacgttaattgctgaacgattaatatgaccgagcgtggtcagtatttcggcgaacaggaactgatgcggcacatattgccgccagatttcaccggcctgctgttccgtgagccactgatgctgaaccgcattgtacaacattgcccgcggatcgtgaccgcgtcggcgtgcataccagtgacgtaaccccgtgacaatttgtccccgcagaacaatgacgtaacgcactttgcgtccgactttacgcgtcagggccgccagcgaaaccgggtcaataccatcttcactgccgacaattaactcatcattttccagacgcagcggcagtaccgcataatgcagcgccacggaggccggcatttcggcaatcagcgaggacgggatctgccaggcatcgatggattcccacgccacgccgttttgctctgccagcgcctgtgccagctgctcggcgctaatcagcccctgcatcagcattgaaccgcccaggcgtagaccttcgacgcgattacgcagtgctgtatcgagctgttcttcagtgatgacctgattttccagcagaatttgacctaacgggcgcaacgagcgggtatcgccagtgacgctggggaagtcatgcgttgttttatcccacgcgacgcgacgtggatcgccgtgttgaagtacctgttttaacncgcgccagttggccataaagttaatcaggttgccccagaaaagacgcaggacagatagtagcccctgcgtcaggccgtagtagccagtgacgaaaatcacccgctgcacgatgcggttaaccatcaagccaaagtttagccacagcagggtcattaaccatgcgctgccgctaaaaatagaaaggaaatgccaggcatcgggccacaaactttcatacgccagcaacagcaaaagctggatcatcaccagcattgcgaggaagctgacaaagttactgattgcccctttgcggtcgcgccagagaaagtagttcagcgtcaggctggaggtccatttatgggttttaaagccctggaaaacaatgccgatgatccagcgagatttttgtcgaaccgcagtcgaaaaggtatcggggaaatattcgcgcacgcagatcatgtttgacgtccgtgcgtgctgtaannntttacgctgctcgcgttctttggcttcgtccaccaccggaaaacggacaaaaatttccgtcatacctttttctttcaggcggaagccaatgtcgtaatcttcagtcagactctgcacgtcgaaagcaataccgtcaccgtcagctaacagagcggtcacggcgcggcggctgaaacaggtgccgacgcctgcgntgggcacttgtccggcgagggcttcacgcaccggaacatctttgccatgcagctctgaaaactcatcaatgtaagtcatgctggtgaagtgcgtccattcgcgttcaaacggatacaccgggatctgaatcagatctttacgctcgaccagatagttgaacagacgcaattccatcggtgaaatcacatcttcggcgtcatgcagaataaaaccagcaaaagcgaaattggcgctacgctcaaactgggtgatggcgtccagcacgttgttcagacagtcggctttgctggtggggccaggacgcgcgcagactaccttatgcacattcgggaagcgagcgcacacttcgtcaacatcacgctgagtgtccgggtcgttggggtaggtgccaacaaagatatgatagttttcgtagtcgagcgtggtcgccgccagctcggccatattgccgatgacgcccgtttcattccacgccggaaccataatcgctaacggtttttcatctggtttatacagttcgcggtaactcattcgcgggtagcggcgataaacactcaacttgcgtttaatgcggcgtacccagtagacgacatcaataaaaaaatcgtccagcccgctgatgaacatgatgaccgctaacgttatcgcgattacttttaagccatagagccaggtagcaaaaacatcaagaagccagtccacacaaaaaccttacattaacgctggttatgtttagggtggcgtatattaaggttttttatgaattgtgacagctttttaccattaataggcatgactattgcggcacgttatttttacactggttataaaagttgccgtttgcgtagaatgtagacaaaagcgtggtgtcaaggaggggaggttaacgtcatagtgaagaggagtggtggcaccgatcaggtcatgatgtagtggaagtgcctggaggtgagcaggcagggcaagattacgaaagcccgctccccgcaaagactgacgccagatagtttctgtccatggctgcttttcgcatcttacgtcttaaccctgccttgaataccttatcattcgtcaaaatattaatagcaatgtgccgtatccctgaaaataattctgctgcatttcctcttcttattttgcagtcgtcttcattcactaccacgtccagacgccagtgcagcttattctccacgtgccagtggtttcggattgctgtggcgaacttctctgcggttaaatcagcagaactgatataatatctgaccgtcatttctggctctttcttttgttctgctattatggaccgaaaggagactgccacgcataatttcttcagccctttccattcaaacgtgaaatcaataagttcatcagggacatcgcaaacaatatgaagacggatttcttctctgccgtgactcttttcactcattgcgtaactgtcatgctctggattatttaattctttcagcggaaatttttcctcaaaggctttatttagccgcccctggtttccttttaccgcgaataaataatcacctccctgtttttgtatcttctctgcaatatctttctggcaacccatcgcatcagttgtgatgatttttcctttaatatccagcatgttaagaagttctgggatagctgtaatctcattagatttctcatccgtcttgatctgtccgatgaccagactgtgcattgttgagaacgcactaatgacatgaatcgctctcctgcggcgactcttgtcataagagtgccggagcgtttttccatcaattgcaatgacgtctttatcatctgaagaatggcagtcacgcatccagttaataaagcactcgtgaaattttgcaggactgatacaggatacaactctggcaatggtatcgtgaacaggaataccattttcaaaatcaccatattgcttcaaaaaattgagatgtgtttcccctaaatcctctatatcttcccagccttctgcaccagaaataacggcacaaatagtcaacagtagaatatccgataatttatgttccactttccaggcttgtctgtaatcagggataatagaaatatgttccatcaattttttaagttccattttgttctccttaattatgtaaggagtatttgatcatatgtaagctgtgaaaaacagttttagataataaggaatatctcaattattgaacatttagtgcgaattatttagtacaaaaaagcggcgttaggtgatctttccctggcctctgtgcgatgtacgccagcggtctgtaaagaaaccgaacaccttataacaaaacctctaacgtagtttataatacatcaggaatattaataaaaccttctgggtcagatatctcaataaatatcatatcaggctcaaaagtttcagngact

SEQ ID NO: 157 - DNA, 814 bp, Escherichia coli
  Strain O55:H7
  modified_base (209)..(209): a, c, g or t
  modified_base (807)..(807): a, c, g or t
  modified_base (811)..(812): a, c, g or t
gaaattaaccaaccttgcttagaaccaatactaatagatttatagctgtaattggcatgtagactatttttaatataaggaatttcccttaactctaactcacgccgagccaagtcaagagccatttcgatagttattttgttatgttttatcaatttattagtcccatcatgaatttttctctcaatccctcaacatattttatggcntgagctatttccgcttcattgaataaatttttactttttaatatttcatttagaacgtgttcctccctagataaacgtcctagtgcttcgtatgcttctcgtccaattttcgcaaattgcttagcatgaatcacttcatgatacacctcatataaggtagcatttttcctaagataaatattgcgaagaccataatcaaaagctgccctagcatttggtggaaaatatttatctgctttccttattactttaattcctagcttctccatttctttagcaatattgtttatttgactacgtgataaacgaaccccatccaggaaacccgtatgcccactaacacgacgaccatcgccaatatagtccatcaaactgctgattttagaacttgcagccaatcccagcggatcaacccacccacaaggattcggcacataccggtaagtctgctcccctccctgcaaccccagtggatcactcaccaggtacatcccggtttccggctcgtaatatcggaaccggttatagcacaaccccgattctgcatcctgccactgtcctgcatacagcaggccggggtcggcttccgcgtcccgcncccnncg

SEQ ID NO: 158 - DNA, 3789 bp, Escherichia coli
  Strain O55:H7
  modified_base (1216)..(1217): a, c, g or t
  modified_base (1935)..(1936): a, c, g or t
  modified_base (2773)..(2776): a, c, g or t
  modified_base (3759)..(3760): a, c, g or t
  modified_base (3775)..(3776): a, c, g or t
  modified_base (3779)..(3779): a, c, g or t
  modified_base (3788)..(3788): a, c, g or t
cgggtagtctgtgtctgcgggcaggctgagtgccagcccccacaggctggtctgtcccggccgccagacggttttaccttcactgttaaagagcatcagcggacggcccgtcaggtcgttcaccgcatgattcgttcgtgtcacccactgcggggccacggacgggtgcggctgccgtacccggctgcactgctggcttatcagctcaaagccgttaaacaccaggtgccgtacgctgtacagttcatcatcgcggtattcccggatttccgcaatactgtcgccgtcccacaggtacgtgaagcggattttcttccggtcgcagcgtttctctgttcgtctgccgctggcgtcgtggcggtattcccactgctcaccctgtgcgctgcaatacccggtcagctggtcccggctgtcccaccggaaccgctctgtttccgggcgatagccgtcacggtgtctggtgcggctgaccatccggcctgcggcgtcatagtcatactgcgtgtttccggcctgtttcagccggtggcctccggcatactggtcagtctcttcacttatccggtgcccgcccgcagactgcgccttcaggtagccacagctgtcatagccataggactcatcgccttcgccatagcccagcccggtgcctgaggctgtcaccgccgtgacctggccgttccggtcaagccggtactcccgctgtgtttcccgtccgtaatcttcccggctggtgacgcctgatacgttacccgcgctgtcgtaacggtactcccgtaccagtgaggggagcagtattccccatgtggcctctttcggggaatattttccttaccaagaaatatctattatttttttatttttccatctccaagcattatatttgtttgtcacggggaataattcatggccaaaaccttccccttgccaaaacaatctccccgttaaaataaatccactgtaattattaattaaatcataaatcacagattcaattacaaatctataacgatcatcgtgaaatgtttttagtattaacaccctgatagtgcaagttgctttttgtttaccatctacatcattaaaaatcatactaccctttatttcatcagcagcatcttttattttgcatgtgtaatttacttctattttttttccagactggctagaaagatcgagtaggtaaggtttaattaaaagctgataaatattnncatataataaatcaatctctttcatattgccgccttattgttttataaccgaatgtcgttaatatcaatcccaccaaacacatctgaatatatatccactgctgatggttttgttttattaagtgttatatcaaatccttcaataactggatgtaatccatattggtttgtaggagatgtgatatcaataataccggcatctagacgtttggaaccacctgtataatgagtgccggatgtccacttaccatttactttaaatggtccattcgttgtcgcagaaactcgctctccattttttatggctggttgaatctcaactctaaatttactacctgttaattctagtcttttatttatcatgtttatgtatttattgaatgcagcctctgattttatccaatcaccattagcatatttaagtgctctattccctaatgagttcaaaacatcagatatgttgctttgctcactcccccatttcgtccagcgggctaactgacatatagccagccccaaaggatcgatatacccacaaggattcggcacataccgataagtctgctcccctccctgcaaccccagcggatcactcaccaggtacatcccggtttccggctcgtagtaccggaaccggttatagcacagccccgattctgcatcctgccactgtcccgcatacagcaggccggggtccgcttccgggtcccgctccccnngcgggtccgggtagtctgtgtctgcgggcaggctgagtgccagcccccacaggctggtctgccccggccgccagacggttttaccttcactgttaaagagcatcagcgggcggcccgtcaggtcgctcaccgcatgattcgttcgcgtcacccactgcggggccacggacggatgcggctgtcgtacccggctgaactgctggcttatcagctcaaagccgttaaacaccaggtgccttacgctgtacagtttatcatcgcggtattcccggatttccgcaatactgtcgccgtcccacaggtacgtaaaacggattttcttccggtcgcagcgtttttccgtccgtctgccgctggcgtcgtggcggtattcccactgctccccctgtgcgctgcgatacccggtcagctggtcccggctgtcccaccggaaccgctctgtttctgggcggtagccgtcacggtgttttgtgcggctgaccatccggcctgcggcgtcatagtcatactgtgtgtttccggcctgtttcagccggtggcctgcggcatactggtcagtctctccgcttatccggtgtctgcccgcagactgcgccttcaggtagccgcagctgtcatagccataagtctcgtcgccttcgccatagcccagcccggtgcctgaggctgtcaccgccgtgacctggccgttccggtcaagccggtactcccggtgtgtttcccgtccgtaatcttcccggctggtgacgcctgatacgttacccgcgctgtcgtaacggtattcccgtagcagtgaagggagcagtccgccccatgtggcttccgccgggaaaagtnnnncgcgctggctgacaggctgaccggctgcattccagccctgttcacaggcaaaaccccggttactgtgccggagcacttcacgtcccgcctcatcacggctgaacgtcagcgtctcatcccccggcaggataacctccgtcagttctccggcggcgttgtagcggtatgtggttttcagcagggatccgtcggggggtctgtcgcgttcatcttccggtggcaggatacagcggatgacggtgtgttcgtcggggtagtggtattcaatggcccgtcggccctgagtggtgacattcacccgcccgcgttcatcatagccggtgcgctgtgatgtgccgtccgggctgaagatacccgtcagcctgccggatttgtcatacgcatactgcgttttgccttccggcgtgatgacttcagccaggcggcctgcggcatcccggctgtagaggatggtttcctccaggccgttgaccctggcggtacacaggccatcagcgtcataacggtaacgacagaccacgccgccccagtcacgttcttccgtcacccggccacagttgtccagaatataaagataagactcgccctgcgggttaatgacttctgtcagttgcagcgtgtctttatcgtagcggtactgccagcggtggccttcaccgtccgttcgcgccaccggcaaatcaaacgggccgtactccattgtccagacaacgccgttaccgtccgtgtacgccagcaggttgccgtggcggtcgtagcggaatccttccgcgccggttcctgcccgctcaaggccactcagtttatggtgctgctgccactgcaaccgcactgactgaccgccggggccgcgcatcttcaccggcaggtcgtgaccgctgtattcggtgtggtgttcgcggcccatcacgtcggtgagtgtttccggccagttgtggtggtcgtactctatgcccagacgccgttcatcctggcggaatatnnccgacagcagccccnnagncgtgtacgnc

SEQ ID NO: 159 - DNA, 1887 bp, Escherichia coli
  Strain O55:H7
  modified_base (1523)..(1523): a, c, g or t
tcaccctggcggaatatccccgacagcagcccctgagcggtgtacgccagccgggtctcttcgccctgtggcgataccagactcaccggcaggccgcgttcatcacactgctgcgtccacgtctgcccggcagggtcggtgatgttgctgagcaggccgcgctcatcatagcagtactgccaatccgcgccgtctgccgccgtgtaacggcttaactgaccgtgtgcggcgttgtattcaaacttctccacccgcccggcaggggagtggcgggccagcaggtgatggaattcatcccattcatacgtggtggtgctgccgtccggcgcttcttcccgcagaatattgccgtcaggatcatagtaataacggtgaatgcccttgccgtccgtcacggtggtgcagccgtcaccatagtccagcgtggcgttgtaatagccctccgccccggtgacggtcacgcaccggccctgtgcatcgtaggtgaaacggctccacgtctggtcgttatcggaccagcggatgatccggtccgcagcgtcgtactcataaaacaggtggtagtccagccgcgcatcctgttcgtaggtcgccagcgtctgtatgccgttatccgtgcggtgaatggctttcaggtagccgctggcgtggtacgtcagtttaagccggatcccgtcggtgtgactgacacccgtgatccggtactgggtgtcgcgctcaaacgtgatgcggttgctggcggtgtcgctcatcccgcccagcatgtacatccggtctgcggggctgtgtgccaggcggtcatcgctggtatcgtcagtcaccgggtggcgcagacgcattcccggaaaggcgtcataaaagaagcggctgctcagtgcatccctgtcgaacagctccagataatcatcacggcggcgcagaatgtactgggcgtgatacgggttaaccgccgtatcactttcaccgtcgaaggcgaagttcagcgtggctcccaggctgatgacatccacccggtttccctgttcatgcacccaggcgtattcgctccaggagtcgctccagcccacgcccgtcaggccatgcagcggcagtacagaactgtggaaacgggtgaaggagagggggagtgtctggcccagcgtaaagtcggtacgttcgtcgcagtatgcgccggttaccggatcgacaggatctgttacccatctgatgactttattggcaatactttttaacgaattacctgttttccccagcaacgcgccgagctttgcgcccagcagcttaccgcttttccccagcaggtttcccagtttgcccagtttcgccagattccccagttttcccagcagtcctgctggcggcagaagatagctggctatcgttattcctcccaggatcattctctgccatggcgggaactccggctggatatccagataggtgacctgctcacccccaataaagacgtccggcgaaccttccacgattgccgcgctgcactccagtttgtcgcccttgcgcgnggcaggctgattgttgataaagacgttgctgctgccctgggctatcctcggtggtttgttctccttgtcgcagagcgccgtgtcctcaccggcttccgggaaatccacatcttttttgatttcgccacgcccgcccaccatggtggcaaactccattaataccggaccggcgggaaacagaagcgatgcgccggcgctgacgcgatccataaaaccggcattgctgtccgtcagggtgataacagcgttcccccaggccttcgccagtggtactgctttttccgctgccgattcaagcaggtcagtggcaatatcaccccatgagggttccccctgtgggacttcaggtattgctccaggtggg

SEQ ID NO: 160 - DNA, 1807 bp, Escherichia coli
  Strain O55:H7
  modified_base (847)..(847): a, c, g or t
agggggaagggtgacggctgcacgggctgctggctttccgttaatttttacatttttagaaccggtattgatggcgccgtccgtgtcacaaaagctgtttatccatgattcaagctggttctgtttctcctccacataatcactcgccttatagctggcatacatcagcgcaggcaccagaaccagcgcataagggccggtggcacaggcggccataatcaggcaaccttctgctatggtcactatcgcccccagcacggcccctgccagcgcccccaaaaaactcttgtgctgaatttcatcgcccagcctggcggcgggggggccagacttttttgatgccaacatctgtgcaatggctttgtcgttggctgcccgtttcatctggctggcggccatcgcccgctgcgacagcatccgcattgccagcgtaccgcctgcggtcgctccctgtggcccgcctggtccttcactcatgttttatccctcgtttatgtcagcgcggctggtccttttggatgtcattctccggtggcaacggggtgaagctctttatcacctccagcagcatcgtcttttgactgttcttcagggataaggaggtgctgaaagtgaaggtcagcagcgtatctccacgccgctggaatacggctatctggctaatccgcccctgattcccttcatcttccggaccgttccaggaataatccagcagccaggccggggcctctgccagagtgatttcccggcaggcatgttcggtgtacccatcaagtttgccctggtacagcgccagcgtttcctggtacagctctggtgtcagggttccctgtgaaacgggttcgcnggtaatgaccaggttgatgccactgttatccgtggataccaggacctgcatcgactgatcctgccattgcgatggcagttgaatatgaccttcattaaaagtgaactgcataaaatactccctgttaatctgagtgaatcagttgatgaaaacagaaccgcccacgatggtgatgccatccttcgacagcctgattaccgttgattccccgacctgtagctgaatgccatccggcgtcagcgcaattttgctttcctccacggccagcataatttccttaattgccgtataagcctgtataccgttgccttcgccaccattgtttacagcgtcaacatgcaccgaaccggcaatcgtgcctctgtcctgaaagacatcctcagataaagaccctttcagtactccggtgatcttgtggcctttttccaccgtaagaaggcggttaccttcctggatcgtgaccgtctggtcattttttacggtttcgcgatgatcgtgttttacggtggtggtacggtcgttgagcacttcggtatccatgttcttctgcgcgtggatgtagacctgttctctccctgtcgcatcatcaaacttcagctcattaaacccgctgcccatatacgttttggaacggatggtcatctgcgtcttcgtccccggcaggctgccgggggtgcggttttcctggtggtaggtgcgccccataatgatcggctggtccggatcgccgttgaggaagtccactatcacctcctgacccacacgcggtatcgccaggttgccaaaaccggtgcctgcccacgcctgtgccacacggatccagcacgagctgtcctggtctgccgggttataacggtcccagttgaatttcacccgcactcggccatgttcatcacagaagatttcctcaccctccggccccgtcacgacggcgctctgcggaccgtccaccagcggttt

SEQ ID NO: 161 - DNA, 22875 bp, Escherichia coli
  Strain O55:H7
  modified_base (3442)..(3442): a, c, g or t
  modified_base (4954)..(4954): a, c, g or t
  modified_base (11911)..(11911): a, c, g or t
  modified_base (14720)..(14720): a, c, g or t
  modified_base (14876)..(14876): a, c, g or t
  modified_base (15842)..(15842): a, c, g or t
  modified_base (16390)..(16391): a, c, g or t
  modified_base (19380)..(19380): a, c, g or t
  modified_base (19766)..(19766): a, c, g or t
  modified_base (19982)..(19982): a, c, g or t
  modified_base (22783)..(22783): a, c, g or t
gcggctggggtcgccatgtccggtctgccgggatcaccgcaaaatggttctccagcgccgtccctgctccccgccttcccggcaccgcctgcggctgctcgccgtgcagttcacttgccaccacctgccattcccggttcaggttcgcctgcggatgccccgtcagcacaattcgccgtcccggccatatctccggcgagcgactcattccccgcgcggtttctgcattgtttcgccagccctccatctgccagcgggcaaagttctgcccgtgggcgcccttgaaacgtccggggtagtcatacacctcatactgcgtgcgctggtaatcctggtgctggccttcctgatcaaaacgtcctgcccagccggggcgtttaaaggtgtagtctttggtcaccacggaagaagggcggatttgtgcgctgtagcgaaactggctgatgcagagggtgctcacctcggtacgggtgttcgggttccaggggatttcaaaagattcgggcagatggcggaccgtgtcgcacagcaccaggctctggtcggtacttttgtaagcatgctcctcataaaagaagatgccttcctccgccgccatccggcacaggaaatcgtaatcagtctcaccgtactggacacaaaactcacgggaaggatgcggttcactgaacagcggactccactcggtcaccccgttttcctgcaatatcgtgccgaggatgcttttgatgtcctcgttctggaagatacggaagttctggcgcagaccggcacgccacagcggcgggtgcaccttcatgctgtacagcatctggtttttgtcgttctcccccagttcaaaccaggtcaccacacctttcacccggcgctgtacatcatcaccctgccatattgtcaggtaggccattttgtccagcacctgcgcaaattcaagggagagaaactgctggctgaccaaggagagatcgagggaaaagagcgaagagagtgactgggtgagatgaaaggaaaccaccgcaaaagcgtccggtggcaggccgtccacttccagtgtgaaacgtaatccggttgacatagcaacctccggtaaaatgaataataatccgcaccgtacaactgcggataatgagataagcgggacgacttaagacgttattagggaaggaacaaaaaatgctatgattatgtgaggattttgtttaaatattactttacagaaacgggtgtctgttcagtcaaaaaaataatcacaagctcaacttattgtttcctgacgttattcaggacaggtgcgcacatcacagcgagtaacaaaaacgcaaagttaaaccaatattcataatatgtttttattcacaactaaataacccaattaacatcattaaaatgaatgattgcttaaaaaatatatgctaccgctccaccctgataacatgatctgcacattgcacatcttaacgttgttaaatactggctcaatagtggatattttaaattaggaatttatcaaattcactttataaatggattgggtgaataatataaaaattaatgatgattaatcgcgatttgattattcattgctttatatgataggtggcttgtttataatgatggaaatttagcgaaaaacgccgtaaaccctcgccctgaatttgaacttaataatcaccccctctccggcaacacaatcacaaaccttgtcccccgcgcatttgacgtaaccgcaaccgtgcctttatgcgcgacaacaattgatttcactatcgccagcccaatgccgctaccttcgccttttcgttggcgggaggggtcaacgcggtagaaacggtcaaacaatcgcggtaagtgctcgggcgcaatgggcgtaccggggttttcgacgataacttgcaccagatgatcgaccgtctggcagcgcactacaatagcctctccgggtggcgtataacgcagggcgttcgaaagcaggttgcttaacgcccgacgcagcatcagcggatcgcccgcaacctggcactcgtcgccaacaaactgcagctccacgccgcgatcttccgctaaagcctcgaaaaaatcgaacactttgccgacttcatccgccaggttgagcattttcttttcggggattaactggttgttatcggcctgggcgagaaacagcatatcgctgaccattttcgccattcgcgtcagctcttcgagattagagtagagcacatcttccagctccttctggctgcgcgactggctgagggcgatttccgtttgcgttatgagattagtaattggtgtgcgaatttcgtgggcgatatccgctgagaaattggactggcgggtaaagacatcctcaatacgctcgatcatatggttgaacgacagtaccagctgttccagctcaatcggcacggtctgcgggtcaaggcggacgtcgagatctttcgaggtgatattctggatttgacggctgacgctgcggatcggcgcgtgacctttatgaaccgccaatagcacgataaagacgatcaggatgctgatgaccgatgcggtcataataagtttattcatcaaatcatttatgtaatgaagatgaaaatcgatcgaaagcgcgatgtagagcgtataaatcggtttgccgtcaaccagtgggccaactggcaaactgatcatccgccagttgctgtgttccatatgcccgtgaccgtggcctggcatcatcatcgtcgggccggagaggagaaacacctcgccgccccgcgcgtctttatcgggtatggcatcgcgcgcaaactcgcggatatcaggcgcaccgggggagtgatacaccgttttaccgtggctatctgccagggaaatcaacacattggaataaccactgacgatatcttccagcgtcattaagcgtcgggcttgcgtttcgtcagggtgatttagtacgcgttcaagggtggcactaatctcttttaaatcattaatatcctgctcggcaaaatgcacttttactgagtggatcatgatccatgcaaaggcgaaaaacgccgcgatggtggccaggctgataaaaaaggtcaggcgggttgccagcgaaaacgggcgctgaaatggcttactgaccatccggcacctcaagcatgtaacccacgccgcgcacggtttgaatcagcttcggctcaaagtcgttgtcgattttgccgcgtagccgcttcaccgccacatcaatggcgttagtgtcgctgtcaaaattcatgtcccatacctgcgaggcgataagcgagcggggcagcacttcgccctgatggcggagaaaaaactccagcagagtaaactctttactggtcagagtgatgcgcgtgccgctgcgggtgactttgcggctgacgagatcgaccatcaaatcggcaacctgaaactgactttcgataatcaccgccgccccgcgccncaggagagtgcgcacccgcgccagcagttcagcaaacgcgaacggcttcaccagatagtcatcggcccccaactccagccccttgacgcgatgttcaatggtgccaagcgcggtaagcaacagaatcggcatccctttattggcggagcgcaacatgcgcacgatatcccagccgttcacgtccggcagcataatatcgaggattatcaggtcataatctccggtcatcgccagatggtagccattcagcccgttgtcggccaaatcgaccacaaaaccggcttcggttaaccctttggtcaagtattctccggttttcttttcatcttcgacaatcaacagtttcatatttcctccgcatgttgcccgggcaattctagagtagcgggatcagatggcaatcgcttattggcaaaatgacaattttgtcattttcctgtcaccggaaaatcagagcctggcgagtaaagttggcggtataaaatcaccagaaattatgagcctatgtctccttgtaaacttctgccattttgtgtggcccttgcgctaaccggttgttcactggcaccggattatcagcgcccggcaatgcccgtaccgcagcagttctcactcagccagaacggcctggttaacgcagcagataactatcagaacgcgggctggcgcaccttttttgttgataatcaggtgaagacgctgattagcgaggcgctggagaataaccgggatttgcgcatggcgacgctgaaagtgcaggaggcacgggcgcaatatcgtctgactgatgccgaccgctacccacagctcaatggtgagggcagcggcagctggagcggcaatcttaaaggcgattcagccacgacgcgggagttttctactggccttaacgccagctttgacctcgattttttcgggcgcttaaagaacatgagcgaagccgagcgacaaaattatttagccactgaggaagctcagcgcgcggtgcatattctgctggtttctaatgtcgcgcaaagctatttcaatcagcagctggcgtatgcgcaattgcaaatagccgaagaaacgctgcgtaattatcagcagtcatatgcgtttgtcgaaaaacaactgttgacaggtagcagtaatgttctggcgctggaacaggctcgcggggtgattgaaagtacccgcagcgacatcgctaaacgtcagggggaactggcgcaggcgaataatgcattgcaactgttactgggaagctacggcaagctgccgcaagcgcagacagtaaacagcgacagcctgcaaagcgttaaattaccggcgggcttgtcgtcgcaaatcttattgcagcgcccggatattatggaagctgaacatgcgttaatggcggctaatgccaatattggtgctgcacgcgcggcatttttcccgtctatcagcctgaccagcggaatatcaaccgccagcagcgatctgtcgtcattatttaacgccagcagcgggatgtggaattttattccnaaaattgagatccccatttttaatgccggacgcaaccaggccaatctggatatcgccgaaattcgccagcagcagtcggtagttaattatgaacagaaaatccagaacgcctttaaagaagtggcagatgcgctggcattacgtcaaagcctgaacgatcaaattagcgcccagcagcgttatctggcatcgctgcaaattactttgcaacgggcgcgggcattatatcagcacggcgcagtaagttatctggaagtgctggatgccgagcgttctttatttgcaacccgacaaaccgtacttgacctgaattatgcccgtcaggtcaacgaaatttctttatataccgcacttggtggcggttggcagcaataatttttaactccaggagaaaataaatgaaaaaagcactgcaagtcgcaatgttcagtctgtttaccgttattggctttaatgcccaggctaacgaacatcatcatgaaaccatgagcgaagcacaaccacaggtcattagtgccaccggcgtggtaaaaggttttgatctggaaagtaaaaaaatcaccatccatcacgatccgattgctgccgtgaactggccggagatgaccatgcgctttaccatcaccccgcagacgaaaatgagtggaattaaaaccggcgacaaagtggcgtttaattttgtccagcagggcaacctttctttattacaggatattaaagtcagccagtaacccaggtttaatgagatgaaaaaaatcgcgcttattatcggcagcatgatcgcgggcggtattatttctgcggcaggttttacctggtttgcaaaggcggaaccgcctgcagaaaaaacgtcgaccgcagaacgtaaaatcttattctggtacgacccgatgtatcccaatacgcggttcgataaaccaggtaaatcgccgtttatggatatggatctggtgccgaaatatgccgatgaagagagttctgcgtctggtgtgcgcattgacccgactcagacgcagaatctgggggtgaaaacggctaccgtcacgcgcgggccgctgacttttgcccagagtttcccggcgaatgtcagttacaacgagtatcagtatgccattgtgcaggctcgcgccgccgggtttatcgacaaggtgtatccgcttaccgtgggcgataaagtacaaaagggcgcgccgcttctcgacctgaccattcccgactgggtggaagcgcagagtgagtatttactgctgcgcgaaaccggcggtacggcgacccagaccgaaggcattcttgagcggctgcgactggcgggaatgccggaggcggatattcgccgcctgatcgccacgcaaaaaatccagactcgctttacgctcaaagcacccattgatggcgtgatcaccgcgtttgatctgcgcgcgggaatgaatatcgccaaagataacgtggtagcgaaaattcagggtatggacccggtgtgggtcactgctgcgatcccggagtccatcgcctggctggtgaaagatgcctcgcagtttacgctcaccgttccggcgcgacctgataaaacactcaccatccgcaaatggacgctactacctggcgtggatgccgcgacccgcacgctgcagctgcgtctggaagtcgacaacgccgacgaggcgctaaaaccgggaatgaacgcctggttgcaactcaataccgccagcgaaccgatgctgctcattccgtcacaggcgctgattgataccggcagcgaacagcgggtgattaccgttgatgccgacgggcgctttgtaccaaaacgcgttgccgttttccaggcatcgcaaggtgtcaccgcattacgctctggtctggcggaaggtgaaaaggtggtttccagcggcctgttcctgattgattccgaagccaatatttctggcgcactggagcggatgcgctctgaaagtgctacccatgcgcattgagggaataaccaatgattgaatggattattcgtcgctcggtggcgaaccgttttttggtgctgatgggcgcgttatttctgagtatctggggcacctggaccatcattaacacgccagtggatgcgttgccggatctctccgatgtgcaggtgattattaaaaccagctatcccggtcaggcaccgcaaatcgttgaaaatcaggtgacttatccgctaactaccaccatgttgtcggtgcctggcgcgaagactgtgcgtggtttctcgcagtttggcgactcttatgtgtatgtaattttcgaagatggtaccgatccgtactgggcgcgttcgcgggtgctggagtacctcaaccaggtacagggtaagctgcctgcgggagtcagcgccgagctgggaccagatgccacgggtgttggctggatctatgaatatgcactggtggatcgcagcggtaagcacgatctggccgatttacgctcattgcaggactggtttctcaaatatgagctaaaaaccatccctgacgttgcggaagtggcgtcggtgggcggcgtggtgaaagagtatcaggtggttatcgatcctcagcgcctggcgcagtatggcatcagtctcgccgaagtaaaaagcgcgctggatgcttcaaaccaggaagcgggcggttcgtcaatcgaactggcggaagcagaatatatggtgcgcgccagcggctatctacaaacgctcgacggctttaatcacatcgttttaaaagccagtgaaaatggcgtgcctgtttatctgcgtgatgttgcgaagatccaggttggcccggagatgcgccggggcattgccgaactgaacggcgaagttgtgggcggggtggtgatcctacgctccggcaaaaacgcccgtgaagtgatcgccgccgtgaaggacaaactggaaacgctgaaaagcagtctgccggaaggcgtggagatagttacaacatacgatcgcagccagctcattgaccgggccatcgacaacctcagcggcaagttgctggaagagtttattgtggtggcggtagtctgtgcgctgtttctctggcatgtgcgctcggcgctggtggcgattatttcgttgccgctggggttgtgtattgcttttattgtcatgcacttccaggggctgaatgccaatattatgtcgttgggtggcattgcgattgccgtcggggcgatggtcgatgccgctatcgtcatgatcgagaatgcacataaacggctggaagagtggcagcaccagcatcctgacgccacgctggataataaaacgcgctggcaggtgattaccaatgcatctgttgaagtggggccggcgctgtttatcagtctgctgattatcacgctgtcgtttatcccgatcttcaccctggaagggcaggaagggcgtctgtttggcccgctggcgttcaccaaaacgtatgcgatggcgggtgcggcgctgctggcgatcgtagtgatccctatcctgatgggttactggatccgtggcaaaattccgccggaaagcagtaacccgctcaatcgctttttgattcgtgtttatcatccgctgttgctgaaagtactgcactggccgaaaaccacgctgttggtggcagcgctttcggtgctgacggttctctggccgctcaataaagttggcggggaatttttaccgcagatcaatgaaggcgacttgttgtatatgccatcgacgctgccggggatttccgcagcagaggcggcgagtatgctgcaaaaaaccgacaagctaattatgagcgtacctgaagtggcgcgggtatttggcaaaaccgggaaagcggaaaccgccaccgattctgctccgctggagatggtagaaacgaccatccagcttaagccgcaggagcagtggcggccaggcatgacaatggacaaaatcattgaggaactggataacaccgtgcgtctgccggggctggcgaatctgtgggtgccgccaattcgtaaccgtatcgatatgctctcaaccggcattaaaagccctatcggcataaaagtttccggcactgtgctggcggatatcgacgcgatggcggagcaaattgaagaggtggcacgaacggtgccaggcgtggcttctgcgcttgccgagcggctggaaggtgggcgctatatcaacgttgagattaaccgtgaaaaagccgcacgttacggtatgacggtggcggatgtgcagttgtttgtgacttctgcggtgggcggggcgatggttggcgaaacggtggaagggattgcccgttatccaattaatctgcgttatccgcaaagctggcgcgatagtccgcaggcactgcgccagttgccgatcctgacgccgatgaagcagcaaatcaccctggcagacgtggccgacgttaaagtctctaccggaccgtcgatgctgaaaaccgagaatgcgcgcccgacgagctggatttatatcgatgcccgcgatcgtgacatggtgtcggtggttcacgatttgcaaaaagcgatagctgaaaaagtgcagttaaaaccgggcaccagcgtggcattctccgggcagttcgagctactggagcgcgccaaccataagctgaaactcatggtgccgatgacgttgatgatcatcttcgtgctgttgtatctggcgttccgtcgggtgggcgaagcgttgctgattatcagcagcgtaccgtttgcgctggtgggcggcatctggttgctgtggtggatgggctttcatctttctgtggcgacgggcaccggttttattgcccttgccggggtcgccgccgaatttggcgtggtgatgctgatgtatttacgtcacgccatagaggccgagccgtcgttgaataatccgcaaacattcagcgagcagaagctggatgaggcgttatatcacggcgcggtcctgcgcgtgcgcccgaaagcgatgacggtggcggtgattatcgctggtctgctgccgattctgtggggaacgggggcaggatcagaggtgatgagccggattgccgcgccgatgattggcggcatgatcaccgcgcctttgctgtcgctgtttattatcccggcagcgtataagctgatgtggctgcaccgacatcgggtacggaaataaaagcaggatacccggtttaaccgtgtggattgtgtcttgcgacgatgggcactaaatgttaaaaggtgcccctcaacaaaaaagacacacaggggaaaggcgtgaaaaacgcgtcaaacgtatcggaagatactgcgtcgaatcaagagccgacgcttcatcgcggattacataaccgtcatattcaactgattgcgctgggtggcgcaattggtactggtctgtttcttggcattggcccggcgattcagatggcgggtccggctgtattgctgggctacggcgtcgccgggatcatcgctttcctgattatgcgccagctcggcgagatggtggtcgaagagccggtatccggttcatttgcccactttgcctataaatactggggaccgttcgccgggttcctctccggctggaactactgggtgatgttcgtgctggtgggaatggcagagctgaccgctgcgggcatctatatgcagtactggttcccggatgttccaacgtggatttgggctgccgccttctttattatcatcaacgccgttaacctggtgaacgtgcgcttatatggcgaaaccgagttctggtttgcgctgattaaagtgctggcaatcatcggtatgatcggctttggcctgtggctgctgttttctggtcacggcggcgagaaagccagtatcgacaacctctggcgctacggtggtttcttcgccaccggctggaatgggctgattttgtcgctggcggtaattatgttctccttcggcggtctggagctgattgggattactgccgctgaagcgcgcgatccggaaaaaagcattccaaaagcggtaaatcaggtggtgtatcgcatcctgctgttttacatcggttcactggtggttttactggcgctctatccgtgggtggaagtgaaatccaacagtagcccgtttgtgatgattttccataatctcgacagcaacgtggtagcttctgcgctgaacttcgtcattctggtagcatcgctgtcagtgtataacagcggggtttactctaacagccgcatgctgtttggcctttctgtgcagggtaatgcgccgaagttccttacccgtgttagccgtcgcggcgtgccgattaactcgctgatgctttccggagcaatcacttcgctggtggtgttaatcaactatctgctgccgcaaaaagcgtttggtctgctgatggcgctggtggtagcaacgctgctgttgaactggattatgatctgtctggcgcatctgcgttttcgtgcagcgatgcgacgtcaggggcgtgaaacacagtttaaggcgctgctctatccgttcggcaactatctttgcatcgccttcctcgccatgattttgctgctgatgtgcacgatggatgatatgcgcttgtcagcgatcctgctgccggtgtggattgtattcctgtttgtagcatttaaaacgctgcgtcggaaataaggcattcacgctacatccgacaaaacgatgtccgctctcatccattcgatgagagcggtttttttaattactgcttaaatgcacccgccagagagcgaatatcattgccggttggcgactgatgaagtcgcagaccaaactcttcgacaatcgcaaatatgtgatcgaatatatcagcctgaatgctttcatattccagccacaccacggtgttggtaaacgcatagatctcgagcggtaaaccgttatcacctggagccagttggcgtaccattaaggtcatatctttacgaatccgcggatggttacgcagatattcgttcagataggcacgaaaggttccaatattggtcattcggngcaggtttaataccgactccgtagaaccttgctggcgattccactcattaatttcctgatggcggctggttaaataaggctttaacaaatgcgctttattcagacgttgcatttcgtcttcatcaagaaaacgaatactggtgacatcaatactgatactgcgcttaatacgtcgcccgccagatgctgacatcccgctccagtttttaaaggagtcagaaaccagagaccaggtgggaatagtggtaatggtattgtcccagttacgcaccttgacggtggttaacccaatatcgatcaccgcgccatccgcgccgtatttcggcatctccagccagtcgcccagtttcagcatatcgttcgcggaaagctgaatacctgccaccagaccaagaatcggatctttaaataccaacatcagcacggcagccattgcaccaagaccgctgatcagaatcgctggcgactgaccaatcagcagcgagatcatcaaaatgccgaccagaatcgcgccgatcagtttaatcccctgaaatatccctttcagcggtaactgagatgctgccgggaatttctgcgccagattcaaaataacatccagcagcgagaagactgaaagcagcgcatacatcatgatccacaactgcgcgcaggtagtcagaatatctgccgcttcggtgcctttttgcagccagaataccgcctgaatattgacgataatcccctgcagggtaaaagctaaacggtggaagagtttattctgggtaatgatttgcaaccaaagccgtgaactggcgatggcacgtttttcgaaggtccgcagtaccacccaatgcaaaataatatgcaccacgacggcggtcagaaaaataataccgaaaatcatcaccatcgaggtggtgtgatcgatctcaatacccgctaaatcttcaacatgggatattaaatcctgcataacgtctcctttatacaacagcagcctatgatgacggctgaaacagggttatgcaaatcaggagaatctgaggggaaatagccgggcagatgcccggcaagggaggattacacttcggttaaggtaatgttttgcggcagacgagatttcggcagcgtagcgttaaaatcttcaacgctgtgatgacccaccggaactaccaccagactggtgtagcctttctctttcagaccaaattctgcatcgaggatggcggcgtcaaaaccttcgatgggtaccgcgtccagacccagagccgccacgccgagcaggaaattaccgacgttgagataaacctgttttgccatccactctgcatcatcatgcagatctttacggtgcatatcggcgaagaacttgcgacctttatcgttcgcggctttcgcttccggcgtggcaaagcggccatcagcatcttcctggtcaacaaccagcttcagccaggcatcgtccatcgcggtttttgcacagaacaccacgacgtgcgaggcatcaagtattttacgttcgttgaacacataattaccggcagcggatttggcaacacgcgctttaccttcttccgtgctggcaacaataaaatgccacggctgggagttggtgctggatgggctgtattgcaggagagttttgatctgctcggcctgttccggggtaagttttttgctggcatcaaatgccttagtggaatgacgctttaaggcgacagaaatgatatccataaagactccatgtgaaagtaattttgcgtgccagcagattacaaggttcaacgagaaatggtaagcgagaaaaatgcgctatagatttccgctttagcctggacgcactcttttttgatcgcgtttagccagaccatcaaccaccagattccacgaatcgttgatcagatcgcgaagtaacgcttcggagatttcctcgccgggatacaccgaaatccagtgctttttattcatgtgataccctggcttaatgcttgggtatatttgctgatttaacagggatttttgtggatcggacttcagattgataaaggggacgccgcgtagctccgacgacagcataaaaatcttgccgccaattttaaaaacatcgaactccgggccaaaaggccagcaaagctcgacaaagggtaactcaagggccaggcgtttcgccgtttcgtgcagtgattgcttatccataaacgttcctttaggcgaaggagaataagcaaagtatgccgcgaagtacggcgataatcgacgtttaatccgccagcgagaaccagcgtcgccagataaagcgcagaacaaaatactcaatagcgcccagcactaaaaaccacagacaaaacaataaagtgtaaagctgactaagatccatcagatggaacgtggtcaccagtttttgtgccagcgtaagccccagtgcgggggcgggcagcagcaggcaagagaggaaagccatcagcaaaatgcctgctgcggtggtcaaggtttctaaagggtgtttcataacattgttaaatgtaagttaaaacaccattgtcagggatattcttctgtaaggcaattcccggcttagtcaccggcccagatctcacaatgctttttcaccagcccaatcagcgagccgccatcggcgacgaaatcgcgcatcagctgcgcttcattcagaccgctgacgacctggcgatgcagggcctcaatcgcgctcgatgcaccaattttatgtgcagaaggggcgattttttccagcaatcgcaaggtgtcttccgttagtggtcgacgatcgccagtgtacggatcggtaatgacgccttccagcccatancggcaggcctggaaacggttgaatttatacagcaggtaatctttctccttatgtttgaacgggcgttctgtcagtaaccagtgggcggtggcctgaattaatcccgccatatttaccgcgtggctaagggttaacggggtatccatcacccgaacntccaccgtgccaaaatgaggactggggcgaatatcccagtgcagatctttaatgctgtcgatcatcgtggtgtaactcagacagcgaaacagggcttcaaattgttgccagttactgacccacggcatcgggccattatcaggaaaggcggaaaaaatattcggtcgtgaggaggcaaaacgcgtatccgttccctgcatatatggcgacgcggcggaaagggcgataaagtgcggcacaaaccgtgacaagccgtgcagcaaataaatggcgtcatcgccactggcacagccaacatggacatgctgaccaaaaacggtcgcctgctggatgagatagccaaagttttccagcgttcgttgatagcgttcgttgtcgcatacctcctgacgctgccatttctgaaacgggtgcgtgccaccgccgcaaatttccagatgatggtctgcggctgcctgcaatacgactttctgcatcgctgaaaattgcccggcagcctggttgatatcacggcaaacatccgtcgccagctccagcatactttcggtgatatcgtgctttacctctccggccgtgatcttatttttaaccgcgtcaatcagcattgaagagtcctggcttaagtcatagcccggcggattaaccacctgcatttccagttcaataccgagggtaaaaggttcagaaacatgaaaatcgggtaatggcataggtttctcttatgttggagttttctattcagtatagaagtcggagcggctgggcgagatgcggaagttctggaatgtttctttttttggtgatggtgactgaagcaatttggctacttttgcaatgtgacaagttatggcacggctggctggtggcgaagaattttgacgattgaggcatgcagaaaaaacgggctcagcttcagttgattaaatgaggagtgagaagtccgaaacaggatttactgtataaatnaacagctattttgttgaggaagggtaagataacggcgggtgcctgaagctttccggtttcaggtttactctgaggtctggaaagatgaagctccaggagatatttctatcaaccctggggctgccactccaaaccagacaatttggatggtagttccttcttcgcatggaggcaatataaacatgctgacgaaatatgcccttgtggcagtcatagtgctgtgtttgacggtaccgggatttacgcttctggtcggagactcgctgtgtgagtttacggtgaaggaacgtaatattgagttcagggctgttctcgcttacgaaccgaagaagtagccgttgtgcggggagtaatccccgcatatccggttgtcaggtcaggatggtaaggcacctgctttacactttcgcccgcggtcagtgatggctgcgggcgatttcgttttaagagcaatgatgagttttgccgacagaagtccgaaacaggattcactgtataaataaacagctattttgctaaggaagggtaagataacggcgggtgcctgnngctttccggtttcaggttaactctgaggtctggaaagatgaagccccaggagatatttctatcaatcctggggctgccactccgagccccaacaactcggatggtagtcccttcttcgcatggaggcaatataaacatgctgacgaaatatgcccttgtggcagtcatagtgctgtgtttgacggtgctgggatttacgcttctggtcggagactcgctgtgtgagttcaccgtaaaggaacgtaatattgagtttaaggctgttctcgcttacgaaccgaagaagtagccgttgtgcggggagcaatccccgcatatccggttgtcaggtcagagtggtaaggcacctgctttacactttcgcccgcagtcagtgatggctgcgggcgaatcgtaccagatgttgtcaattaatcgtgttggcacagagttatgactattttttcttttatctgccagtgcacagcaaacatctcattctcacgatgaatgatgacctgctgtttattccagctaattatctgatagtccagaaaacctgcatcagtttggatctcacttgccttaaatgcgctctctttggcggaaaatgccagtgtcagcgccagagaaaaggctaaaccgcagtctgcgagtcgctcgtgttctgctggtgtaataatgttgtctgtcaattcggtcgctgtttgcgcagaaaaaatttcttcgatatcaacgccaatcggttgacgggaaaccacggccaatgccgtagccccgcagtggctaatactgccgtatacctccgcaggccacaccggttggcgtagctcgccgattgcgggcacacatttatagccatattcccgcaaggcataaacagcagcgatccgtccggctaaatgctctgttttacgtttacgtccagcgtgttgcagttgtgcgtagtgcggcagccagagtaaatcctgctcacaaaaattcgccggatcgaactcaacaaaatgcagcgtatgtccggcaaaggggagggaggtatgcgtagttttcatatcgaccatattcgagactgatgacaaacgcaaaactgcctgatgcgctacgcttatcaggcctacatggtcctgcaatatattgaattggcaagatttttgtaggccggataaggcgttcacgccgcatccggcatgaacgacgcgcactttgtcaacaatctgacgttagcatcagaagtgagtgtttacgctcatataccacgtacgtcccggctcgttataggtatacgccccggcaccggcgatatagttggcccctgccaaatcgcccgtggtctgggcattacccgcacgccacaaacgtttgtcgaacagattgtccacgccgccggtcagactgacattcttcgtcacatcccacgtcgcgctcagcccaacaatgctgtaaggactaatttctttggtttccggtccaaccgctggctgacctttatagttgtacttcttcggctgctgcttaccgtaccaggtgaaggtcgtttgcatcgacaaatcttctcgtgcctgccagctcagcgttgagttcaacgtatactccgggatgatcgacaaacggtcgcccgtggttttgttttcactcttcagcatataagtgatgttattagtccacatcaccgtttcgctaaccggtacgtttaacgatccttccagaccttcaaccaccgctttcggcacgttatcccactgatagagatcggtgccgactgcgttttgccctacagcaacatagcctgcttcaatcttattgcgataatcgttacggaaccaggtgatgcccgccagccagccgtcgcgtttgaactccagaccaatctctttgttgatgctggtttctgctttcaggtcatcgttaccttgcagatagcagccgcccgcgctggcatagcagccctgacctttactgtagagaatgtagttcgggttagtctggtacaggctcggcgctttataggcgcgggcaatgcccattttcagcgtgaagtcatcgcctaaaccttgcgatatgttcagcgccgggctccagttattgccgacaatactgtgatgatcgaaacgcagccccggcgttacgatggtgctgtcagtcagctccatgttgttttcggcaaacagcgagaaaatttctgcttttgaatacgggctacggtcggtggcactcacgccatcaatagcgccaccggtattcgttccggtcagtgcctgggtgttggaacttaagtccttcatccgctgctgattccactccgtacccagcgtcagcgtctggttaacgaggaaatcaatcggcaggttaacttcgctatgcagcatcacgtcatcaagatcgttatcgacgaaatcctgtgtcgctttttcgttaaatttcccttcggtaccgcccgccagaccttccggaatacgcgagttacgggtgtgttcgtactgcacccagttgctggtggtcacgccgttatcccagccaccgttccaggtcagcgagtagttctggcgatacaggcggttggtttcatcgccatatttcgagcgagtgtaagcgtcagagttggtgttctgggtatcgcccgcatacaggttaccctggcggctgtaacccgcttccagttccagcgattgcaatggtgcgaagtcccagcgcaccacgccattaatatctttattgatcaccccttcgcgcccggctggtaacgtcgtggcatacgttccggcacgcgcggactgatgaccctggttgatatcccacgcgtcagcctgggttttgtcgaggttgccatacaagcggaagctgaattcgtcgcccagcggaccggtcaggctaaagttagtgcgtttggtggcaccttcctctttatgttctggcgcattgaaatatgcgtcccaggagccgtgccactcgccgctgccttttttggtaatgatgttaaccacgccgcccgccgcgccgttgccataacgcncagctgccggaccacgcagaacttcaatacgttcaatcatttcaggtggcacccaggaggtatcaccacgggtatcgcgctcgccacgccagccctgacgcaccgagttacggctgcttaccggcttgccgtcaatcaaaatcagcgtgttttccggacccataccgcgaatatcaatctgtcggttattccctcgctgaccactggtggagttaccggtcaggttaacgcctggcatggtacggatgatctccgaaacatcgcgggcaacggggtttttgcggatttcatctgcggtgatggtcgaaacgccaggcgcctgtaagttctgctcggcggcggtaacgacaatagtatcgtcatgtgaaacaggagtatcggtcggntcttgtgcctgcgctaccccataaatccccagattgaccaacaaggccagggaatgaatcttcttgttcattgttttattcctgcatttttgccacgaattgcaactgtcgggcatggtcgtcatcaacacgacgcatcccgctaccgcgaaaacctttgatcctgaaagacacgcagtgcagttggttaattaatgtccgcgcttcccacggcangccattacgctattgcaaatgcaaatagttatcaataatattatcaatatatttctgcaatcaatgaaaaattgcacagtaaacatggggttatggtgtgacggcgttaaaagtaggaagtgagagctggtggcagtcgaaacatggcccggaatggcagcgtctgaatgacgaaatgtttgaggtcactttctggtggcgtgatccccaaggttctgaagaatactcgacgataaagcgcgtatggatctacatcactggtgtgaccgatcatcatcagaacagccagccccagtcgatgcagcgaattgcaggtactgatgtctggcagtggacgacacaactcaatgccaactggcgcggcagctactgctttattcccaccgaacgcgatgacattttttctgcaccatcccccgatcgcctcgaattacgtgaaggctggcgaaaactattaccccaggcaatagccgatccgctgaatccacaaagctggaaaggcgggcgagggcacgctgtttctgcactcgaaatgccgcaagcgcctctgcaaccgggatgggattgtccgcaagcgccagaaataccagccaaagaaattatctggaaaagtgaacggttgaaaaattcacgtcgtgtatggatttttaccaccggcgatgtaacagcagaagaacgcccgctggcagttttgctcgatggcgaattttgggcgcaaagtatgcccgtctggcctgtgctgatttcgctgacccatcgtcagcaacttcctcccgccgtgtatgtgttgatcgacgctatcgacaccacgcaccgcgcccacgaactgccgtgtaatgcggatttctggctggcagtacagcaagagttattacccctggtgaaagctattgccccttttagcgatcgcgccgatcgcaccgtggtcgccgggcagagttttggtgggctgtccgcgctgtatgccggactgcactggcctgaacgctttggctgtgtattaagccagtcaggatcgtactggtggccgcatcggggcgggcagcaagagggcgtgttacttgaaaagctaaaagctggtgaagttagcgccgaaggtctgcgcattgtgctggaagcgggtattcgcgagccgatgatcatgcgggccaatcaggcgctgtatgcgcaattacaccctataaaagaatccattttctggcgtcaggttgacggcggacatgatgcgctttgttggcgcggtggcttgatgcaggggttaatcgacctctggcaaccacttttccatgacaggagttgaatatggcattcagtaatcccttcgatgatccacagggagtgttttacattttgcgcaatgcgcaggggcaattcagtctgtggccgcaacaatgcgccttaccggcaggctgggacattgtgtgtcagccgcagtcacaagagtcctgccagcagtggctggaagtccactggcgtactctgacaccggcgaatttcacccagttgcaggaggcacaatgagccagcatttacctttggtcgccgcacagcccggcatctggatggcagaaaaactgtcagaattaccctccgcctggagcgtggcgcattacgttgagttaaccggagaggttgatgcgccattactggcccgcgcggtggttgccggattagcgcaagcagatacgctgcggatgcgttttacggaagataacggcgaagtctggcaatgggtcgatgatgcgctgatattcgaactgccagaaattatcgacctgcgaaccaatattgatccgcacggtactgcgcaggcattaatgcaggcggatttgcaacaagatttgcgcgtcgatagcggtaaaccactggtctttcaccagctgatacaggtggcagataaccgctggtactggtatcagcgttatcaccatttgctggtcgatggcttcagtttcccggccattacccggcagatcgccaacatttactgcgcattgctgcgtggcgaacaaacgcctgcttcgccgtttacgcctttcgctgatgtagtggaagagtaccagcaataccgcgaaagcgaagcctggcagcgtgatgcggcattctgggcggaacagcgtcgtcaactgccgccgcccgcgtcactttctccggcacctttagcggggcgcagcgcttcggcagatattctacgcctgaaactggaatttaccgacggggaattccgccagctggctacgcaactttcaggtgtgcagcgtaccgatttagcccttgcgctggcagccttttggctggggcgattgtgcaatcgcatggactacgccgccggatttatctttatgcgtcgactgggctcggcggcgctgacggctaccggacccgtgctcaacgttttaccgttgggtattcacattgcggcacaagaaacgctgccggaactggcaacccgactggcagcacaactgaaaaaaatgcgtcgtcatcaacgttacgatgccgaacaaattgtccgtgacagcgggcgagcggcaggtgatgaaccgctgtttggtccggtactcaatatcaaggtatttgattaccaactggatattcctggtgttcaggcgcaaacccataccctggcaaccggtccggttaatgaccttgaactggccctgttcccggatgaacacggtgatttgagtattgagatcctcgccaataaacagcgttacgatgagccaacgttaatccagcatgctgaacgcctgaaaatgctgatcgcccaattcgctgcggatccggcgctgttgtgnggcgatgttgatattatgctgccaggtgagtatgcgcagctggcgcagatcaacgccactcaggttgagattccagaaaccacgcttagcgc

SEQ ID NO: 162 - DNA, 18428 bp, Escherichia coli
  Strain O55:H7
  modified_base (837)..(839): a, c, g or t
  modified_base (2206)..(2206): a, c, g or t
  modified_base (2830)..(2831): a, c, g or t
  modified_base (2834)..(2834): a, c, g or t
  modified_base (2837)..(2838): a, c, g or t
  modified_base (7550)..(7550): a, c, g or t
  modified_base (7602)..(7602): a, c, g or t
  modified_base (7610)..(7610): a, c, g or t
  modified_base (8625)..(8625): a, c, g or t
  modified_base (8957)..(8957): a, c, g or t
  modified_base (10405)..(10405): a, c, g or t
  modified_base (10888)..(10888): a, c, g or t
  modified_base (11043)..(11043): a, c, g or t
  modified_base (11185)..(11185): a, c, g or t
  modified_base (11633)..(11633): a, c, g or t
  modified_base (16745)..(16745): a, c, g or t
ggcagaacaagcggcaaaaacaccggatgctccggcgctggcagatgcgcgttaccagttcagctatcgggaaatgcgcgagcaggtggtggcgctggcgaatctgctgcgtgagcacggcgttaaaccaggggacagcgtggcggtggcattaccgcgctcggtctttttgaccctggcgctacatgcgattgttgaagcaggtgcggcctggttaccgctggataccggttatccggacgatcgcctgaaaatgatgctggaagatgcgcgtccgtcgctgttaatcaccaccgacgatcaactgccgcgctttgccgatgttccagatttaaccaatctttgctataacgccccgcttacaccgcagggcagtgcgccgctgcaactttcacaaccgcatcacacggcttatatcatctttacctctggctccaccggcaggccgaaaggggtaatggtcgggcagacggctatcgttaaccgcctgttgtggatgcaaaatcattatccacttacaggtgaagatgtcgttgcccaaaaaacgccgtgcagttttgatgtctcggtgtgggagtttttctggccgtttattgccggggctaaactggtgatggctgaaccggaagcgcaccgcgacccgctcgctatgcagcaattctttgccgaatatggcgtaacgaccacgcactttgtgccgtcgatgctggcggcatttgttgcatcgctgacgccgcaaaccgctcgccagaattgcgcgacgttgaaacaggttttctgtagtggtgaggccttaccggctgatttatgccgcgaatggcaacagttaacgggcgnnncgttgcataatctatatggcccgacggaagcggcggtagatgtgagttggtatccggcttttggcgaggaactggcacaggtgcgcggcagcagtgtgccgattggttatccggtgtggaatacgggcttgcgcattctcgatgcgatgatgcatccggtgccgccgggtgtggcgggagatctctatctcaccggtattcaactggcgcaggggtatcttggacgacccgatctgaccgccagccgcttcattgccgatccttttgtccctggtgaacggatgtaccgtaccggagacgttgcccgctggctggataacggcgcggtggagtacctcgggcgcagtgacgatcagctaaaaattcgcgggcagcgtatcgaactgggcgaaatcgatcgcgtgatgcaggcgctgccggatgtcgaacaagccgttacccacgcctgtgtgattaaccaggcggcagccaccggtggtgatgcgcgtcagttggtgggctatctggtgtcgcaatcaggtctgccgttggataccagcgcattacaggcacagcttcgcgaaacattgccgccgcatatggcgccggtcgttctgctgcaacttccacagttacctcttagcgccaacggcaagctggatcgcaaagccttaccgttgcctgaacttaaggcacaaacgccggggcgtgcgccgaaagcgggcagtgaaacgattatcgctgcggcattcgcgtcgttgctgggttgtgacgtgcaggatgccgatgctgatttcttcgcgcttggcggtcattcgctactggcaatgaaactggcagcgcagttaagtcggcagtttgcccgtcaggtgacgccggggcaggtgatggtcgcgtcaaccgtcgccaaactggcaacgattattgatggtgaagaggacagctcccggcgcatgggattcgaaaccattctgccgttgcgtgaaggtaatggcccgacgctgttttgtttccatccggcatccggttttgcctggcagtttagcgtgctctcgcgttatctcgatccactatggtcgattatcggcattcagtcgccgcgccctcatggccccatgcagacagcgacgaacctggatgaagtctgcgaagcgcatctggcaacgttacttgaacaacaaccgcacggcccttattacctgctggggtattcccttggcggtacgctggcgcagggcattgcggcgcgactacgtgcccgtggcgaacaggtggcatttcttggcttgctggatacctggccgccagaaacgcaaaactggcaggaaaaagaagctaatggtctggacccggaagtgctggcggagattaaccgcgagcgcgaggcnttcctggcggcacagcagggaagtacttcaacggagttgtttaccaccattgaaggcaactacgctgatgctgtgcgcctgctgacgactgctcatagcgtaccgtttgacggaaaagcgacgctgtttgttgctgaacgtacgcttcaggaaggtatgagccccgaacgcgcctggtcgccgtggattgcggagctggatatctatcgtcaggattgtgcgcatgtggatattatctctccaggggcatttgaaaaaattgggccgattattcgcgcaacgctaaacagataaattaacattatctataaacccataattgcaggaaataattatgggtttatcatttatttaatttataagtttgctggttatttttcttaaatagagtgaatgttgcattcagtggaatgaatttacaaacttcagcttcggataattctcaccaactggtaaagtgagcgccgtggagatttccccctattggactcattttcaggttataccccatgtcatcactgaatattaaacagggaagtgacgctcattttcccgattatcctctggcgtcgcccagtaataatgaaattgatttacttaatctaatctcagttttatggcggnncanaannacggtcatggcggtcgtttttgcgtttgcctgtgcaggcttgctgatctctttcatcctgccgcaaaaatggaccagcgcggcggttgtcacgcctccagaacctgttcagtggcaagagttggagaaaacattcactaagcttcgtgtgctggatctggatatcaaaattgatcgtacagaagcatttaacctgtttatcaagaagtttcagtcggttagcttgctggaagagtacctgcgttcatcaccttatgtgatggaccaattaaaagaggcgaaaatcgacgaactggatttgcatcgcgcaattgtcgcattgagcgaaaaaatgaaagcggttgatgacaatgccagtaagaaaaaagatgaaccgtcactgtatacctcctggacgctaagttttaccgcgccaaccagtgaagaggcgcagaccgttttgagcgggtatatcgattatatctctgcgttggtggtgaaagagtcgatagaaaacgtccgtaataaactggagatcaaaacccagtttgaaaaagaaaaactggctcaggaccgcattaaaatgaaaaatcaacttgatgcaaacattcagcgcctcaattattcactcgacattgccaacgcggcaggaattaaaaagcccgtttacagtaatggtcaggccgttaaagatgaccccgatttctctatttctctcggcgcagagggtattgaacgcaaactggaaattgaaaaagcggtcactgacgttgcggaactgaacggtgaattacgtaatcgtcagtatcttgttgagcagttaacaaaagcaaatatcaacgatgtgaattttacgccgtttaaatatcagttaagcccgtcattgccagtgaaaaaagacggtccgggtaaggcgattattgtgatcctttccgcgctgatcggcgggatggtggcttgtggtagcgtgttattgcgctatgcgatggcatccagaaaacaggatgccatgatggcagaccacttagtttaactatttgcggttgaaggtgccgttcgtccgagcggcaccacgagcggcgttccggctaccggatcgtcaatgatcatgcagcggagaccataaatgcgctcaatcagttcagcagtgacaatctccttcggcgctccctgagcaacaattttcccttctcgcaatgcaatcaaatggctggcgtaacgacaggcctgattaagatcgtgcagcaccgccgccagggtatagcctttctcgcggttcagttcgcttaacagttccagcaaatcaatctgatgactgatatccagccaggtcgtgggttcgtcgagcagcataattgccgtttcctgggccagcaccatcgcgatccacgctcgctggcgttgcccaccggaaagggtatccacgctttgatctgcaagatgagttattcccgtggcctgcatcgctttcgttaccgcctcttcatcttctttgcgccaacgggtaaacagcggttgatgtggataacgcccacgcgccaccagctcctgcacggtgatatctcccagcgtggtggcattttgcgccaacagaccaatccgccgggcaacttctttactggcgtaatgttgaatgtgctcgccatccagccagacatgcccatgagcaggcgtcatcaggcggcttaaggtacgcagcaacgtggatttaccgcagccatttggcccgataattgccgtgaagtgaccatcaggtatttctacagtcagattttccgcaacggtatatttgccatatcccagggttaactgttcgccgcgcaaacgggctactgattcggtcattttttgcgagactcctgaattaacaaaacgataaggtaaataccgccgaggctgacggtaacgacgccaaccggaagttgatacggcataaacagttgttgggcgcagagatcggccgccagcagtaacagcgccccgcatagcgccgcctgggttagcccccagcgagcggtgccgctaatgcgtcgggcaatgtgcggcgcgactaaagcaataaaggaaatcggcccggcaagcgctgttgccgcagcggtaagcaccactgcaaccagcatcattaacagacgcgaacgttcgacgctgacgcccagcgcacacgcggtatcatcgcccatttccagcaagcgcatccggcgtaccagtaaggcggcggcaattagcatcaatataatgatgggtgcggaaggcgaggtttttgcccacgtcaggccgttgagcgatccggcattccacaaacctgctgttagcgccgtttctaaagacgctttcagcaacagccaggtattaaaggccaccagcatggcgcgaacgccgataccgataataatcaaccgaaaggtgtcgataccgttacgccaggcgagcagccagaccaacagcgaagtgataatgccgcccaccattgctgccagcgcgatagccgtcagatcctgaccaaacagcaccatcgccaccagcacgccgctccacgccccggtgttaaagcccattacgtcagggctgccgagtgggttacgcatcagcgactgaaaaatcgcaccgctgacgcccagtgccgcgccaatcaacagcgccatcagcacgcgtggtaaacgccattcggtgaccaccatcgtcatactgcgcggcgcatcgcccatcagcgcggcgaatacctgcgagatttccagcgtgacggcaccgctgcgtaatccccagatacctgcaaccacacaggcggaaatcagcagcaaacaggtgatgagtaatcggcgagagacgtaaatcatgcaccacctcgcgttttacgtcgcacgaggaagatcagcaccggtgcaccaataaacgcactgaccacagaaacgcgcagttcaccgggcacaatcacccgcccgatgatatcggcaaacagcagcagggcaggggtagcaagtagcgtgacgggcagcgaccagcgatgatcggcacccaccagccaacgcgccatatgcggcatcatcaggccaataaaggcaatagggccaactaccgccgtcgcactaccacaaagcacggtaatcgccagcagaccaatcaactgtgtgcgcgccacgcgactgcccagcgccgtcgcggtgtcgctgccaaggcttaaactgttcagcgcgcgactcagtaatagcgcagttgctccggcgatcagcactgggatcagcaccacttttaaggtatgtagattgcgaatatccagcgaaccggcttgccagaaacgcagttgatcgtagacgtcaggattaagcagggcgatgccgctggtcagcccttccagcaccgccgccagcgccacgcccgccagggttaaacgcaccggacttaactgcccaccgccctggctgccggtaaaggcaacaatcaacgaggccaccagcgccccggcgaaggccatcgccagttgttcctgtgcggaagagtaaccaaacagcgccgcacccagcacaatggcaaagctggctccggcgttcacgccaagcaagccggggtcggcaagtgggtttcgggtgagggtttgcattaacgccccggcaaggccaagcgcgccgcctgccagtaaaccggcaagggtacgcggcagccgcgcgtcgagcacgatggtgcagtcggcgctctggcaggtgccggagaaggcctccagcactacggaagcggggagtgattttgccccaatgagcaggcttaatgccgtcgcgataatcagtaataacagcaatccgggcacggcaatggcgcgtgtcacggcaacagaaccagacatacgaacttccatgataatgaaattaattatcgttatcgatcttatttggatatgttagcatgtgcagcctaagaataggtatttaaaatatttgatggcaaggcattgtaatgaataaacaatcctggctgcttaacctcagcctgttgaaaacgcacccggcgtttcgcgcagtattcctcgctcgtttcatctcaattgtgtctctgggtttgctcggcgtcgcggtgccggtgcagatccagatgatgacacattccacctggcaggtggggctttcggtgacgctgaccggcggcgcgatgtttgttggcctgatggtcggcggtgtgctggcggatcgctatgagcgcaaaaaagtgattttgctggcgcgcggcacctgtggcattggcttcattggactgtgcctgaacgcgctgctgccggagccgtcattgctggcaatctatttacttggtttatgggatggttttttcgcatcgcttggcgttacggcgctattggcggcgacaccagcactggtagggcgtgaaaacttaatgcaggccggggcgatcaccatgttgaccgtgcgtctggggtcggtgatttcgcccatgattggcggtttactgctggcgactggcggtgtggcctggaactacgggctggcggcggcgggcacgtttattaccttgctaccgttgttaagccttccggcactgccaccgccaccgcagccgcgtgagcatccgttgaaatcattactggcaggatttcgttttctactcgccagcccgctggtgggagggattgcgctgctgggtggtttattgacgatggcgagtgcggtgcgggtactgtatccggcgctggctgacaactggcagatgtcggcggcacagattggttttctntatgcggcgatcccgctcggcgcggctattggcgcgttaaccagcgggaagntggcgcanagcgcgcgaccagggttattgatgctgctctccacgctgggatcgttcctcgccattggtctgtttggcctgatgccgatgtggattttaggcgtggtttgtctggcgctgttcggctggttgagtgcggtcagctcgttgctgcaatacacaatgctgcaaacgcaaaccccggaagcgatgttagggcggattaacggtttgtggacggcacaaaacgtgacgggcgatgccataggcgcggcgctgctgggtggtttgggagcgatgatgacaccggttgcttccgcaagcgcgagcggttttggtttattgattatcggcgtgttgttattgctggtgctggtggagttgcgacgttttcgccagacgccgccgcaggtgacagcgtctgacggttaatgcttaaaacagcgccttaagtcgttccagcacttgcatggcgctgtagtaatccagacggaacgtctcggttcccagcgcataaacctgcttgttttgtactgcaggcaggtgcgcgagcagcggattagcataaatagcatcggcatctttctgatcaccggcgaacaggaatagtgactcgccatttaaccctgcagccagattttccccaccaagctgaatgatgtcatggcgtttaccctggctttggctggcatttaaccctgcgggtaacttcgccagcgtaaagccgagttgttccagcatctgcccttgtgctgattccggcgtccagagattggcactgtgtgcagcggcagtatagacaatggcagtgaccggctgcggcggtaatttgatttgctctttcgccgccgccagttgcttatcaaactgcgcaatccgctctgccgcttgtttctcatgcccggtaatttcgccaagttgcgttaacagcgcctgccagcttttgtcgtcgtaattgatgattaatgtcggggcgatggtggaaagctgatcatacagcgccagcgccgaatccccgccggttgcgctaattaaaatcagatcnggcatttgcgcggcaacggcttcggcgctcggttcgccgatatagagccgttgcagtttgcgttctttcgccaccttgctccactggcgtaaaaagccctggtcatccgcgacgcggttattcggcgtggtcgcgccgctggcgatcaccggagcatcaatcgccagcagtgagccggtcagggtgacgctggtggaaacaatacgctgcggctggctttccagggtatgagtgccacggctgtcagtaatctgacgcggccagtcggcggcctgaactgcggctattcctgaaaacaaaagtcctgttaatagaagggcattgcggtagancggggcgagtctcacaaatcagcctcctgttattaatgaagttaatgcttctcattttcattataaccacaaccagatgcaaccccgagttgcagattgcgttacctcaagagttgacatagtgcgcgtttgcttttaggttagcgaccgaaaatataaatgataatcattattaaagcctttatcattttgtggaggatgatatggatacgtcactggctgaggaagtacagcagaccatggcaacacttgcgcccaatcgctttttctttatgtcgccgtaccgcagttttacgacgtcaggatgtttcgcccgcttcgatgaaccggctgtgaacggggattcgcccgacagtcccttccagcaaaaactcgccgcgctgtttgccgatgccaaagcgcagggcatcaaaaatccggtgatggtcggggcgattcctttcgatccacgtcagccttcgtcgctgtatattcctgaatcctggcagtcgttctcccgtcaggaaaaacaagcttccgcacgccgtttcacccgcagccagtcgctgaacgtggtggaacgccaggcaattccggagcaaaccacgtttgaacagatggttgcccgcgccgccgcacttaccgccacgccgcaggtcgacaaagtggtgttgtcacggttgattgatatcaccactgacgccgccattgatagtggcgtattgctggaacggttgattgcgcaaaacccggttagttacaacttccatgtcccgctggcagatggtggcgttctgctgggggccagcccggaactgctgctacgtaaagacggtgagcgttttagctccattccgttagccggttccgcacgtcgtcagccggatgaagtgctcgatcgcgaagcgggtaatcgtctgctggcgtcagaaaaagatcgccatgaacatgaactggtgactcaggcgatgaaagaggtactgcgcgaacgcagtagtgagttacacgttccttcctctccacaattgattaccacgccgacgctgtggcatctcgcaactccctttgaaggtaaagcgaattcgcaagaaaacgcactgactctggcctgtctgctgcatccgacccccgcgctgagcggtttcccgcatcaggccgcgacccaggttattgctgaactggagccgttcgaccgcgaactgtttggcggcattgtgggttggtgtgacagcgaaggtaacggcgaatgggtggtgaccatccgctgcgcgaagctgcgggaaaatcaggtgcgtctgtttgccggagcggggattgtgcctgcgtcgtcaccgttgggtgagtggcgcgaaacaggcgtcaaactttctaccatgttgaacgtttttggattgcattaaggagcgaggatgagcattccattcacccgctggccggaagagtttgcccgtcgctatcgggaaaaaggntactggcaggatttgccactgactgacattctgactcgccacgctgcgagtgacagcatcgcggttatcgacggcgagcgacagttgagttaccgggagctgaatcaggcggcggataacctcgcgtgtagtttacgccgtcagggcattaaacctggtgaaaccgcgctggtacaactgggtaacgtcgctgaactttacattacctttttcgcgctgctgaaactgggcgttgcgccggtgctggcgttgttcagccatcagcgtagtgaactgaacgcctatgccagccagattgaacccgcattgctgattgccgatcgccaacatgcgctgtttagcggggatgatttcctcaacacatttgttgcagagcattcttccattcgcgtggtgcagctactcaacgacagcggtgagcataacttgcaggatgcgattaaccatccggcagacggttttactgctacgccgtcacctgcngatgaagtggtctatttccagctttccggcggcaccaccggtacaccgaagctgatcccgcgcactcataacgactactactacagcgtgcgtcgtagcgtcgagatttgtcagttcacacaacagacacgctacctgtgcgcgatcccggcggntcataactacgccatgagttcgccgggatcgctgggcgtctttcttgccggaggaacggttgttctggcggccgatcccagcgccacgctttgcttcccattgattgaaaaacatcagattaacgttaccgcgctggtgccnccggcagtcagcctgtggttgcaggcgctgaccgaaggcgaaagccgggcgcagcttgcctcgctgaaactgttacaggtcggtggcgcacgtctttctgccacgcttgcggcgcgtattcccgctgagattggttgccagttgcagcaggtgtttggtatggcggaagggctggtgaactatacccgtcttgatgatagcgcggagaaaattatccatacccagggttacccaatgtgtccggatgacgaagtatgggttgccgatgccgaaggaaatccactgccgcaaggggaagtcggacgactgatgacgcgcgggccgtataccttccgtggctattacaaaagcccgcagcacaatgccagcgcctttgatgccaacggtttttactgttccggcgatctgatctctattgatccagagggttacatcaccgtgcaggggngcgagaaagatcagatcaaccgtggcggcgagaagatcgctgccgaagagatcgaaaacctgttactgcgccatccggcggtgatctacgccgcactggtcagtatggaagatgagctgatgggcgaaaaaagctgtgcttatctggtggtaaaagagccgcttcgcgcggtgcaggtgcgtcgtttcctgcgtgaacagggtattgccgaatttaaattaccggatcgcgtggagtgtgtggattcacttccgctgacggcggtcgggaaagtcgataaaaaacaattacgtcagtggctggcgtcacgcgcatcagcctgaaggagagaacacgatggctattccaaaattacaggcttacgcactgccggagtctcacgatattccgcagaataaagttgactgggcctttgaaccgcaacgtgccgcgttgttaatccatgatatgcaggactattttgtcagcttctggggcgagaactgcccgatgatggagcaggtgatcgcgaatattgctgcgctgcgcgactactgcaaacagcacaatatcccggtttattacaccgcccagccgaaagagcagagcgatgaagatcgggcgctgttgaatgatatgtgggggccgggcctgacccgttcgccggaacagcaaaaggtggtggatcgactgacgccagatgccgacgacacggtgctggtgaagtggcgctacagcgcgtttcatcgttctccgctggagcaaatgctcaaagagagtggacgtaaccagctgattattaccggggtatatgcccacattggctgtatgaccaccgcaaccgacgcatttatgcgcgatattaaaccgtttatggtggcggatgcgctggccgatttcagccgtgacgagcatttgatgtcgctgaaatatgtggccggacgttctggccgggtggtgatgaccgaagaattactgccagcacctatccccgccagcaaagcggcgctgcgtgaggtgatcctgccgttgctggacgagtccgatgaaccgttcgatgacgacaacctgatcgactacggtctggattcggtgcgcatgatggcgctggcggcgcgctggcgcaaagtgcatggcgatatcgactttgtcatgttggcgaaaaacccgaccatcgacgcctggtggaagctactctcccgcgaggtgaaataatggatttcagcggtaaaaatgtctgggtaaccggcgcggggaaaggtatcggctacgccacggcgctggcgtttgttgaagcgggagcgaaagttacaggttttgatcaagcgttcgctcaggagcaatatccctttgcgaccgaagtaatggatgttgccgatgctgcgcaggtggcgcaggtatgtcagcgactgttagctgaaacggagcgactggacgtgctggtcaatgcggcgggaattttgcgcatgggcgcgaccgatcagctcagtaaggaggactggcagcagacttttgcggttaatgtcggcggtgcgtttaacctgttccagcaaaccatgaaccagtttcgccgtcagcggggcggggcgattgtcactgtggcgtccgacgccgcacacacgccgcgtattggtatgagtgcttatggcgcatcgaaagcggcgctgaaaagcctggcgttgagcgtcgggctggaactggcgggtagcggcgtgcgctgtaatgtggtttcgccgggttccaccgataccgatatgcaacgcacgctgtgggtgagcgatgacgccgaagaacagcgtattcgcggctttggcgagcagtttaaactcggcattccgctggggaaaatcgcccgtccacaagagatcgccaacacgattttgttcctcgcctctgacctcgccagccatatcaccctacaggatattgtggtcgatggcggctcaacgctgggggcataagcatgatctggaaacgccatttaacgctcgacgaactgaacgccaccagcgataacacaatggtggcgcatctgggaattgtgtatacccgtctgggcgatgatgtgctggaagccgaaatgccggttgatacccgtactcatcagccgtttggcctgctgcatggcggcgcgtcggcggcgctggctgaaacgctgggatcgatggccggatttatgatgacccgcgacgggcagtgtgtggtgggcacggaacttaacgccacacatcatcgcccggtgtctgaaggcaaggtacgcggcgtctgccagccgctgcatcttgggcggcaaaatcagagctgggaaatcgtcgttttcgatgaacaggggcggcgttgctgcacttgtcggctgggtacggcagttttgggatgaacccgacagaattatatgagattgcaggaaaactcggttaacggagtgatcgagttaacattgttaagttaaatattggtttcaactccgatttacatggttgctgtgttgttaaatcgtacaaagatgttatagaaacaaaatgtaacatctctatggacacgcacacggataacaactatgaacaaatcagggaaatacctcgtctggacagtgctctctgtaatgggagcatttgctctgggatatattgctttaaatcgtggggaacagatcaacgcgctgtggattgtggtggcgtcggtctgtatctatctgatcgcttaccgtttttatggtctgtatatcgccaaaaatgtgctggcggttgacccgacgcgtatgacgccagcggtgcgccataacgacgggctggactatgtgccgacggacaagaaagtgctgttcggtcaccattttgcggccattgccggagcaggtccgttggttgggccggtactggcggcgcaaatgggttacctgccagggatgatctggctactcgccggggtggttctcgccggtgcggtgcaggatttcatggtgctgtttgtttctacgcgccgtgacggtcgttcgctgggtgagctggtcaaagaagagatggggccaaccgccggggtgatcgcgctggtggcctgctttatgatcatggtcattatccttgcagtactggcgatgatcgtggtgaaagccctgactcatagcccgtggggaacgtataccgttgcgttcaccattccgctggcgctgttcatggggatctacctgcgctatctgcgtccggggcgtattggtgaagtgtcggtcatcggtctggtattcctgattttcgccattatttctggcggctgggtggcagaaagtccgacctgggcaccgtactttgactttaccggcgtgcagctgacctggatgctggtgggttacggttttgtggcggcggtgctgccggtatggttgctgctggctccgcgtgactacctctctaccttcctgaaaatcgggacgatcgttggtctggcggtaggcattttgattatgcgcccgacgctgaccatgcctgcgttgaccaaatttgttgacggcactggcccggtatggaccggtaacctgttcccgttcctgtttatcaccatcgcctgtggcgcggtgtctggcttccatgcgctgatctcttccggcaccacgccgaagatgctggcgaacgaagggcaggcttgttttatcggctacggtggaatgttaatggaatccttcgtggcgattatggcactggtttccgcctgtatcatcgatccgggcgtgtacttcgccatgaacagcccgatggcggtgctggctccggcagggacggcggatgtggtcgcttctgccgcgcaagtggtgagtagctggggctttgcgattactccggatacgctcaaccagattgccagcgaagtgggagaacagtcgatcatttcccgtgcgggcggtgcgccgacgttggcggtggggatggcctacattctgcatggcgcgctgggcggcatgatggatgtggcgttctggtatcacttcgccattctgtttgaagctctgtttattctgacggcggtggatgcaggtacgcgtgctgcgcgctttatgttgcaggatctgctgggcgtggtttctccgggcctgaaacggaccgattcactgcctgctaacctgctggcaacggcgctgtgcgtgctggcgtggggctacttcctgcatcagggtgtggtcgatccgctgggcggtattaacactctgtggccgctgtttggtattgccaaccagatgctggcagggatggcgctgatgctctgtgccgtggtgttgttcaagatgaaacgtcaacgttacgcctgggtggcgctggtaccaacggcctggctgctgatttgtaccctgaccgcaggctggcagaaagcgtttagcccggatgcgaaagtcggcttcctggccattgctaataagttccaggcaatgatcgacagcggtaatattccatcgcagtatactgagtcacagctggcgcaactggtgttcaacaaccgtctggatgccgggttaaccatcttctttatggtggtcgtggtggttctggcactgttctcgattaagacggcacttgcggcattgaaagagccgaagccaacggcgaaagaaacgccgtatgagccaatgccggaaaatgtcgaggagatcgtggtgcaggcaaaaggcgcgcactaaagtcagagtgaggggggatgttggcgaatgttggcatggcgccgtgggttccccctcaccctaaccctctccccgatggggcgaggggtctgaccgagcgcgttgatagcatttgtaggccggataaggcgttcacgccgcatccggcactctttcagcaacatggttagcggaggccaagatgtttgattcactggcaaaagccggaaaatatttaggtcaggcggcgaagctgatgattggtatgcctgattacgacaactatgtcgaacatatgcgggttaaccatcccgatcaaacgccgatgacctacgaagagtttttccgtgagcggcaggacgcgcgctacggtggaaaaggcggcgcgcgctgctgctaaatttgcacgtcaggctttaaacgattccactttttcgaacgctgcacgcaacgtatctggtgtcagcgtgactggcaggtaatgaatggantccaccgggcgcaaggtgtgggcaatcactttatcgatctccgcctgattattgatatccacttccagctccgccagcgtagtcggcagatgaaaacgctgatacgccccggttaattgcgccagcacatcatcctgacccagcaaggcgctttgcaccagaattccgtaggcgactttggtgccgtggagaaacttctcggtttgtggcaggacagtcagaccgttatgtacggcatgggccgccgctacacgcgtaaaacgatcgcccagaccaccgaccatcccaccaccagcaataatggcatccaccacatcgcaaaatgattgcgttaactgctgattttgctgatcggcaagcgcctgttcgctactgtttaacaagacgtcgcgaatggcctgcgcattattgatccccagtcgcacggttagcggcaacgtttctggttgcggagccagcaccaccgcttcataccatttcgccagcgtatcaccgatccccgccagcagatattgttgcggcgcattgaggataatctccggttccaccagcaccataaaattggcgtcgtcgaaaatctcataatgcagcgcctgtccggcatcgttataccagacggagagcggtgtccaggcggcgcaggtggcggcgatcgttggagcggcaacaaatggcagaccgagacggcgggcgagggctttcgcggtgtcgagtagtgcgccgccgccgacgccaatcaccacgctgcgatcgtcaccggactcagccgccagttgctgtacatcgctttcgctgcaatgaccacgaaacaaaatatgctttgcccctggaagtccaaacgctggcggaagtttggtttgcgccgcagcaatggcgcgtacgccgtagatccacaccgcgcgagaaagttgttcatcagtgaaaaaatcgtgcaggtgattgaaacttcctggatgtgaaaagtagttagccgggccgacgaccacgcggataggattgtgaggcatgttgtgttgtccttattgttttatttagacatctaaacgtcttgattgccaaatactagcatcgtgttatagtgccttcaacacgcaacttcgtcaggtacaataaaaatgacaaataaccctctgattccacaaagcaaacttccacaacttggcaccactattttcacccagatgagcgcgctggcgcagcaacaccaggcgattaacctgtcgcaaggctttcctgattttgatggtccgcgctatttacaggagcggctggcgtaccacgttgcccagggggcaaaccaatacgcgcccatgaccggcgggcaggccttgcgcgaggcgattgctcagaaaacggaacgtttgtatggctatcaaccagatgccgatagcgatatcaccgtaacggcaggggcgacggaagcgttatacgcggcgattaccgcactggtgcgcaatggcgatgaagtgatttgttttgatcccagctatgacagttacgcccccgccatcgcgctttctgggggaatagtgaagcgtatggcactgcaaccaccgcattttcgcgttgactggcaggaatttgccgcattgttaagcgagcgcaccagactggtgatcctcaacactccgcataatcccagtgcaactgtctggcagcaggctgatttcgccgctttgtggc

SEQ ID NO: 163 - DNA, 7096 bp, Escherichia coli
  Strain O55:H7
  modified_base (2)..(5): a, c, g or t
  modified_base (1696)..(1696): a, c, g or t
  modified_base (1867)..(1867): a, c, g or t
  modified_base (3223)..(3223): a, c, g or t
  modified_base (6532)..(6532): a, c, g or t
annnncgggcacgagatttttgtcattagcgatgaagtctacgagcacatcaacttttcacaacagggccatgccagtgtgctggcgcatccgcagctgcgtgagcgggcggtggcggtgtcatcgtttggcaagacctatcatatgaccggctggaaagtgggttattgtgttgcgccagcgcccatcagcgccgaaattcgcaaggtacatcagtatctgaccttttcggtgaataccccggcacagctggcaattgcggatatgctacgtgcagaacctgagcattatcttgcgttaccggacttttatcgccagaagcgcgatattctggtaaatgccttaaatgaaagtcggctggagattttaccgtgcgaaggcacatactttttgctggtggattacagcgcggtttctaccctggatgatgttgagttttgccagtggctgacgcgggagcacggcgtggcggcgattccgctatcggtgttttgcgccgatcccttcccacataaactgattcgtctctgttttgccaagaaggaatcgacgttgctggcagcagctgaacgactgcgccagctgtagttatttgacagtccaggcgcgggaatattgacggtcggcaaacagctcttgcagaccgttaatttgcttcaggcgcagcacttcgtcgctgtccattcccagctctttgccaattttattatcgtcccatcccaactgactgagttcacggacgatttccgacatggcggtgatttgatggcgtccacgagcgcgattatgacgaatagtcgcggcgatgcgttgattacgcgtaccttccagacaggtcaccggcaaataaccttttaagcgtaattttaatgatgatgagcctttaccaatttcatggcggtgaaaaccatccacgatttccagggcatttttatccgtatgcgtgaccacaatgggttgggtaaaaccatctatttcaatggattttttcagcagttttttttcgggtggtgccacgttgtttgggttgtaatcattaggcataagttggctgtttttaacccacagaacgcaatccactggctcttcacgaaaggggctaacctgatggatcgccatgcggatttcattaatcgcgttgatgcgatcatcttccggcaagctggcgagaaattgcgttaaatcctgcgttaatcgttgttgcatagtatcccccattcctgacgttttccttttatccgttcgttataacgctgatagttcttcgctttcgtaggactaaatgataatgcccgacaccagtaatcgttattgagtaaaactttgcatatccgccgccaggaggggatatctttcgcgccaatgtccccttgctgggtttgtggaacctcgatgccttttttctgataccagtgcaaataaatggcgattttattgcggtaatgctcagctgttttttccggcatgctattgagcagcaataatgcatattcttgccagtctaaatgttctggcttgaggattttccgatgcccatagaaatgattatcatgtccggcgtaaatgccgccactttttaccccgctgactcgtgcgcacatagcagcccagcgatccggttcgataacgtgatagagccataatccttgtcgttgctccgggccaaaaggttcgcaaattcgcatatgacgcagangaacgcctgcctgatacattaggttatacagtgggttgcagagactttgatgatttgcataccaggtccagatatcagccactttccagtcgtaaatggggtaaatgtaccagctatgaccgcctggtgcggccgtagtccagggtttatcgtcggcaaaacgttgtttanttaaactggcgatggcgacaaaacggttgtaggactcatccgcacggatgccgatcatcatcgccgccggacgtttttgtgaaaaccattcggcaaactcacgtacaaattgttcgaaggtcatgcctggctggtaaaagcagaaaaagtcaggatcggttatcgcatcttgcgggggctgacgcacccattcgacatcaggttcccagcactgccattcgggttggtattgtgaaagggaattttgcgtcgtaagcgggagcgcaacccagtaaaactcttcgatgacatcggtgtacaactcgcgcagggactgaacatagttaatggtgcaagagaattgcgcctcccagtcgataaacaaaacgcagatttttttgcccatttgtcgggcgagttcggctgtcagatgcagcattaaaccagagtctttgccgccagaaaatgagacacaaacgcggggtagggtgttgagtgtccaggtaatacgctctcgtgcagcttccagaatattgagcggaagaggaattttataaatagacatctgaagacgctctctgaacgttacagggtgatcagtgagataagactgttaattataaagtaaacactgaaaagcagagtgttttatttttcattcgcgctgtgaataaataggtgaaagtcatagtagctgtctgaggttatatatcaaaaacactcatttagacggtcaataaatcgtgagaacaccagattgtttaaagaagatttattataggaaatgtaaagctttattgaaggtaacggatgttctagttttatctcttttaaattaagaaagtcacggtgggagttataaagttcataggggactattcccagtaaatctgtaactgcaatgctattaatgattgtcagcaaagaggaaccacgaaatgaaattttgcgattcataaatctctcgtctatttccatttgaatatcatcaacccctgctgatttagatattaattgggtgaactcttctgccataatttgttcataagtgctattgtcagtaattcgtggatgcctattactacaaattagagtattgcgaatcgtatgcaatggcatgcaaatgacggaacggctgatcactggcatttgggtgatcaccagatcggctttgcggtgaaccaacagttcttcagcattctctgctgacatgaggatatcatggcactcaatctcgacagaggaatcttgccgtaggcagcggatcagcatactattattagagcaagaaatgagctgagggccgtgaataataaagtttttctttagttcggacttattgactatattaattgtttgttcaaggcctctgagatntttctcaagatggtgatgcagatttaaccctgttgtcgtcggcgcgataccttttcctgagcgaatgaataaagggtcattaaattgcgcacgtaagcgttgtaacgactggctcacggctgatggggtgatatatagtgattcagcagctttgctaatgcttaaatgctggtaaatacactcaaatatgacaagaagatttaagtcgaactttttcaagtcgtagagattggtcatacactactccggttatatttttcttccatgatatattcacttaatcaatgttttttgcgtatatatttttattgattatgttttttttgcttaactcaggattaagtttttctaaaatagcacagccacttagggcagagcgagcaattcatgcttttttaggatggttgaaaagcagggatatagttcaaccatccatgaattaccttttatttatttcccataatgatattaagcgttttctgatcgggcaaccccacggcctgttgcagcgtattttccttactcatgtaatagatagccggagtgacatttgcccccagatcgtccatgagtttctcgttgtcgcttaacactttcatttgctctgtacttacgtttgcaggcacgtttagcttaagcttgccaccagaggcttcatattcttgccaggtttttgcgggatctttggaggcaagaattgccgcggctgtcgccggactttctggtttgataaccccaaccaacaatgttctcaactgtactttgccagaatctacccacgggcgcgcctgctgccagaactgtttacaatatgggcagaacggatcggcgaagacgtagacaatgaccggcgcatcttttttaccgtcgaggagccagtgggattgttccatccgttgccacatttcgcgtccggctggtgcgtaaatttctttttcgataagtgtgttactcaggttttcacctttctcgttgtacatgtaaccagagatagcgtgcttaccatctggagtcaggtagatggtgacgcccatatcctgatactttccgagataacctttcattcctccgggggcatcgaacgttttgatgattgtaatgccctgtttttcaatcgcttttactggagcaggaagttcctctgcgaaggcgattgcaggaagcagagccagtaaaagtatcttttttaacattaatttgtccttttcagtcagtgcaaaagtcgagtaaaaggcataacctatcattgtcataggtaagagcttagatcaggtgattgccctttgtttatgagggtgttgtaatccatgtcgttgttgcatttgtaagagcaacaacgcagcctgcagactggcgctgaagataccaaagggtagttcagattacacggtcacctggaaagggggccattttactttttatcgccgctggcggtgcaaagttcacaaagttgtcttacgaaggttgtaaggtaaaacttatcgatttgataatggaaacgcattagccgaatcggtaaaaattggttaccttacatctcatcgaaaacacggaggaagtatagatgtccttgattaacaccaaaattaaaccttttaaaaaccaggcattcaaaaacggcgaattcatcgaaatcaccgaaaaagataccgaaggccgctggagcgtcttcttcttctacccggctgactttactttcgtatgcccgaccgaactgggtgacgttgctgaccactacgaagaactgcagaaactgggcgtagacgtatacgcagtatctaccgatactcacttcacccacaaagcatggcacagcagctctgaaaccatcgctaaaatcaaatatgcgatgatcggcgacccgactggcgccctgacccgtaacttcgacaacatgcgtgaagatgaaggtctggctgaccgtgcgaccttcgttgttgacccgcagggtatcatccaggcaatcgaagttaccgctgaaggcattggccgtgacgcgtctgacctgctgcgtaaaatcaaagcagcacagtacgtagcttctcacccaggtgaagtttgcccggctaaatggaaagaaggtgaagcaactctggctccgtctctggacctggttggtaaaatctaagttccgcaatcgcgtaattaatcgggtgctgcggcacccgattttcttccccgcaccatgatgcaagctgcatccaggtagccgcagaggccgcttgcatgatgatgtttaaagcccaggagataaacatgctcgacacaaatatgaaaactcaactcaaggcttcccttgagaaattgaccaagcctgttgagttaattgccacgctggatgacagcgctaaatcggcagaaatcaaggaactgttggctgaaatcgcagaactgtcagacaaagtcacctttaaagaagataacagcttgccggtgcgtaagccgtctttcctgatcaccaacccaggttctaaccaggggccacgttttgcaggctccccgctgggccacgagttcacctcgctggtactggcgttactgtggaccggtggtcatccgtcgaaagaagcgcagtctctgctggagcagattcgccatattgacggtgattttgaattcgaaacctattactcgctctcttgccataactgcccggacgtggtacaggcgctgaacctgatgagcgtattgaacccgcgcatcaagcacactgcaattgacggcggcaccttccagaacgagatcactgatcgtaacgtgatgggcgttccggcagtgttcgtgaacgggaaagagtttggtcagggccgcatgactttgactgaaatcgttgccaaaattgatacgggcgcggaaaaacgtgcggcagaagagctgaacaagcgtgatgcttatgacgtattaatcgtcggttccggcccggcgggtgcagcggcagcaatttactccgcacgtaaaggcatccgtaccggtctgatgggcgaacgttttggtggtcagatcctcgataccgttgatatcgaaaactacatttctgtaccgaagactgaagggcagaagctggcaggcgcactgaaagttcacgttgatgaatacgacgttgatgtgatcgacagccagagcgccagcaaactgatcccagcagcagttgaaggtggtctgcatcagattgaaacagcttctggcgcggtactgaaagcacgcagcattatcgtggcgaccggtgcaaaatggcgcaacatgaacgttccgggcgaagatcagtatcgcaccaaaggcgtgacctactgcccgcactgcgacggcccnctgtttaaaggtaaacgcgtagcggttatcggcggcggtaactccggcgtggaagcggcaattgacctggcgggtatcgttgagcacgtaacgctgctggaatttgcgccagaaatgaaagccgaccaggttctgcaggacaaactgcgcagcctgaaaaacgtcgacattattctgaatgcgcaaaccacggaagtgaaaggcgacggcagcaaagtcgttggtctggaatatcgagatcgtgtcagcggcgatattcacaacatcgaactggccggtattttcgtgcagattggtctgctgccgaacaccaactggctcgaaggcgcagtcgaacgtaaccgcatgggcgagattatcattgatgcgaaatgcgaaaccaacgtgaaaggcgtgttcgcagcgggtgactgtacgacggttccgtacaagcagatcatcatcgccactggcgaaggtgccaaagcctctctgagtgcttttgactacctgattcgcaccaaaactgcataagaagaagtaagattcacctgcaattgcttagccgccggggtcaaacctggc

SEQ ID NO: 164 - DNA, 13327 bp, Escherichia coli
  Strain O55:H7
  modified_base (3383)..(3383): a, c, g or t
  modified_base (3964)..(3964): a, c, g or t
  modified_base (6321)..(6321): a, c, g or t
  modified_base (8246)..(8246): a, c, g or t
  modified_base (8388)..(8388): a, c, g or t
  modified_base (10680)..(10683): a, c, g or t
  modified_base (12324)..(12324): a, c, g or t
  modified_base (13326)..(13326): a, c, g or t
ttttatggcattaaaaagccctgccgggatgttccaggcagggcggcataaatacttttatctgttagcgaacgaccagtacaggcagattggcgtggcggatcacgctcgaggcgttagaacctaacagatgggtcgaaatcgatgggttgcgagaaccaataactacaacatcagcccccagttcttctgctaactcattgacttcatcccgcacgctaccaaaacggacatgttgtttaatgcgggaaggatcgatggtgaagtggctgaccatcgtttgcaaacgttcttctgcttcatgttgcagatgctcttcaaaacgacgcacatcagcggcaaaacggtgcaggctcaggctggctgacccgggtagtacgtgaagtagatgaataactccgtcatcctgggcgaggaattcagcgtggcgaacagctttgtcgctcaattccatttcaaatacatcaactggcataatgattgtcttatacataaccctttctccctgttaatcatgaacaaatcattcgccatgattataatatttatccctgatatttgtctggttctttttccttacgaactgtttctgtgatgaatatattctcactgaacaccaggaattctcccaaaacctgcggtaccgcccgttttcccgctgtgatagctacccttaaagactgactcttttttgaactgtctctggaggttgcatgaaagcattgacttatcacggcccacatcacgttcaggtagaaaatgttcccgatccgggcattgaacaggcagatgatattattctgcgtataacggcaacggcgatctgtggctctgacctccatctttatcgaggcaaaataccccaggttaaacatggcgatatttttggtcatgaatttatgggggaagtagttgaaaccggaaaggacgtaaaaaatttgcaaaaaggcgaccgggtggtaattccgttcgtcattgcttgtggcgactgttttttctgtcgactgcagcaatatgccgcctgcgaaaataccaatgcgggtaaaggcgctgcgctcaataaaaaacagataccagctcccgcggcattgtttggttatagtcacctgtatggtggcgttcctggtggacaggcggagtatgtccgtgtccctaaagggaatgtggggccgtttaaagtaccgcctttgctttcagatgataaagcccttttcctttctgatattctgccaacggcatggcaggcagcaaaaaatgcgcagatccaacaaggttcaagcgttgctgtctatggtgccggtcctgtgggattgttgacaatcgcctgtgcacggttgctcggtgcggaacagatttttgttgttgatcatcatccctaccgcttgcgtttcgccgctgaccgctacggcgcgatcccgattaatttcgatgaagatagcgatccggcacagtcaattattgaacaaacggcaggtcaccggggcgtggatgcagtaatagacgccgtcggttttgaagcgaaaggcagcaccacggaaacggtgctgactaacctgaaactggagggcagcagcggtaaagcgttgcgtcagtgtattgcggcggtcaggcgtggcggcattgttagcgtaccgggcgtctacgctggatttattcacggtttcctgtttggcgacgcctttgataaagggttgacgtttaaaatgggacagacccacgttcacgcatggctgggagaattattaccgttaattgagaaaggattactgaaaccagaagaaattgttacccactatatgccgtttgaagaggccgcccggggatatgagatctttgaaaagcgtgaagaggagtgccgtaaggtgattctggtacccggtgcacaaagcgcagaggcggcgcagaaggcggtttcaggtctggtgaatgcgatgccggggggaacaatatgagcgtcaggagtggttttcgaagtaaaggacagccatgacgataatcgccgccataatcagaaatcctatcaggatgtaaaatgcttctgccatggttattcccacaaacgaaacggaataattttgcagcaaaagtgaacagtgagaaccaggaaaaattgctgattttgcataaagaggatgcgagtgcatcctctgggcaaagcgagttatcgcttgtacagatgggattaaagcaggtagtcgccagcagcttctggctggtattcgagttccagcacttcaaggtgggttgcaacgccgcccggaagttcccagtgaatggaatcgccaacgcgcagtcccagcagtgcggcacctaccggagccataacggaaagctgagtattgctatcggtcatttttgccggatacaccagcgtgcgcacacgcacttcgccatcgctaagattgcggaatttaacccggctgttcattgtcaccacgtcgtgtggcatctcttctggcgaacacatttgggcgcgatccaactctgcgtttaacgcgtcggcgattggcaaaccagcataggcgggttgctccagcagaatatcgatgcgttcggcatccaggtcgttaatgatgatagttggtctggacatttttactccatgtcgtcggtactgcgagtgtcgcagataaacatacccaaaagaaaaccctcaccgtcaggcggcgagggtttaactcacatgatgatactgactgttgctcactctttgaagtgatttgcgtcacattcagggaattcctcaatgcagcgcattatgtataattcttaatcgtcatggtttatgaaagacgaattagcgtgttttgtaaatcagaggattaataacccgctttatcaatcacaaaggttttgccacagttacctgggtgtggttgtggcaagaatgagtttgcagaaagcggagcgttgatggcgtcagctttgatcgagacctgaatttcagtcaaatacgcagggttaccctggcacgttagcttaactgctttcacgttctcttttccccagcttttggcaaaggcggcgtcaaagtcacggcggctcactgttttaccgtaattatccgcaaggaattttccggcttcgctctcttttatctcttgattcaggcgtaccatcgtaccgaagtatgcgtccggatcaaaaccaaagcaggcaccgtgtttggcatattcgtagcgttccaggcaggaacgtccgccagctcctggcatgacttcacttagtttagcggccgtttccagtgataatccggtttccggcgatgaacacatccggctggcgcgcgcttctggtagattcgggattgggcgagtagcgcaaccgaagcgcatccagcggcgttcatcaacaccacgggcagcaaccgatttaggcaatcntggccacagaccatgtacggtcagaaaatcagctttgttggtcgtttcggtttgcaggcgacattcatctcgttcgttacgatttcgatcgtgttgactctggcaaaatccggtttgccaggagagggccaggacatagcgatcaaaatcgccatactgttttgcctgcaacgctacggcgttggcagaagagaagggaagcagagaaaccgcgagcaacgcggcgttacgccagaatgctttcataatgggtgtggaactcatacatacactgaatactatctattaaatcataaaaaagcccgccaggtgggctaacctggcgggcgtgatgatttattcagcgtttggcgaacgtattagttccacatggcgagaatcggccagccaaccaacagcaacatagagatgtaaatcaccccgaagattgcgccaagacgccagtaatcttttgatttcacatagccacagccgtaaataatcaccccaggaccggttgcatacggcgtcagacagcccatgataccgatagacagcaccagcaggatacacagttgttccattggtacgcccggaatacntttaccgacggccagaataaccggcagcatggttgcggtgtgcgcagacaggctggcaaacaggtagtgtgcaaagtagaacaccagaaccagtacaatcaccgttgcgtttggtgagaatccttccaggtgcgtactcatggtaccggcgaaccagtcaataaaaccagaacgagtcaggccgttagccatcacaaccagagttgccaggttgaccagcgtgttccatgcgctgttatagcgggtaatgtctttccacggcacaacgtgcagagccagcattagcgaaactgccagcagaccaaccgcagtagcattaatgacttcactgccaaatacccacaaacctaagctgagcaatacaaggccaatcagcgtccactctctgcgtgtcagcgcacccatggtttttagttcatcacccgcccaggttgccacttcttcactgtgtgtgatttccggtttgtacagcacgtaggaaagccacggcgcaatgataagcaagataaccccaaccggcaggaagcagaggaaccactgcaaccagctaatctggataccggcaattttgctgacgaactccagacccagcacgtttggtgccgcaccggtgacaaacatggacgaactcagactggtactaatgaccatcatccacatcaaatagccgccaatacgacgcgcggacggatcgttcgggaatgatttaaacaacggcggcaggtttttaatgaccggaaaaaccgtacccccggtacgcgcggtgttggacggtgtaaacggtgccagcagaatgtcgataatgacaatcgcataacccaacgtcagcgtgcgtttgcccatgaatttcacctggaaaagggcaatgcgacgacctaacccggaaacttcataccctaatgcaaaaataaatgcgccaaataccagccataccgtggtgctggaaaaaccagccaggccccatttcagcgcctgtttttgcgcattaaacgctgggtcagctaattctttggcatcaaagagcaggtaattactgccaataacgcaaatagtaaccgcaataaaactgatcgctgttgccggaattggctcgaggatcatgccgacaatcattgccacaaacacagcgaagtaatgccatgcctgcggcggcataccgtcggggacagggataagaaacatgacacccatcaccaccagtggggccaatagtttccatatattatcttttgctaaagacatacgggttctccgaaaattaatatttccaaatttatcaagtgcttaaataattaaatctgtgctaaaaaccaggtaaggatcagcaggtcggcactgccgcctggactgagatttcgttcgatacactccctgtcgaactgccggagataatcgagatctgcgggggttcgaatgccccctttttgcaataatgtttgcgcctcgcgctgtagccagcgcaggcccccctcgccaccgcgcgaagcaacgttggtatcgccgttgatcgccatcagtaggagcaaggtatcgagcaatgccagttcaggatctaacccctgatccagcagagtgaggtaatgtggcaaggcgtggttgatcaccagtggataacccgcttcggcttcaccgcgtgcgccggtaaggccaagctgctggtacaaccgttgacctgccgtcagttgtgaattattggtacgcagttcgcgatcggtcaggccacggcagaaacttgccgccgtagaacaaacggttgttggcgttagcaactggttgagctgaagcaaacggccaattgccgcacacagtagccctaaagaaaaaatgctgcccttatgcgtgtttacgcccgcggtggcgcggaacatatcaccttcgcaagccataccaattgggcgtaatccgtggagtaccgcttctggtgccatttccgcactacaggcaccaaattcaatgaaacggggtagccagccctgaatcgccagcgcgctgcggtggaaatcttccagcgccatatctttatgcgcaccgcagttaatgcgatccacgagacctggtttcggtgacagattgacttcagtcagcatggcgcgccagcccagcagggcgtactcatcgattaatgacgtcgcaagctttgtggttttagttaacgttgcaggcatcgacatcgttcagcagtgcctccatgcggttgagtaaatcggtcagttgatggttttttccacgcgcgcagacggctgcgctttgctcgcacaacaggcagcggcgaggcggcagtgaatagtcgcggcgggagagaatttcgccttcgggcgtcaggacatcgatatcccataaccgcccgagaggatgantatgttcaagctcaatggtggcgagcttgaggtcgcgagccggggcggcaatgctcaacataccctccggcccgctggcggaaaccagtgcagcctgctcctgaatttgccagccctgttttgcggctaaggcacgcaaggctgtcacgccatgattaaaaattcggcgtgtgacctcactgtctttaatcggcccaggcgcaaccacggtaaaggagaccagtggaacaggatggcgcttgagccagacgtgttgccgtgcttgcctttcatcccggctgacgagcagctcgggaattgacaccgcatggtggctggcgagttcaggaagcaggtgcatggcttattccttcacctgatgcacaacatcgatcaccgagccatcgcggtaacgcacaacggcaacgacgcggtcggtgaattcaatcggctgtggttcaccggtcagcagacgcgcacgttcgcgcagccactcaatggaaaccactttaatgcccgcttcctgcagacgttctgccagttccggacgtgccgggttaactgcgataccgtggtctgtgaccagaatatcgacactggagcccggggtgatgcaggtcagcacgttatccaccagagtcggaatacgaccgcgtaccagcggcgcgacgatgatggaaagcgcagaggcaatcgcggtatcgcagtgaccaccggaagcaccacgcagtacgccgtcagagccggtcagcacgttaacgttgaactgggtgtcaatttccagcgcgctcagtaccaccacgtcgagacgatcaaccgatgcacctttcgaaccccagttagcgtactggttggcgctgatttcgatgtgattggggttacgggccagcgattgcgcagcgtggctgtcaaagctctgtacatccagcagtttgcggatcagacctttttcgtgcagatcaaccatcgtcgcggtaataccaccgagggcgaagtcggcgcgaatatcgcggctacgcattttgtcttccaggaaacgggttaccgccagcgatgcgccgccggtgccggtttgcatggagaaaccttctttgaagtagcctgagttgacaatcacatccgcagcgctacgggcaataagcagttcgcgcgggttagtggtcatacgggtagcaccagcgccgatttttgcagcatcgccaacgcgatcaactttgacgattaaatcaacctgatcttgctcaatgcttgccggattatgcggataaggcagcagttcttcggtaagcatcacaacctgttttgcgttgtcggcatcaaccattgcatagccgagggagccgcagcaggctttaccggtgtagccgttggcattaccgaattcatcacaggacgggacgccgaggaaagccacgtcgatattcagttcgccgctctgtaccagatgcacacgtccgccgtgagagtggatttgcaccggttccgccagcagaccacgggagatctcttccgccagtggaccacgcaggccggaggtataaatgcgggtaaccacgccctggcgaatgtgttctaccagcggcgcatggcaatcactcagggagctggacgccagggtcaggtttttaaagcccatcttcgcgatgacgtccatcaccatattgacggtcaggtcaccgccacggaaagcgtgatggaaggaaaccgtcatgccgtcctgtaaaccagagcgacgaatcgcttcttccaggttggcgcacagtttgcgatcgcgcgctttttcagcctggtaggtttgctttggtgagttctggaaagcggcaagatcgcattcagcgcgacgattccaggccgctacccgttcttgtcgttgagattgttcaattttctgcgtcattttgattgccttattcttcgcggatgccggaaagttctgcacgggagancaccagacgggcgcgatcgataaccggaccgtccaccatcttgccgttcagggaaaccacgccgaggccttcgcgagcggcggcttcagcggcttctacgacgcggcgggcgtgatccacttctttctgggtcggtgcgtanaggttgtgcagcagatcaatctgacgcgggttgatcagcgatttgccgtcaaagcccagctgtttgatgtgggcggcttcttgcaggaatccggcttcgttgttagcgtcggaatagacggtatcgaacgcctgaatacccgcagagcgcgcggcctgcaaaatggaacagcgtgcgaacagcagttcagttccttccggggagcgttctgtacgcaggttgcgcacatagtcttctgcaccgagggcgataccgatcaaacgctcggaagcgtgagcgatttccactgcgcgggtaatgcccagcggagattcaatcgccgccagcaggccggtgctgccgggttcacgaccacaggctttttctatacgcaggatctctttttcgatatccagaacatcctgagcggtatcggttttcggcagacgtacaacgtccgcaccaccgcgaacgacggcttccaggtcgttaacaccccattcggaatccagcgcgtttacacgcacaatggtttcaatatcgcgatacagcggatgttgcagcgcgtgataaaccatgcggcgggcggtgtctttttcacgtaatgccacggagtcttcgaggtcaaacatcagggcatcagccgggtagatgaaggagttgctgaccatcgcggcattggcaccaggcacaaacaacatgctgcggcgggtgcgagttttacgttgttgcagcgaagcggaaatcattggcaatcctcccatggcagagccgggataccgctggcgcgtgccagcagggcttccagtcgtgcacgtaaaatgcagtccagtgcgcctttatcatcgacattcagctgtacgccgcgcacgttgtagcgggcgagaacgtccagaatggtggtgcgaattgcatcgccaaactgtttctcaacgctgctattgatttgcaggtcgatatcctgcgtatcgagtggggcgatgcgtatcatcacatccccagactcaagggtgcctgcaacggcgggctggtttattttcatttttcacctgtttctcatgcgggggtcttttgacgagctgccgcgtcctggcgggagtgctcaagcaggttctgcaaataatgcagcgtgactgcagggaccagcggcgcgatagccgtgagatcgtttttcgccagcagttgacgtacccgggaagcggatatcggcatctcctggtaacgcagccgctcaatttcaaccagttcgatgggcgctgcggagatagtcggcgtttccagccagtagcgcatatcctggttgtactgggcggtaacgcgacaaaagggttcagtaccgacaaagcggtgagttacacccagcgcgggagcgaggtactgacggaaaatcttcagatcaatttcggtgtaacaatggttaatgacgctctgttctttaatgaagtagcaagggaacgtagcgcgggagatgatgtattcggagccgcgatgcacagtcaggcgtggaatatcggcggtgccttttaacaccagatccagccggtcttcataggggaagcgtgaagaatcttctttgactaaaaacagatgcaaccagtcgcactgtgccgcagcttgttgaatcagataacggtgaccattcgtaaagggattggcgttcatcgcaatgcagccaatcttgttccctggatgacgaaattttttcagcgattcggcatagcgtttcagtcgcgtggcgctgttttccatcagcaccatcacgccgggtacgctggtcagcgtggaaaaaccgcactggcggaacagcgcctcgtattcggttttggtataaataaacagatgcgtgctgtgccgctcataggcgaggtttatcagttcagtggctaatgtcagcgccagtccttcaccgcgaacggattcactgatagcaacgcatttaataatatttccggcaattccaccgcacgcgataagcttttcatcgcgggttacggtaataaatacttcgactgtggtgtcaacgctcaaatcattttcatgcaggaattgggcgatttccgccatttttttattttctgaacgttttacgcgggtgaaaatatcattgccgaacataataaatagtatcctgaaggtgcatgttgttatcgatttgcaacgaatgttgttcaatgttgcaaactgataaccttttattttcacttgggagaaaggggggtgatcgaggtatatctttttctcctttcgctatacatcctaaggagtatttcggcgtgaaattttgatttatttcacatagagttagtggttttnnnnttatttaatggttttaagttttttaattaatgtaattacgaaatgactcgcaggtttaagtgatttaattgatttaatgaataaaatttgccacgatcataattaatatctatgtattttgattcaacattttaattacatccgtcaaagaggctcgggacaacccgcaaggaaaacaatgttgcagcttaacgagaataaacagtttgcatttttccaaagactggcatttccgctgcgtatctttttgctgattctggtgttctcaatatttgtcattgcagccctggcgcaatattttacggccagttttgaggactatttaacgcttcatgtacgcgacatggcaatgaatcaggcgaaaattattgcctccaatgacagtgtcatctctgcggtgaaaacgcgtgactacaaacggctggcgaccatcgctaacaaattacaaagagataccgattttgattatgtggtgattggggaccggcactcgatccgcctttaccatcctaatccggagaaaattggttatcctatgcagttcaccaaacagggcgcgctggagaaaggggagagctacttcattaccgggaaagggtcaatggggatggcgatgcgcgccaaaacgccaatctttgatgacgatggaaaagtcatcggcgtggtgtcgattggctacctggtgagtaaaatcgatagctggcgggctgagtttttattaccgatggcaggcgtgtttgtcgtgctgttagggattctgatgttgctgtcgtggttcctggcagcgcatatccgtcggcaaatgatgggcatggagccaaagcaaatcgcacgcgtggtccgtcagcaagaggcgctgtttagttcggtttatgaagggctgattgcggtggatccgcatggttacattaccgccatcaatcgtaacgcaagaaagatgctggggctgagctctcccggacggcaatggttgggtaaacccattgctgaagtggtcaggcccgccgatttctttaccgaacagattgatgaaaaacgtcaggatgtggtggctaactttaacggtctgagcgttattgccaatcgggaagctattcgttcaggtgatgatttgctgggggccattatcagctttcgcagtaaagacgaaatttccaccctcaatgcgcaactgacgcaaataaaacaatacgttgagagccttcgtacattgcgacacgagcatctcaattggatgtcgacgctcaatggtctgttgcagatgaaagagtatgatcgcgtgctggcgatggtgcagggggagtctcaggcccagcaacagcttattgacagcctgcgcgaggcgtttgccgatcgccaggtggcggggctgctttttggtaaagtgcagcgcgcccgggaactggggctaaaaatgatcattgtccccggtagccagctttcgcaactgccgccaggactggatagcaccgagtttgcagccattgtgggcaatttacttgataacgccttcgaagccagcctgcgtagcgatgaaggaaacaagatcgttgaattattcctcagcgatgaaggcgatgatgtggtgattgaagtcgccgatcagggctgcggcgttccagagtctctacgagacaaaanatttgagcagggggtcagtacgcgtgctgacgagcccggtgaacatggcattgggttgtacttgattgccagctacgtaacgcgctgcggtggtgttatcactctcgaagataatgatccctgcggtaccttattttcaatctatattccgaaagtgaaaccaaatgacagctccattaaccctattgatcgttgaggacgaaacgccgctggcagagatgcatgctgaatatattcgtcacattcccggattcagtcagatattactggcgggaaacctggcgcaggcccgaatgatgatcgagcgttttaagtcggggctaatcttgctcaataactatcttcctgacggtagagggattaatttactgcatgaactggtgcaggcgcattatcccggcgacgtggtgtttaccactgcagccagcgatatggaaacggtgtctgaagccgtacgttgtggtgtatttgattatctcattaagcccattgcctatgaacggctggggcaaacgctaacccgtttccgccagcgtaaacatatgctggaaagtattgatagcgccagccagaagcaaattgatgagatgtttaatgcctatgctcgcggtgaacccaaagacgaactgccgaccggcattgaccccttgacgctaaacgcggtgcgaaaactgtttaaagagcctggtgtgcaacatacggcagaaacggtggcgcaggcactgaccatcagtcgcaccactgccaggcgttatcttgaatattgcgccagccgccatctgattattgctgaaattgttcacggcaaagttggcagaccgcaacgcatataccacagtgggtgacatgataaagccggaggaaacttgcctccggcattactatttacttgcctgtgaccgctgctgccgttcctggcaccatcagctctgtagcaacgataacaatcaccaaaccaacaagcaccggtaccgaggtgcgttttacgacttcaaacggcgng

SEQ ID NO: 165 - DNA, 6698 bp, Escherichia coli
  Strain O55:H7
  modified_base (1600)..(1603): a, c, g or t
  modified_base (2844)..(2844): a, c, g or t
  modified_base (3586)..(3586): a, c, g or t
  modified_base (3596)..(3596): a, c, g or t
  modified_base (3748)..(3748): a, c, g or t
  modified_base (3752)..(3752): a, c, g or t
  modified_base (4506)..(4506): a, c, g or t
  modified_base (4782)..(4782): a, c, g or t
  modified_base (4884)..(4884): a, c, g or t
cgccatcccggcaaccgcaacgactacgccagaaacgggcgaaagggtacggcccaggtttgacgcctgcagcatcgggatagtcaaatacgccgggttaatgccggaagagtgcgccagtttcgggatcatctcaacaaacgcataaaacggcgcattgcctgaaccggtcgtgactgccgccagcattgtcagaatcaccaataccagcatcaggatgatactcgccgaaccaaacgaggtagcgatagaaatcagactttgaataaagccgatggtgctaagcccctgagcgaataccccagcggcaaccagcagcatcaccacgttagcaaacgcatctgccatcccgcgataagccacttccagaccagagaaaactttctgggtattaaagctgcggaggaactccagaatggaggcaatcagcatacaaatcaccagaatagtgatgatgtgtaattgcggaccccatttaccgtcaaaaatcagtacaccgatgatcggcgtgaacggcaaaatggcataaaacgcaggggcagtggtggtgatttcactgacatctaacatttcatgagagatgtgctcttttttatccagataacgttgccagaagaagtgggcgatcgccatgccgataattgcagcaattgagataggcagcgtcgttttgaaggcgaagtcaatcagcgacatttcggaagcttgcgccgccagcaccacatcccctgaagtcggtgcgagaataatcgccgccggggaggcacaaatggcagcagctgcgccacgactgataccaacgtttaccatcaccggaaatagggttgccatcagcaaaacacccagaccggttgcggaagagacggccagagacatcagacaggcgacaaaataggcggcaatcatcagcaggtaaggggagttaatatactgcaatggttttgacgccagcttgaccaccatatcattcgcgccgatatgggtcatgtaagcggcaaatccacacagcatcataatcatcatgccgaggtcgccgccgcggctcattagtaatattttaacgtattcaacgatatccgtggcgctgtagcctgttgaagcctggctggacggtaacactttgtgccccataatggcactgataatcagcaataacaggccaccgacaaataacacaccagtggcggaataccctttaatgatgtagcgagctacacccacaataaccacaaccccaataaggagttcaatgaatgtcagcataatttttcctgtctccaggccccaaagtaaataataaaaaattcctaaagcttaaggaaaaaatatgcccaataaattggcgatgaatgctgattaaaatcaagaaaaactgccattaagacattgaagttgctgtttttatacgtagataacaaaacgcatatttagcggttggcaattatcacataataatgtgtgtaaattgatggaggattgatgcaaatttgttaattgcaatggtgttagctgcggttgcgtgctcaaaaaataatctgcaatgggcgtgggttgacgatatataatatattccctgttaagatgatttttggtatcttannnnaaaataagtcattttttcttggttgcattttgttatcagaaacaactagctttttcttttatgactattcccatcgcagaaaacgatgtgtcattttaaatcgatgcgcggaaatatttaacttgaacaagcggaaataaatagagcagctattcagattattctttatgttggggctattaaggttatgttaattgtagctttgctatgctagtagtagatttttgataaatgttttatggtcacaaatgaacgtgagtaaatatgtcgctatcttttcctttgtttttattcagttaatcagcgttggtaaagtttttgctaacgcagatgagtggatgacaacgtttagagaaaatattgtacaaacctggcaacagcctgaacattatgatttatatattcctgccatcacctggcatgcacgtttcgcttacgacaaagaaaaaaccgatcgctataacgagcgaccgtggggtggcggttttggcctgtcgcgttgggatgaaaaaggaaactggcatggcctgtatgccatggcatttaaggactcgtggaacaaatgggaaccgattgccggatacggatgggaaagtacctggcgaccgctggcggatgaaaattttcatttaggtctgggattcaccgctggcgtaacggcacgcgataactggaattacatccctctcccggttctactgccattggcctccgtgggttatggcccagttacttttcagatgacctacattccgggtacctacaacaatggcaatgtgtactttgcctggatgcgctttcagttttgagacaaatgaagttttagtaacttctttaaaatcaataactaaaataagtaacatcaaaaataacgcgatttttatcactttttagtaaagttgcactggacaaagcgtaccacaattggtgtactggtaaccgacacagcatttgtgtctatttttcatgtaaaggtaattttgatgtctaagattaaaggtaacgttaagtggtttaatgagtccaaaggattcggtttcattactccggaagacggcagcaaagacgtgttcgtacacttctctgcaatccagactaatggttttaaaactcttgctgaaggtcagcgcgtagagttcgaaatcactaacggtgccaaaggcccttctgctgcaaacgtaatcgctctgtaagatacgtcagcaagaattcaaaacccgcttaatcagcgggtttttttngtctttagtgtgcggttgaggccgaaaacagccagaatgccagtgcggtcatggcaaaagaccccagaaggttgacgaaaacgttcagtaatgcccagccaaagcggccctcttgtaacaaaaacaccacttctgccgaaaatgttgagaaggttgttagaccgccacaaaatccggtggtgattaatactttccacactggatcaatgttcgtcatcctgctgaaccaggcgaatcccattcctatgatgaatgccccaatcaggtttgctgccagcgtccccaacggaatcgcctgatgcagcgggttaaatcgcatacttaacagccatctcgccacgcttcccgtaccaccgccaataaaaactgctaaaagaagttgtaacactgcaaaatcctgctatttgatttgtatgagtgataagtgtaacgccgaataatcgtcgttggcgaattttacgactctgacaggaggtggcaatgctggttgctgcaggacagtttgctgttacatctgtgtgggaaaagaacgctgagatttgtgcctcgttgatggcgcaggcggcggaaaacgacgtatcgctgtttgtcctgccggaagcattgctggcgcgcgatgatcatgatgcagatctatcggttaaatcagcacagctgctggaaggcgaattcctcggacgtttacggcgagaaagtaaacgtaacatgatgacgacaattctgacgattcatgttccttcancgccggggcncgcatggaatatgctggtggcgctacaggcaggaaacatcgtcgcccgttatgccaaattgcatctctatgatgcatttgccattcaggaatcacgccgtgttgatgctggtaatgaaatcgctccgttactcgaggtggaggggatgaagntcgntctgatgacctgttatgacttacgctttccagagctggcgctggcacaggcattacagggagctgaaatcctggtacttcctgccgcctgggttcgcgggccgctcaaagagcaccactggtcaacgttgcttgccgctcgtgcgctggataccacctgttatatggtggcggcgggggagtgcgggaacaaaaatatcgggcaaagccggattatagatccctttggcgtcaccattgcggcagcgtcagaaatgcctgcactcattatggcggaagtgacgcccgaacgtgtgcgtcaggtgcgcgcgcaactgcccgtcttaaacaaccgtcgctttgcgccgccgcaattattatgatgtttttttactcggcgcttgattcaccttgttacagattgctattgtgtgcgcgcgtcgaatgaccgttaatattctttggtttttaaggcgcgttctgttgccggttatatgtcaagaaggtatctatgggtgagattagtattaccaaactgctggtagttgcggcgctggtcgttctgctgtttgggactaagaagttacgtacgctgggcggagaccttggagcggccattaaagggttcaagaaggcgatgaatgatgacgatgctgcggcgaaaaaaggcgcagacgttgatcttcaggctgaaaagctctctcataaagagtgacgtggcgagcaggacgctccctcaatatcttgttcgatacaaaaaacccgcttcaaaaagngggttttttatcagacagatgtaagtaattattacaggattacttaacttccatccctttcgcctgcaaatcggcgtggtaagaagagcggacaaacggaccgcatgcagcatgggtaaagcccatcgccagcgcttcggctttcatttcgtcgaactcatccgggctaacgtaacgttgaaccggcaggtgatggcggcttggctgcaaatattgccccagcgttaacatcgtcacaccatgacggcgcaggtcgcgcattacctcaataatttnttcattggtttcacccagacccaccatcagaccagacttggtcgggatttccggatgcgcttctttaaagcgttccagcagcttcagcgaccagttgtaatntgcgccaggccgtacctgccggtaaatacgcggtacgttttccaggttatggttgaacacatctgggggcgttgcagtcagaatatccagagcacgatccatacgaccgcggaaatccggcaccagagtttcaattttgatttgcgggcttttttcccgaatggcagtaatacaatccgcaaagtgttgggcaccgccatcgcgcaggtcatcacggtcaacggaggtgataaccacataacgcagcgccatatcggcaatggtctgcgccagtttcactggctcattggcatcaggagctaccgggcgaccgtgggcaacgtcacagaacggacaacggcgggtacaaatagcgcccaggatcataaacgttgctgtgccgtggttgaagcattccgccaggttagggcaggaggcttcctcgcagacagaatgcaggccatttttgcgcattgcggctttgatgccctggatacgtgtagagtccgctggaagcttgattttcatccattccggcttgcgcagcagggcttcgcgctctgttgccacgtttttaaccgggataagggccatcttatcggcatcgcggtatttaacaccgcgttccatcacaatgggtttactcatagcgtgcgtgttccagttgcgaattacgaaggaaagcgtttcaattcaatagattgttgtaattatcaactatttttgaattaacgactggcagtatatcattgaaacggacctgaaagcagccaaagcggtcgcgaaaatgtaaaattgttgttggattgtgccattttatcgttctgcgctgtgatctggctgtaacaatactttttcaaaatgcattacggataacatctattactccgtgcaggatgggatcacgcaggctgaatttgttgtagtggatagagaaatctatttgctcctcatttaaggacggaaaaggcagtttttccagcggccagcaacggctaaacaggttataaaaacggctgggaataatcgctaacatgtcactgttggcaaccagtgcagcgattgtcaaaatgttgtagctggtgaagctgatctgccggtccggaaacatctcttgaattctctgccgcagaccgctgaaattttgtccttccggtaacaggagtacatgtgcagcgttgtcgatagtctctctgtcatcttctaaagagagtagtggatttccctcgcggcaaattaacaccatattgtcggtgaacagaacatgatgttgcaccgtacgattggtgcaaaacatgttatctatgatgagatcggtttgaaactgactgagttggttttccgcgtcgctgatgggcgggttgcgcagtaaaagctgcggatagtgagttttaatcgcccgataaatgacaggaaggaccagagctccgaccgagggggtggtcgcaatagttatcgttcgttgcttatcatagcttccttcgatatccagcgcgccaagaatggactcaaggccctgactgatatactcatgtagatgcatcgcaaatgcggtaggagtgacaccctggcctttgcgaataaacaatgggtcagggaatataacgcgcagtttctgaatagactgactgattgccgagggggtcagattaagcactttcgctgcattaacgatccctttatgtacatatacagcttcaaaaatagtcagaagattaagatcaatatttcgtaaggttgtaaatatttgtggtttaccttctgacgattttctgcttaaacaggattcaatttgattattactatccacgcacttactccaattttattcatgg

SEQ ID NO: 166 - DNA, 7172 bp, Escherichia coli
  Strain O55:H7
  modified_base (3187)..(3187): a, c, g or t
  modified_base (6121)..(6121): a, c, g or t
  modified_base (6486)..(6486): a, c, g or t
  modified_base (6943)..(6943): a, c, g or t
aattacaataatcttatgtctaattggaacggaacgcttttgctcatcataatcaactatttcaataagttaatcaatggggtgagttacggagcaaggcgtagcatcgcatttctgcaagtgataaagaaaatatacaaacgcgaaggagatgtaaagcattagcaggtgttatgagtaatgacccagtgtaaattgggccattgaggtatgaaattaagcggtaatatattcgaagtcaggattgtttagtagcgctaaaatattttccagtaaacgtggtgcaatattattagtcgtcgcttcgggtttccattgtgatattttagccatttccattccggcatacccacaaggattaatacgtaaaaatggtgaaagatccatattgacgtttaatgccagaccgtggaatgaacaaccgcgtcgaatacgtaaacccagtgagcaaattttcttttccccaacatagacacctggcgcgtcagcccgaggatgcgcttctatacccagttcagccagggtattcaccactgtttgctcaagcaaggtcaccagttcacgcacaccgagtttacggcgtttcaggttaagcaatacatacatcacctgttgccccggcccgtgataagtcacctgcccaccgcgatcgctctgaatcaccggaatatcaccgggcattaaaatgtgctccgcctttcctgcctgcccttgggtgaataccggatagtgctcgaccagccagatttcatcaagggtactatcatcgcgggtatcggtgaattcatgcatagcctgggagattggctcgtaaggctgaagaccgagctggcggacaagaattttatcctgatacaaaacggcatctccgtggagaatgagtaaaagtgggagaaaagtatatcacagcgaggagaggggagttacccgaccaggggccgggtaacggagaagcgagttacagaaccatgcggacaatatcgattttgcccagttcttcatacagtgtttcaacctgctcgatatgagtggcgttgatagtgatagataccgagtggtagttgcctttgctgcttggttttaccgttggggtgtagtcacctggcgcatggcgctgtaccacttcaaccacctgatcaaccagctcaggtaacgcctgccccataactttgtaagtaaaaggagtagggaattcaagcagttcgttaagtttggttttcatgtcagctccggcgtaacgtaattaaatagcaactcccgccagaaggcgggagttttttactgatgcttagtatatggggacggaaattacactttcaagtgttcaatttttaaccaaaccagtgatggaacattaatttaatgtaatcaatgattttgccgaagaagttaccttccgggatttcttgcaacacaaccagcgggcgttgttcgatcgttttgccatcaagctggaagttgatagttccgacgacctgattcttttgcagcggcgcatgcaattcactgctgttcagcacatagctggctttcagatctttcatgcgaccacgcggaatggtcaggtacacgtctttatcaacccctaacgaagcgcgatcagaatcaccaaaccaaaccggttcagaggcgaactctttacctactttcagtgggttaacggtttcgaagaaacggaagccccaggttagcagttttttactttcggcttcacggcctttaaaagtacgtccgcccatcaccgcagaaatcaagcgcatctggccttcagtcgcagaagcaacaaggttgtaacctgctttgtcagtgtgtccggttttgatgccgtcgacattcaggctgttatcccataacaggccgttacggttcagctggcgaataccgttaaacgtaaattctttttctttatagatcgagtattcattcggtacgtcacggatcaacgcctggccgatcagcgccatatcgcgcgcggagctgtactgaccatcagcatccagaccatgtaccgtctggaagtgggtatttttcaggcccagggcgttaacgtagctgttcatcaagccaacaaaagcgtcctggctaccagcggcaaaatcggccatggcgacacaagcatcgttacccgattgcaggtttataccgcggatcagctgagaaaccggaacctgcatgcccggtttgaggaacatcagcgaagaacctttaaacaccgggttaccggtggcccatgcgtcgttgccaatagtgactaaatcagtttctttaaatttaccggctttcattgcctggccgataacgtaactggtcatcattttggtcaggctggcaggatcgcggcggacatctgcgttctgttcggcgagcactttgccggagttatagtcaatcaggatgtaggactccgcatcgatctgcggtacacccgggatcatagttttgatattcaggtcatcggcatgtgcagcagagataaaggctgtgcaaagagccgtggtgagcgccaggcgcttcatgatacgagcggaaaaaatggtattcatggtctgaactacgacatccgtgatggaattaaaaaaagtgccctactatagcaaatgcactaccggcaggcatctgactttccgcgtgactttgttaacgtcatttacagaaattgacacatcagatgcctgctttacgctactgcgcggtggtaataaatgactgtaattgggcttcggtttgcaaacgttgctgcaaggtactggcttcggctttgttggcgaatgggccaagctggatccgccagaccgcgccattttgagttacgcgaccggggacgccgaacttctgtcccagtagctgttggtactgttgcgcacgagcctgatcgcttacggccccgacctgcaccataaagttgccgctggcgctttgcgaggcggcttgcggtgtcaccattgcaggcgaggttgcaggcgttgtcgacggagctgtaacaacgggctgtggagcaggcgtcggttcgctgccttccagtacacctggcgctaaggtcgttggtgcgccgaggaaaccgctgctggttaccggcgcgccggtcggatcttcgctttttagcgtcgaattactgaccggaagaatgtcaccctgcgggccagacactgaacttgttcccgcgccaccgcttaaatcgggaggtgcnggcagggcgtaagtctgtttggcgactgtggtacaagccataccaggaccagaaagcgaaccatcctgggcgacaataatcggatcgatacgaactttggtgttgtttgacgtgttaagacggtcagctgctgcgcgagaaagcgaaataacgcggtcgttgccgtaaggaccgcgatcattaatgcgcaccacgatcattcgcccgttagccaggttagtgattctggcgtagctggggatcggaagcgttggatgggccgccgtcagctgtgtcggatcgaaagcttcgccagaggccgtcaggttactgcctggttcggcatcatagattgccgccagtcccgcctggataaatcgagacggatcctgcacgattttgtagcttttaccgtcgcgctggtaatcctgatttgccgtcgcgttcagtggttcgaaacgcgggtccgccccgctaatttcaactatggggccgttacataccgcaggctgcggtacacttactgtctgttgctgaccatcatcgcttgtacatgccgcgagcattcctgccgcgatgcagatcccgagccactgcttacgcattgcgcacctcttacacgcttttcgacaacattttcctgtgggtgtggattgacattacaatcccgaacccagccatcagcacaattagcgccgatcctccataactgaccagtgggagcggaacccctacaaccggcagaataccgcttaccataccaatatttacgaagacataaacgaataatatcagcattaagccgccagccatgacgcgaccaaaggtggtttgcgctctggcggctatccacagcccgcgcatgatcagcagaatgtagagagcgagcagaatcaaaatgcccactaatcccagctcttccgccagtaccgcgaagataaagtcagtatggcgttcggggagaaattcaagctgtgactgagtgccgtgcagccagcctttgccgcgtaatccgccggagccaatagcaattttagactgaataatgtgatagcccgcgccgagtgggtctgattccgggtccaggagcatcattacgcgctggcgctggtaatcatgcatcaggaagaaccacagaatcggaatgaacgccgctaccagcactactgcgacgccaatcagacgccagctaaggccagagaggaacagtacaaacagaccggaaagcgcaacgaggattgatgttcccaggtcaggctgtgcagccaccagcagcgtgggcataaatatcagcaccagcgcgatgccagtgttcttcaacgatggcgggcaaacgtcgcggttgataaagcgcgcaaccatcagtggtacggctattttggcaatttccgacggctgaaaacgaacaataccgaggtccagccagcgttgagcgcctttagagatggcaccgaaagcatctaccgccaccagcaaaataatacagatgatatagagatagggggcccagccttcataaacgcgtggaggaatttgcgccatcaccaccatgatgaccagacccatcgcgatttggccgattttacgctccatcatgccaatatcctgaccgctggcgctccagataaccagggcgctgtaaaccagcaatgccagtaaaatcagcagcattgtgggatcgagatggactttatcccagaatgtttttttattcggattatccgtcatgattaatggtcctccgctgcggcaaccgcaggattttccgcaggcagatcggtgttgttatcacccagcataatgtggtcgaggatctggcgcatcagcgtaccaaccgccggacccgcgccaccgttctccagaatcatggcgacagccacttgcggattgttgtatggcgcaaaggcggtcatcagtttgtggtcacgtaaacgctcggcaattttgtgcgcattataggtttcgttcgctttcagaccgaagacctgagcggtaccagatttcgccgcaattttgtacggtgcgctggcaaagtatttatgcgccgtaccgttagggcggttagcaacaccgtacataccgtctttcgccagctcccagtaaccggaatgaatatcgccaacgggcggttcatgcggttgtacccatggcacctgtttgccgtcttcggcggtgctcatcagcaaatgcggaaccttcacgataccgtcattaatcaggatcatcagtgccttactcatctggattggggtcgctgtccagtaaccctgaccgataccaaccggaatggtgtcaccctgataccacggttttttaaagcgtttctgtttccattcgcgggtaggcatattgccggaacgttcttccgccaggtcgataccggtataatgaccataaccgaatttacccatccattcggagaggcgatcgatccccatatcgtaggccacctgatagaagaaggtatccgcagattcttccagcgatcttgtgacattcagacgcccgtggccccattttttccagtcacgataacgtttttccgaacctggcagttgccaccagccagggtcaaacagcgtcgtattgcgcgtgatcaccccggcgctcaatgccgaaaccgccacatagggtttaactgtagacgcgggaggataaaccccctgtgtggcgcggttcaccagcggtgtattcgggtcgttcaacaaggcggaataatctttgctggagataccgtcaacaaacaagtttgggtcataactaggcgtggaaaccagcgccagcaccccacctgtacgcggatcggtgactaccacagctgcgcggctacccgccagcagcgtttcaatatattgctggagtttgagatccagcgtcaggtaaatatcgtgtccggcttgcggtgggacttcttttaactggcggataacacgcccacggttgttaacttcaacntcttcataaccggtctgaccgtgcagcacgtcttcatagtaacgctcaatgcccagcttaccgatatcatgcgttgccgcatagttggccagtttgccgtcattattcaggcgttcgacgtctttatcgttgattttcgacacatagccgatgacgtgggtcaacgccgaaccgtaaggatagtaacgacgtttatagcctttaacttcaacacccggaaaacggtactgattgacggcaaagcgagctacttgtacttcggtcaggttagttttcaccggaatggaggtgaaacggtgtgaacgtgcgcgctcttttcggaatgcagcaatatcgtcatcggtcagatcaaccacgctgcgcanagcgtccagcgtttgctgcacgttatcgactttctccggcatcatttctatctggtagatagtgcggttgagggccagagggataccgttacggtcgtagataatgccgcggctgggcgcgataggcaccagcttaatgcggttttcattagagcgggtctggtagtcggtaaagcgaacaatttgcagattatacaggttggcgataagcacgccggtcagcagcaaaatccccaaaaaggcgaccagcgcccggcgcacaaacagcgcggactctgccgtatagtcgcgaaaagagttctgtagtttcatccgctgcgttttctactcaaagctcccttatcactcacggtgataaggatggttggtggtgatgctccacgcccggtacagactctctgcgaccagcacgcgaaccagcggatgggggagggtaagcgccgacagcgaccagctntgctccgccgccgctttacaggcaggcgacaacccttcaggcccgccaatcagtagactgacgtcgcgaccatccagcttccagcgttccagctcagcggctaactgcggcgtatcccagggcttgcctggaatatcgagggtgacaatgcggtttttgcctgcggccgccaacatctgctcaccctctttgtcgagtatgcgcttgatgtccgcattcttgccgcgtt

SEQ ID NO: 167 - DNA, 26622 bp, Escherichia coli
  Strain O55:H7
  modified_base (814)..(814): a, c, g or t
  modified_base (1293)..(1293): a, c, g or t
  modified_base (4901)..(4901): a, c, g or t
  modified_base (5962)..(5963): a, c, g or t
  modified_base (7695)..(7695): a, c, g or t
  modified_base (7719)..(7719): a, c, g or t
  modified_base (9784)..(9784): a, c, g or t
  modified_base (10784)..(10784): a, c, g or t
  modified_base (10845)..(10845): a, c, g or t
  modified_base (10955)..(10955): a, c, g or t
  modified_base (14182)..(14182): a, c, g or t
  modified_base (16296)..(16296): a, c, g or t
  modified_base (17156)..(17156): a, c, g or t
  modified_base (17605)..(17605): a, c, g or t
  modified_base (17706)..(17706): a, c, g or t
  modified_base (20184)..(20187): a, c, g or t
  modified_base (24033)..(24033): a, c, g or t
  modified_base (26144)..(26144): a, c, g or t
  modified_base (26298)..(26298): a, c, g or t
  modified_base (26580)..(26580): a, c, g or t
gccggaatttcaatcagctcgaagggcatatctttcggaaaacgacgcaggtactcggtaaaaccggtttgtacccagtccggcattttcgttcccacggcgacaagttgcagcttcacgcattaactccagagtttttccagttcatacaggcgacggctctcttcctgcatgacatggacaatcacatcgcccaaatccacgacaatccagtcggcgctgttttcaccttctactccgagcggtaacaggcccgctgcgcgagactcctgcacaacgtggtcagcaatggacataacatgacggctggacgtacccgtacagatgatcatgcagtcagtgatgctggatttgccctgaacgtctaaggcgatgatgtcctgacctttgaggtcatcaattttgtcgataacaaaatcctggagtgctttaccctgcaagttttccccctgggtgaatcaaatagataaaaatggtctgtcagtatacctgaaccagaggcgatttcgggacaattgtcgccgaatcggctttcgaaagtgggctatcatcccaccccgcgccgcagattgcatcgccatttttgtaaaacaatttctacaaagtcgtgtctggcggaaaaagtctggctgcggagaatatcagcctgcccggggctgtcaatggtcgttgcggcttacccgtaaaaaaacagaaaagtcatgcattctcgaccccgatggcacggctattgaggacgcgtagcgtcgcgaatttttggtttatatcaatggcgctccaacacccctggtcaacgcgaaaatgccacatagantcggcaggcatgccaattaaacgagcaattaacagactaagtacgccctgatggctgacgattaaaatattctgatagtgctgatattcactaagccttgcgataaagcgttccacacgttgcgaaaatgcctgaaatccttcaccgttcgtggggatagcatgctgccagtcattgcaccacgcgctatagttttcggcatcttcttgcatgaggtcgcgatgatgtcgcatctcccagtcgccaaaaaacatttcgttgagttcagggatgatatgaacggggagctggcggtcactgagaaccagtcgcgcggtatgctgtgcccgttccagttcactgcataaaaccaggtcaaaggaaacatcatctagcagtgtatgcagattttgcgcttgctcaataccgcgtgcggtcaggggtgtgggcgcatgaccgctgtacagaccatcgacattcgcttgtgtttcgccatgacnaattaaccacagtcgcatcatgccctccgtaacgacaggtatcagcgatacaagccttgttggttaatgtaagtcagtaccggttccggcaataaatcatcacatgattcaccgttttgcaaacgttcgcggatgatggtcgccgagatgttaaaccacggcgtttcagccagataaattttaccggcaggctgaaggtgaagatcttccgggttatgtgtcaaatgatcttccagccattgctggtattgcggttgcgccatttcaagtgggtaacctggacgccgacagacgatcaaatgtgcattgtcgagtatcgtttcgtattcgtaccaggtcggaaaggtcagcaatgaatcctgaccaataataaacgccagcggcacgtccggcccttgttcctgccgccactctttcagtgtttgcgcagtgtaagagggggcattgcgctttagctcgcgttcatcaagagtaaataatggcttgtcggcaatcgccagttcaagcatgtgtttacgctgtacgctgttcgcttccggctggggacgatgcggaggaacattattagggatgattgtgactcgcgtcagaccaatcaaattcgccagcgtttccacgggttttagatgaccatagtgcaccggatcaaaggtgccgccaaacagagcctgtaaagatttcatatcaaccgtcgataaatacgtccgccaggggtttatggcacaacagaagagataacccttccaactctgcccacactgactgaccgtaatcttgtttgagggtgagttccgttcgtgtcaggagttgcacggcctgacgtaactgcggctgacttaagcgatttaacgcctcgcccatcatgccccggcggttctgccatacccgatgcttatcaaacaacgcacgcagtggcgtatgggcagactggcgtttcaggttaaccagtaacaagagttcacgttgtaatgtgcgcaacaaaataaccggttcgctgccttccagacgcagttgctgaagaatatgcaatgcgcgcttactttttcccatcaacaaagcatcaacccaatgaaaaggagtgaaatgcgcggcatcattcaccgcctgttcaacgcgcggtaatgtcagtttgccgtctggccagagcagcgataaacgctccagtgcctgagccagcgccagcaggttaccttcataacagtagcagagcacctgattcgccgcgtcatccagttctaagttgagctgttttgcgcgcgcagcaacccagcggggaagctgagcctgctccggtgtctgacaggtcacctgcacgctgcgattcgcaagagcagtaaaccaggcggcattttcttgcgctttgcttaatttattaccgcggacgatcaacagcaggtcgtcatgcagaagtccggtgagtgtgagaagttgttcattgatcgccgcgttcggtccgttttctggtaacaacagcaatagcgtttgtcgactggcaaacagactcatggcctggcataacgaaaagatcgcattccagtcagtgttgggatcaatggaaaaagtgtggtgttcttcgaatccttgtgccgcagctacctgacgaacagcgtcctggctttcctgcaataacagaggatcgttaccaagtaaaagatacgccgcgcgcagcccttcattgagctgcgcgcggagttgttccgggtacaaccgaatcatcagttacccagcgtggtggagacgcgtgcaggcgttgccggagtatccgttgtagtcgacgtctgttcttcgtcggaacgaatatccgcagcacggatgcttggcagcttacgaatcagctgttcggcagcacggtcgtacatctctttaatgatcatttcctgctcgttatctttcgctaacgccatttgcgggttatcgaagaatgaacggaagactttggtgctaatcgggtagatatctcgtccaggaatcaataccgacgcgctaacagtcatcaccatctgatattccgcagtttgaccattacggaaaaccgacgcggtatcctgtgagattgatacagcacccaaacgcagggatggaacgtccttacgcgtggtttctttatcaagcaactcgacaccattcagacgtaactggttacgcaccgcacggcttaatggcccgttcggatcgcctgagtccaggatcatgaccttcatagtggaaggaacctgcgtggtgtcacgcagatgccagccacacccggcggtgattaacaccgccagagataacaacaatgttgccagatatcgcacgcttcctcccgcgcttagccaacgaccagattgaggagtttacctggtacgtaaatcactttacgtacagtaacgccatcaagatattttgctaccagatgttcctggccagcacgttcgcgaacctgttcttccgttgcgtccaccggaacggtgattttagcacggactttaccgttaacctgcaccacgaccagcgtggagtcttccaccatcgctttttcgtcagcaaccggccacggcgcgttgtcgatatcgccttcgcctttcagttcctgccacagcgtgaagcagatgtgcggggtgaacgggttaagcatacggacaacggccagcagtgcttcctgcatcagagcgcgatcctgctcgccatcggtcggtgctttcgccagtttgttcatcagctccataatcgccgcaattgcggtgttgaaggtctgacgacggccgatatcatcggtcactttagcgatagttttatgcacatcgcgacgcagcgctttctgatcttcagtcagtgcatcaacgttcagtgccgcaacatcacctttcgcagtatgctcgtacaccagtttccagacacgtttcaggaagcggttagccccttccacgccggattcctgccattcgagagtcatatcagccggagaagcaaacatcataaacagacgaacggtgtccgcgccgtaacgttcaaccatcacctgcgggtcgataccgttgttcttcgacttggacattttgctcatgccggtataaaccagttcatggcctgccgcatctttcgctttcacgatacggcctttctcgtcacgttcaacgatagcatcaaccggggaaacccagttacgttcgccgttttcgccaacatagtagaaggcatctgccagcaccataccctgacacagcaactgtttcgctggttcgtcagagttcaccatgcctgcatcacgcatcagtttgtggaagaagcggaagtagagcaggtgcataatggcgtgttcgataccaccaatgtagatatccaccggcagccagtagttagccgcttcggaatccagcataccttctttgtactctgggcaagtgtagcgcgcatagtaccaggaggactccataaaggtgtcgaaagtgtcggtttcacgcagcgctggcataccgttaacggtagttttcgcccactgtggatctgctttaatcgggctggtaatgccgtccatcaccacatcttccggcaggatcaccggcagctggtcgtccggggtcggcattacggtaccgtcttccagcgttaccatcggaatcggcgcnccccagtaacgctgacgagaaacaccccagtcacgcaggcggtagttcactttacgctcgccaacgcccatcgcagtcagtttatcggcgatggcgttgaaggccgcttcatggtcaagaccgttgaactcgccagagttgaacagcacgcctttttcagtcagggcttgctgagaaagatctggctcagagccgtcagccgccaggataaccggtttgatgttcaggccgtatttagaggcaaactcgtagtcgcgttggtcgtgccccggaaccgccattactgcgcccgtgccgtactccatcaatacgaagtttgctgcccaaacgggaatttcttcgcccgttaatgggtgaacagctttaaagccagtattgacgccttttttctccatcgtcgccatttcagcttcagcaactttggtgttacggcattcgtcaataaaggccgccagttcaggattattttccgccgctttctgcgccagcggatgacccgcagctaccgccaggtaggtacaacccataaaggtgtccgggcgggtagtgtaaacggtcagcgtgttgtcatagtcgttaacgttgaaggtgatttccacgccttcggaacgaccgatccagttacgctgcatggttttaacggtgtctggccagtgatccagtttatccaaatcgttgagcagctcgtcagcgtaagcagtgattttgataaaccactgcgggatctctttacgttcaactttggtatcgcagcgccagcagcagccgtcgataacttgttcgttcgccagtacggtctggtcgttcgggcaccagttgaccgcagaagtcttcttatataccaggccttttttatacagctcggtgaagaatttctgttcccaacggtagtattccggcgtacaggttgccagctcgcggctccagtcataaccaaagcccagcattttgagctggtttttcatatacgcgatgttgtcgtacgtccacggtgccggagcggtgttgtttttcaccgccgcgccttccgcaggcagaccaaacgcgtcccagccgatcgnntgcagaacgtttttgcccagcatgcgctggtaacgggcgatcacgtcaccgatggtgtagttacgtacgtggcccatgtgtagtcgaccagaaggatagggaagcatagacaggcagtaatacttctctttgctctcgtcttcggttacttcaaatgtgcgcttctcatcccaatgaagctgtactttggattctatctcttccgggcggtattgctcttgcatggcagccagtggtcctgttttcattacggctacaaaagtagcgttagaggtggtttttcagatccgcatagcatagcccaaacgtccgcgtcaaaacagcctttcgcgcactcgacgttgaaatgatgcccggattattcatacattaatttacagagtttgtgggcgtattagcaaagcaaggaacaaagaacgtctattattatagtcagttaacgacccgggagatgaaacgatgaacaaggttgctcaatattaccgtgaactggttgcgtcactgagcgaacgcctgcgcaatggcgaacgtgatatcgacgcactggtggaacaggcgcgcgagcgcgtaataaaaacaggggagttaacgcggaccgaggtcgatgagctgacgcgagctgtcagacgtgacctggaagagttcgccatgagctatgaagagagcctgaaagaagaatctgacagcgtctttatgcgggtgattaaagaaagcttgtggcaggagctggcagacatcaccgataaaacgcagcttgaatggcgcgaagttttccaggacctcaatcatcatggggtttatcacagcggagaagtggtcgggctgggaaatctggtctgcgagaaatgtcacttccatctcccgatctacacaccggaagtgctgacgctatgcccgaaatgtggtcatgaccagttccagagacgcccgtttgagccgtaatagtctgatttcgcacagcaataaagagaatatgggccgaatgaaattccccggcccttgtttttatctctacagtaaatcttcagtctcacgaatttcctgactgacatctctggttccggatgactgaactttacgatacaggtcgagagcctgtcggagatcgacaggtcttccttctccgtagtgatacataatggccaggttataccaggcagtggcgtcattgcattcagcggctttcgtaaaccattcaaaggcagcctgataatctttctcaacgccttgtccgtgtttatacatataaccgatgttgacgtaagcgccgacgctcccctgagcggcagccttcagataccagtacatcgcttgcttatagtcctggtccaccccttcgccagcgttataatcccatgcaatttgaaactgagcatgccgattaccctgctgtgcgcttttcaaataccagaatgcggcgagtgtctcgttttgagcaacgccttttccgtcttcataaagatcggccagattgttttgcgcgtcactatggccttgtaatgcagcttgtttgtaccagaaaaatgccagcgtatagtcttgtgcggctccgttgccatttctgtacatccacccaagattattttgcgcataagacattccgctctccgcggctatctgataccaggcaaccgcttctttatagttggggtcttctccacgatccagtatccagccaagggcgttggaagcgaaagtatggccttgtagggcagcttttttcagccagaanatggcttgctcattatctttatgncggcttttatcctcggtatacttttgccctaaggaatactgtgcttcacaatgaccttgctcagcggccagcttcagccagtaaaaggccttttcgtcgtccggagagtcaattgcgctatcgcgattataataaaacccaacaatatattgagcctcgcaatcgcctttttcagcacgttcgataatctcatctattgataaattatcgcagcaacttgacgtgaaaatcattatcatttccttatgattgtagataaaatatattgaatttttatgtgtttcattttttgcgcaagccttattttatgcgtattatgtcgcgtcagaaaagtataaataaacgagcgtcgcaatgcggctaatattcattcaatgaatatttaaggataaatcatatggacatggagtcgcaaaaaatattgtttgcactttccactccgatggaaatacgcaatgaatgctgtttaccttcgcattcatcacccaaaatgtatttaggtacacgcttttttgacctttcttcctcctggggaattgatgaccgtgatgacctgctgcgcacaattcaccgaatgatcgataacggtcatgccgcgcggttggcagggttttatcaccgctggtttcgttattctccatgtgaatggcgtgactatcttgctgaattaaatgagcaaggtcaggcttatgcgcaatttgtcgccagcacagccgaatgctgtggtgagggaggaattaaagcatgggattatgtccggatgggttttttaagtcgaatgggcgtacttaataactggttgagtgaagaagaaagtctatggatccagtcgcgtattcatctacgggctctacgttattatagtaactggcggcaatactttgccggttatacctttggtcggcaatattggcagtctcccgaagatgataatctgcctttattacgtgaattcttagcgcgtaaagaatacgacgattccggcaatgatatgttttatcaattatttgccagtgacgatgcatattacgcgaccttaccctggcaaccactggctgactaccccacatgcccggaaacgcttaaggatatgagcgacctatgaaaaattgctggaagatcctcaacatagaggaaacgactgatgtcgatattatccgccgcgcttatctggcgctgttaccgtcctttcatccagaaaccgatccgcagggttttaaacaacttcgtcaggcgtatgaggaagcgctccggattgcgcagtcgcctgctaaatctgtttggcaaccagaagaatatgaggtagcagaacatgaaattctgctcgcctttcgtgcgttacttgcctctgatagtgaacgttttctgccctccgcctggcagcgattcattcagcaattaaattattgctcgatgaatgagattgatgaattacgctggtcgctgtgcacaatagccatgaacactgcccatttatccttcgagtgcgtggtgttattagcagaaagattgcggtggttgcaggaggaaaacgtcggggaaatagacgaagaagaactggaatcctttttatatgccattgcgaagggaaatgtttttaacttccagatcattctgcatctgcccgttgccgtgcaaaatgacaccatcgatttttaccaaatgttcgcccggatttggtcatcgcatccagaatggctgacattgtatttagcgcaacatcgcgcagtgattatccccgatgatgcaaaactgcacagaaatttactccgctggtatagtgcaggtcgcctgggaatccccgaactcctggattacgcccggtcgtggcgggaagctgaacctgataatgaagatgcgcgttattatgaatacgcgcaacgcgtctattgtggagaaggcgaaagcctgctggcagaactttgtgactactggcacgagtatccctccactcaggcggatgctttaatgttgcaatggtgccgtcagcatcgagtcgattattacccattagtggtgatgatgattgaagctcgtgaactggttaacgaccagggaaaaccgntactttatgtccccggcgacagcgcccgtacgcgttttcatttatacgaaatactcagcgatgaaaaactctctgctctggggcgttcactggtcgagatggttttgcacaaaggatgtaagccgcggatctcactcacgcgtgatacagaacataccttatggccattatatctagttgccaaacaattagtgcaggccagccaacctacagaagaatcattaatgccgatcgtaagccgtcttgatgcagaaaatcgttgtccactggaagcattaattattcgtcgattattaattcaggcggcgaattttaccgagaagcaaactgttgaaccggagccgcaaccgcagccaatgcccgttgacgatggtgggccaggctgtctgggcatcattaaaattattttctatatttttatctttgctggtttgatagggaaaatactccatctgttcgggtgacagtcgacgttaatgtgcgggaagcccggcaagtaatctttccgcatttttgtaatgttgtttggcggccagttttaaccatttttgagattcataatggttaacattaatacctgagccatttctgtagatcaaacctaaagtatattgagcatgagcatacccttgttcagctgcttccttataccagagaattgctttacgggtgtcgggtttgacccccagacctttgaggtagatccaccccagtttactttgcgcgcgtggattttcctgttccgctgattgctcataccagtatctcgcctgtgtataatccagtggtttaccgtcgctaccatgaagataaaattctccaaggcgatattgcgacgttgagtgaccatgaatcgcggaaagctccgtggctgccgtggtgaatggaagactgcccggtgagcttaaataatcaaaggcataattcaccatggctttatcacgcaacgtcgttttcttgggttggctaatacaggtaattgctgcaactataaaaattncgaatatatacattaattttttattcatgtgtgaatgcttcgattttctttttattttganagcgtcaagtttatactcatcaataataaaaaagtagtcagttaatgcacttaagggattattaacaaatgaataaggaagaacaatatcttctttttgcgcttcctgcncccatggaaatacttaatcagggttgcaaacccgcgcatgactcgccaaaaatgtataccgggataaaagaattcgatctctcatcatcctggggaataaataatcgtgatgatttaattcagactatttatcagatgactgatgatggtcatgccaatgatttagctggcttatatctgacatggcatcgctcttcccctgaagagtggaaagcattaattgctggtggctcggagagagggttgatttatacccaattcgttgcccaaaccgctatgtgttgtggggaagggggaatcaaagcttgggattatgttcgaatggggtttctgtcacgggtcggtgtgctcaacaagtggctgacggaagacgagagtttatggctgcaatcgcgcgtctatgaacgagctcaccattactatcacagctggatgcactatttttccgcctattcactagggcgtctctactggcaatcttctcaatgcgaagacaacgcttcgctacgcgaggcgctaaccctgtacaaatacgatagcgccgggagtcggatgttcgaagagctggctgcgggaagcgatcgtttctatgccacgcttccctggcagccattaactgtccagcctgaatgcccggtaacgcttaaggatgtgagcgacctatgaaaacatgttggcaaatcctcgaaattgaaagcacgacgcaaatagacattatccgccaggcttatcttgctcgcttaccgttatgtcatcccgaaaccgatccgcaagggtttaaagcattacgccaggcctatgaagaggccctgcgactggcggtaaatcctgtcgaggaagcagatgatgaagaaaaagatgatgccactgagcatgaaatactacgtgtattcagggcattactggattcagaaagtgatcgttttcagccctccgcctggcagaaatttattcagcaattaaatacctggaacatggaggatgtcgatcaattacgctggccgctgtgtgcaatcgctatagaagcgcgatatctttcattaaattgtgcttctttgctggcagagcgtttgaactggcattcgtttaatgacagcgaaggaatagatgagtaagaaagggaggcttttcttgaggccattcaggctggtgattgtttcgatttccttggccttctggtatatcccgttgcgttgcagaaccagactgttgagtattacttcgctctggaacgttgctgccgttaccatcctgactatgtcactgcgtttttggcgatggaaggtccgtggttcattcctgatgatgcaaagttacatcgcaaactgttgcgctggtacagctcggtgcaaacaggtatggcggaactcattcctgtagccgaacagtggcaaatggaagaaccagaaagcgaagatgcccggtattaccagtgtgcacaacgtttgtactgcggcgagggggaaagcctgcttaccgatctctgcgcgtactggggaagttacccatctacacaagccgataatttgttgttgcagtggagcgcacaacattgcccggattatttcgcgttattagtgatggttatcgaagcgcggagcatggtagatgcgcaaggtaaaccgttgaaatatgttcctggtgagagcgcccggacgcgtctgttatgggcggaaattttacatagcggaaaactatcgccgttaggtcaatcgtttattgagtcgctattcttcaaacgcaaagcatgggcgtggtggaaatcgagagtcggtagcgagacagaagaagattcaccgttactggatttgtatcgggtagcggaacaggtagtacttgaagcgtttccgaaacaagagatgctggcccgtcttaatacaaggctggaaggcggagatgctcatccattagaggccattatcacccggatgctgttgacgaaagtaaaactcgagccggaggatgaagatgtcgatgagccaacacctgaaaaccatgaagaaaaaaatgatgaggatgaaaaaccacagagcattaccagcattatcaaaatcagcttaacggtgctggtgataggttatgctctcggcaaaatcgcgatgttgtttagttgacgatgtgttttttgcgccgatgccggatgcagcatttacgccgcatccggcagccgtgattatgggatctcaatggctaaataaacgctcgcctgccgcctgacctcatcgacgcgggccatatcgtttgactgcagcgccgcatcaaaatcggtgatcacccggccaatctcttctcgctcgtcacccagcgcccgcgcccacaactcttccagtttggccttaaaggtgcggttgatgagcatatcgcgcggataaattttcaatgcggataaccgcgtccgactctcttcaatctgctgcgcgctcaatgttaccgggctgtggttaatcactctggacttaacgctgccgtcttccagaagcacgtcaacttcaagcaaaccgttgatatcataactaaagcgaatatcaatcgactgataagccccggttctcttcaacggcacatcgaaggattccaccagaatgttgtttttaactttgtggttttctccctgatagacgttaaccgtaatagaatcctgttccgggtgcatggttgaataagtttctacacgcgacacgggcacagtggtgtttcgttcaataatcggcgagaaaatgccggaaacgccctggcggttaacctcaacgcccaacgagtaagggcaaatatcagtgaggatcacttcttcaatatcttcactgcgtaagcggcaggctgcctggattgctgcgcccagcgcgacaatggtgctcggatcgtaactttgatacggtaatttgccaaacagacgcacggcgattcgctgcaccagcggcatttgtgacgcgccgccaaccagcaccagactgtcgatttgactcggcttcagacgcgcatcgcgcaacgcctgttcaatcggcactcgcaagcgattgagcagcggcaaccacaaatcttccagttcgttctcgtaaaattcgcattcccgcgtttcatcctggtactgccagcgaatgtgcattggcgattgattgctacattttgccgcttccacacaggcatacaaggctgccagttcactctcgttaagcgtggtcctggcgacatccgcgcgttttaaaacctcatcgaccagcatatgggtnaaatcttcgccaccgaggaagttgtcgccagcggaggcgtgaacttcaatcaccggcgtggcgtactcaagcaccgtgacgtcaaacgtgccgccaccgagatcaaacaccagcgaacgggtattttgttgggtatgcaggccatacgccatcgcagctgctgtgggttcattaattaagcgtaccgcatttaaaccggctaactccgctgctaaacgggtatgcttgcgttgttcatcgctgaaataagccggaacagagatcaccacatctttaatcggacgttgcagaaattcttcggcatcttcttttaatgagcgtaataccaaagaggacagttctggcgcgttaaatgtgtcgctgcctaaccgccagttggtattactgcccattgcacgtttaaataacgctgccgttttatccggatgcgaagtacgccgtgatacagccggttttccgactaaaatatgattattttcatccatgctaattatggatggtgttaaatattcaccgaacttatttggaattaattgcgcggcaccgtctttccagacggcaattaaactattggtagtaccgagatcgataccaatggcgagttctgcattatccattgcatttatatcttgaaagaaaaagagataaacagattaagaccacccaggtaacgcgtggtgatcttaatcaatgacgtgtgttaagcgtaaaatttcagacgatcagccagtaaatcaacaaagccctgacgatcaacatcgaccattacagtggcattcggtttattgccagtcagataataataatcaacaaccgtcataccctgggtatatttcccctgtgtttccacgccaacccagcgctcaacagtggtaaacaactccggttttaacagccaggcgatggtgcatgggtcatgtagcggtgcgccgacaaagccccatttttcgtctttatgatattcgaggaagaaatccagcagttcggcaacaatggttgaaacagggttgccaatcgcgcggaaacgctcagtgtcttcaacgtggatttgtgctttgtgagtaacatccagaccggccatcaccaccgggatccctgactggaagacaatttctgccgcttccgggtcaacgtaaatattaaattcagccgcaggcgtccagttacccagtcccatagcgccacccataatcacgatacgggcaattttgctatgcagttccggatggctattgagcagcaaggcaacgttagtttgcggtccggtagacacaatcgtgacaggttccgcactttcacgcagcgttttcgccatcagctctaccgccgtacagttttgcggtgcgaacgtcggttccggtaatgccgggccgtcgagaccgctttcgccgtgcacattgtccgcgataatcaactcacgcattaacggttttaccgcgccgcctgccaccggaatatcggtgcgattaagcaaggtcagcatacgcagaacattgcgtaaggttttttctggtgtctggtttccggcggaagacgtaattgctttgacatcaagctctggtgaggcgagggcgagaactattgcgatagcgtcatcatgacctgggtcgcaatctaacagaattggcagtgccattgttgctccttgttgtgtgcttctttgcgacaagggtaacgccaggatgtaacagatacgaggggcgagacgataaagcgtgagatggcgcgcacttgggtatgcgcgccagagtgattaatgcaggattttcgcgaggaagtcttttgcgcggtccgatttcggatcatcgaagaacgcatctttcggcgagtcttcaacaattttaccctcatccataaagatcacccgattcgccactttacgggcaaagcccatttcgtgggtcaccaccatcatggtcatcccctcgttcgccagttccaccatcacgtccagtacttcgttgatcatctccgggtctagtgccgatgtgggttcgtcgaacagcatcgcaataggatccatacacaatgcgcgagcaattgccacacgctgctgctggccgccggaaagctgcgccggaaatttattggcatgtgcggaaagtcccacgcgntccagcaatttcaatgctttttcacgagccggtgctttatcgcgtttaagcactttcacctgcgccagggtcaggttttcgataatcgacagatgagggaacagctcgaaatgttggaataccatcccgacgcgagaacgcagctttgccagatcggttttcttgtcgttaaccacgataccatcgacggtgatttcaccttgctgcactggttcgaggccgttgacggttttaatcagcgttgatttgccggaaccagacgggccgcaaaccaccaccacttcgccttttttcacttcggttgagcagtcggtcagcacctgaaagtgaccataccattttgaaacatttttcagggtaatcattatgctgtccttcttttcaagtagctgaccaacaacgacgcgctaaggctaataacgaaataaacaaatccggcaaacaggatcatctcaacctgcgtgccatcacgctcaccaatggttgaggcggtacggaagaaatcggccagagataacacatacaccagcgaggtatcctggaacagtacgatgccctgagtgagcagcagcggcaccatcgcgcggaacgcctgcggcagaataatcagtttcatcgactgccagtgagtcattcccaacgccagcgcggcgctcgactgaccacgagaaatactttgaataccggcacggataatctctgaatagtaggccgcttcaaacatcgaaaacgccaccatcgccgaaattaaacggatatcattttttggtgataatcccagcacgttttgcagaaaacccggcacgatcaggtaaaaccacagcaaaaccataactaaaggaatcgagcggaatacgttnacgtaggctttggcaaaccacgctacgggcgcaaagctggacaagcgcatcaccgccagcatggtgccccacaaaataccaatcacgactgccgtgacggtgattttcagcgtgatcaccagcccgtcgagcagatatggcagggaagggacaatggaactccagtcaaactcgtacattatttgccccccatgttgccaggcaggcgaactttacgttcaaccagcgtcatcaccagcatgataaaagcgttaataaacacatacgctagcgtaatggcggtaaacgactcccaggcgtgagccgagtaatcgagcaatttactcgcctgcgctgccatatctaccagaccgatggtcgaggcgatggcggagtttttcaccaggttcatcatctctgaggtcatcggcgggacgataacgcgataagcattaggcagcagtacgtancggtaagcctgcggcagcgtcagacccatagccagcgcggcattcttctgcccacgcggcagcgactgaatcgcggcgcgtacctgttcgcaaacacgggnggcggtaaacagccccaggcagagcatggatgaaaggaaaaactgaatattgggatccagctcggccttaaaccacatgccgattttctccggcagcagctccgggatcaccagataccaggtaaagaattgcacaatcaacggcacgttgcggaacagttcgacatacaacgtacccagaccggagagaaaacggtttggaacggtacgtaaaataccgaaaaatgaaccgacgaggaaagcgataatccaggcgcagatcgacaaagcgatcgtcacctgaaaaccactccagatccaaccaagataggtggtgttgccgaacggggcttgttgtaaaaaaataccccagttccagtctatagacataaatctactccagaaaaaagagggtagcagcgttaactgctaccctcgaagattgttacccagcgtattgcggttttcaggcccgatggggaacgaccatcaggcgtatagtctgtccgtgctacgtaacaatcgagagggctagaatttccgcccctggttcttgtaattagttcagtgctttgtcattcggttctttgaacagtgctttcatttcgtctgacagttcgaaattcatgttcaggtttttcggcggaatgggatttttgaaccatttatcaaaccatttttccgcttcaccggaggtctgcacctgagcgatagtgtcatccatcagctttttgaactgcggatcgtctttacgcaacatgcaaccataggcttcctgagactgcggcttgccgacgatatcccagttgtctggtttcttcgctttcgcacgttcaccggccagcagagcatcatccatcataaaggcaacggcacgaccgctttccagggtacggaaagagtcaccgtgatctttggcgctgatgatgcgcatattcattttttgctcttcattcagtttgttgagcaaaacttcagaggtagtgccggaagtgacgactacggctttgcctttcaggtcggcaaaatctttgatatcgccgccctttttggtcaacaggcgcgtaccgaccacgaaaatagtgtcagagaaagccgcctgtttttggcgttcgacgttgttggtggtagaaccacattcaaaatcaaaagtgccgttttgcagcagcggaatacggttttgtgaggtaatcggaatcagtttcacctgcaagtccggtttgttgagtttctttttcactgcttcaacaatggcgttggagtaatcctgcgaataacccaccactttttgctgattgtcgtaataagagaaaggtactgaagattcacggtgaccgacgacaatcacgccgtttttggcgattttgtccagcgtactgcccgctgccggggcggcgtcatctgcctgtgccagtcctgcggaaagcgccagggccaggattgctgtggcaggtttacgtaattgcatatccaactcctttatcttctgcgttaagaacgcatggatacccgttgtgagtgtttgtgttgttatcatctgcaactttattgtgtagtgttgtgcctgttaggtaacatttagtttggctaaatgtaaagatattgctgttttattgtttatatttgggaggtgcgccgcaccattccgaagcaaaattcttaaaatgcactcttttggtgctaccggtggattgctgtggtgcaaccgggttgtactgatgctggttaaagctttgccttgtataacaaagcaatagatgtgccaaagttggataggagaatattgttatccggataatgcactgatgccgcatccggtgagcgtgccgaaatatgggatgtattccggcacgataagaagggattatttacgtcgctgacgcagactcatcaacacagcagcaaaaccaaacagtgccgtcagcacccacagcggccagttgccggtacgtgcgtatggtgtgagtccggtggtcggcgtcacgttagtggttaacacctcgcgggtgaactgcgggatcatcgcctgaatctcaccctgcgggccaatcaccgccgtaatgccgttgttggtgctgcgcaacagtgggcgcgccagctccagcgcacgcattcgcgccatctggaagtgctgccatggaccaatagacttaccaaaccacgcatcgttggagatagtcagcagatagtcggtatccgggcggaagttatcgcgcacttgctcgccgagaatgatctcgtagcaaatagccgcagtaagctcaataccatttgccgacagcggcggctggatatatggcccacggctgaacgacgacatcggcagatcaaagaacggtgctaacggacgcagaatcgactccagcgggacaaactcgccaaacggcaccagatggtttttgttatagcgatcggctgattcgtagctgtacggtgcacctttacccagtgtgatgatggtgttgtaggtatcgtaacggttctgcttattaagacgcnnnncaacaatcccggtcaccagcgagctacctttatcacgcaactcaccgtccagtgctttgaggaacggttgctgattaatttccagatcggttatcgccgactccggccagataatcaacgatgatttgcccatcagcggtgccgttgcgttgtagtaaatcttcagcgtattaagaagctggccttcgtcccatttcagcgattgcggaatatcgccctgaaccatcgaaacctgaatggttttctccggttgtggggtaaaccactggatgtaacgcagcgggaagggaagggcaaacagcacgacggccaccaccagcggacgccagttgcgtttgactaacgccagtgccagcaggccgctaaccatcataagcaggaagttaatggcttccacgcccattagcggtgccagcccttttaacgggccatcaatctggctatagccgaactgtaaccacgggaagcctgtcagtacccaaccgcgcagaaactcggtcacttgccagagagcaggggcggcaatcgccacgcgcagccaggtggttttcggccacaggcgcgacagcacgccagcaaacagtccggtatacagcgacaaatacgccgccagcagtaccaccaggaagatgttaaccgggtcaggcattccgccaaaggtcgcgatgctgacatagacccagttaataccgctgccaaagaggccaaatccccagcaaaagccaatagcggcagactggagtggacggcggttaaaggtcaacgcctgaagccccatcagcgaaataatcgccgcaggccagacgtcgtaaggagagaaggccagcgttccgcaggcaccgaataataacgccagcagcaggcgaatgcgctggcgttcaattaatgaggcaaaagccatgtagttatctatccagtttcggttttattcatccagcttcggctggggtgagtcatccgggattttgacatgaacctgaataatacgccgactgtcggccatcgccactttgaactggtaaccgtcgatgtcgatggtttcgccacgtgccggaagatgcccaaatgcctgcatcaccagaccaccgatagtgtcgacttcttcatcgctaaagtgggtgccgaacgcttcgttgaagtcttcaatggaagccagtgcgcgcacggtccaggtatgacgactcagctgacggaagtcgatatcatcttcttcgtcatattcgtcttcaatctcaccaacaatcagttccaggatgtcttcaatggttaccagaccggaaaccccaccgaattcgtcaataacgatcgccatgtggtaacgctgagagcgaaactctttcagcatccggtctacgcgcttactttcaggaacgacaaccgcctgacgtaacactttgtccatgctgaaggcttcagcatcgctgcgcataaacggcagcaagtctttcgccatcagaatcccttcaatgtgatctttgtcttcgctaatcaccgggaaacgtgagtgggcggactcgatgatgacatcaaggcattcgtccagcgtctggttgcgtttcagggtaatcatctgggagcgggggatcatgatgtcgcggacgcgttggtctgcgatgtccatcaccccttcgagcatatcgcgcgtatcttcgtcgataaggtcgttctgcccggaatcacggatcagcgccagcagttcgtcacggtttttcggttcaccgtggaaaagttggctgagtaacagggagaaaaatcccttcttgttgcttatcgtgtcactactgtgtgaattgtcgtcgctcatggcgtcgtatgggttctcatgttagttaatcaaaacgccgtcgttaatcaccaacggcggggacgtctgccagtcaaatggctggcaaattattctttctcggcaatgtacggatcctcatagcccagagcaagcataatctctgtttcgagggcttccatttcttctgcttcgtcatcttcgatgtgatcgtaacctaacaaatgcagactgccgtgcaccaccatatgcgcccagtgcgcctccagtggtttgccttgctcctgagcttccttctcaaccacctgacggcagataaccagatcgcccagtagcgacatctccatgccaggcggcacttcaaacgggaaggagagcacgttggtcggcttatccttaccgcgataggtcagattgagactgtggctttcggcggtatcgaccacgcgaatcgtcacttccgactcttcctgaaactgcgggatcaccgcattcagccatgtttgaaactggctctcttccggcaatccggagttatcttcacatgccagttgtaaatcgaggatcacctgactcatttttgttcctgttcttcgcgcttgcgttctgccgccagcgccgctttacgtttttgttcggcttcttcccaggcttcataggcgttaacgatacgcgccaccaccgggtgacgaaccacgtcttcgctgtggaagaagttaaagctgatctcttcgacatcggccagcacttcgatggcatgacgtaagcctgatttagtattacgcggcaggtcgatctgtgtgacgtcgccggtgataaccgcttttgagttaaaaccgatacgggtcaggaacatcttcatctgttcgatggtagtgttctggctctcatcgagaatgataaatgcgtcgttcagcgtacgaccacgcatataggccagcggtgcgacttcaataacgttgcgctcaatcagtttctcgactttctcaaagcccagcatttcaaacagcgcgtcgtacagcgggcgcagatacgggtctactttctggcttaaatcgccaggcaggaagcccagtttctcaccggcttctactgccggacgagtcagcagaatacggcgaatttcctgacgctccagggcatcaactgccgcagccactgccaggtaggttttacccgtacccgccgggccaacgccgaaggtaatgtcatggtcgagaatattggcgatgtactgcgcctggtttggcgtgcgcggcttaattacgccgcgtttggttttgatattgaccgctttgccgtactccggcacgctctccgcgctttgctccagtacccgtgcttctttaatcgcaaggtggatctgttccggttcgatatcctgaatctgaccgcgcatcggggcagtatcgacatacaggctacgcagaatgtctgccgcagcggtgacgcaaatcggacggccggtcagtttaaagtggttatcgcggcgattgatctcgatgccgagacggcgttcgagctgcttgatgttgtcatcaaacgggccgcacaggctcaacagacgcgcgttgtctgctggctccagggtgatttcgcgagtgtctatgttcaaaccgttcctcttatctgtatgccgccggaagctgaacattcaccggcctataaggaaattattcacgccacaggaaaaaggcgcaagcattgcgataaagatggggataaagagagaaaaaacaaggcccaccggaacggcgggcctgagaattacggctgataataacccacgccaaggtcgttttctttgcgagtacgggcaatcaccgattctggtgtttctgccacgcgcagacccatttcatcttcagtacgcaccactttaccgcgcagagagttcgggtagacgtcggtaatttctacatcgacgaatttaccgatcatatccggcgtgccttcgaagttgaccacgcggttattttccgtacgcccggaaagctccatgatgctcttacgcgatgtaccttctaccagaatacgctgggtggtgccgagcatccggcggntccacgccatcgcttgctgattgatacgttcttgcagaatatacagacgctgcttcttctcttcttccggaacatcatcaaccatatcggcggctggtgtacccggacgtgcagagaagataaagctgtagctcatgtcgaaattgacgtcggcaatcagcttcatcgttttctcgaagtcttcggtggtttcgccagggaagccgacgatgaagtcagaactgatctgaatatctggacgcgccgcacgcagtttacggatgatcgctttgtactccagcgccgtatgggtacgtcccatcaggttcagaatgcgatcggaaccgctctgtaccggcagatgcaggaagctcaccagctccggcgtgtcgcgatacacttcgatgatatcgtcggtgaattcgatcggatggctggtggtaaagcgaatacgatcgatcccgtcgatcgcagcaaccagacgcaacagatcggcaaacgatccggtggtgccgtcgtagttttcaccacgccaggcgttcacgttctgaccgagcaggttgacttcacgcacgccctgagccgcaagctgggcaatctcaaacagaatatcgtcagacggacggcttacctcttcaccacgggtgtaaggcaccacgcagtaggtgcaatatttattgcagccttccatgatggagacaaacgcggtcggcccttcggcgcgcggttccggtagacggtcaaacttctcgatttccgggaagctgatatctacaaccgggctgcggtcgccgcgcacggagttgatcatctccggcagacggtgcagcgtttgcggcccaaaaataatatcgacatagtgggcgcgctggcgaatgtgctcgccttcttgcgatgccacgcagccaccgacgccgataatcaggtctggattcttctcttttaacagtttccagcgacccaactgatggaagactttttcctgagccttctcgcggattgagcaggtgttcagcagcagcacatccgcttcttccgccacgtcggtcagttgatagccgtgggtggcatccagcagatcggccatcttcgatgaatcgtactcgttcatctgacagccccaggttttaatatggagttttttggtcatcgacttgctcttgcgaaatagtagccaggaatgcagggcgcatagtgtaatgctttgctgccgttgtgaccagtatgagcgttatcagcccttgggggtaaaaatcctgtaaacttaaagcatattgctaacaggatgattgaccatgacaaatcaaccaacggaaattgccattgtcggcggaggaatggtcggcggcgcactggcgctggggctggcacagcacggatttacggtaacggtgatcgagcacgcagaacctgcaccgtttgtcgctgatagccaaccggacgtgcggatctcggcgatcagcgcggcttcggtatcattgcttaaagggttaggggtctgggatgcagtacaggctatgcgttgccatccttaccgcagactggaaacgtgggagtgggaaacggcgcatgtggtatttgacgcagccgaattaaagttgccgttgcttggctatatggtagaaaacactgtcctgcaacaggcattgtggcaggcgctggaagcgcatccgaaagtaacgttacgtgtgccaacctcgctgattgcattacatcgagataatgatcttcaggagctggagctgaaaggcggtgaagtgattcgcgcgaagctggtgattggtgccgacggcgcaaattcgcaggtgcggcagatggcgggaattggcgttcatgcatggcagtatgcgcagtcgtgcatgttgattagcgtccagtgcgagaacgatcccggcgatagcacctggcagcaatttaccccggatggaccgcgcgcgtttctgccgctgtttgataactgggcatcgctggtgtggtacgactctccggcgcgcattcgccagttgcagaatatgaatatggcgcagttacaggtggaaatcgcgaagcatttcccgtcgcgtctgggttacgttacaccgcttgccgctggtgcgtttccgctgacacgccgccatgcgttgcagtatgtncagccggggcttgcgctggtgggtgatgccgcgcacaccatccatccgctggcggggcagggggtgaatcttggttatcgtgatgtcgatgccctgattgatgttctggtgaatgcccgcagctacggcgaagcgtgggccagttatcctgtcntcaagcgttaccagatgcggcgcatggcggataacttcattatgcagagcggtatggatctgttttatgccggattcagtaataatctgccgccgctgcgttttgtgcgtaatcttggtttgatggcggcggagcgtgctggcgtgttgaaacgtcaggcgctgaaatatgcgttagggttgtagccttacaacattgccggatgcgtgccaaccgtaggtcggataagacgcggcagcgtcgcatccgacattgaaggataagacgtgtcaacatcgcatncgacattgagtgaacgcagaaaagcaaaaagctcgccgaagc

SEQ ID NO: 168 - DNA, 32 bp, Escherichia coli
  Strain O55:H7
  modified_base (4)..(4): a, c, g or t
tttntaatgtggctggggtacgaggattcgaa

SEQ ID NO: 169 - DNA, 11402 bp, Escherichia coli
  Strain O55:H7
  modified_base (109)..(110): a, c, g or t
  modified_base (954)..(954): a, c, g or t
  modified_base (2550)..(2550): a, c, g or t
  modified_base (2901)..(2904): a, c, g or t
  modified_base (6423)..(6423): a, c, g or t
  modified_base (6648)..(6648): a, c, g or t
  modified_base (7199)..(7199): a, c, g or t
  modified_base (8319)..(8319): a, c, g or t
  modified_base (8508)..(8508): a, c, g or t
  modified_base (8768)..(8768): a, c, g or t
atgccggaatcagaatccggtgccttaccgcttggcgataccccaactgggtgcacttacaaggtaagcgtcttgaataaattggctggggtacgaggattcgaacctnngaatgccggaatcagaatccggtgccttaccgcttggcgataccccaacaaattggtttttgaatttgccgaacgtattcgacacattcagaatttggtggctacgacgggattcgaacctgtgaccccatcattatgagtgatgtgctctaaccaactgagctacgtagccagattgtttcttcgatggctggggtacctggattcgaaccagggaatgccggtatcaaaaaccggtgccttaccgcttggcgataccccaataaccgggcggtgaaccgcttactcaaagaagatggctggggtacctggattcgaaccagggaatgccggtatcaaaaaccggtgccttaccgcttggcgataccccatccgtacaacgctttctggtgaatggtgcgggaggcgagacttgaactcgcacaccttgcggcgccagaacctaaatctggtgcgtctaccaatttcgccactcccgcaaaaaaaagatggtggctacgacgggattcgaacctgtgaccccatcattatgagtgatgtgctctaaccaactgagctacgtagccatcttttttttcgcgataccttatcggcgttgcggggcgcattatgcgtatagagccttgcagcgtcaacctctttttcaaggaaaattgctcgaaagtgactgtttggttaggttgcgaacagcgtggcgctatattcgtcaattattgtttactttgtgttttttcccaccctacagccattcttttgtcatacaggatgaaattcggaatttaacaatagtggtgggaaattaatctatgaaatactggcctacagtgatgagttgtcaaacagngatgtggcaaacccggaacatttccttactgcatatcagaatcaacaagcacctcaataactgaaacagccccggatttcaccggggctgtttcgcatttcttacttatacgccgactggtgaacaccaaccgcgcgaccagacggatcgtccattttcttgaacgcttcatcccattcgatcgctttagcggaagaacacgcgacggaaggaccgcccggcacgcactcagcggcgctcggaagcgggaatagttcttcaaagatctcccggtacagatacgcttcttttgaggtcggtgtgttgtacgggaagcggaagcgggcagtttccagctgttgatcagaaacctgctgcgccgccacttctttcagggtgtcgatccaactgtaaccgacgccatcggagaactgctctttctgccgccaggccacgcttgcgggcaggtatgactcaaaacattcacgcaggatgtgtttttccatcttgccgttaccgcacattttatcctgcgggttaatgcgcatcgccacgtcgaggaatttcttgtcgaggaacggaacgcgtgcttccacgccccaggctgacatcgctttgttggcacgcgcgcagtcatacatatgcagggccagcagtttacgcaccgtctcttcatgcagttctttggcattcggtgctttgtggaagtaaagataaccgccgaacacttcatcagaaccttcaccggacagcaccattttaatgcccatcgctttgatcttacgcgacattaaatacatcggtgttgaagcgcgaatagtggtcacatcataggtttcgatgtggtaaatcacgtcgcggatggcgtccagaccttcctgtacagtgaagtgaatttcatgatgcacagtgcccagatggtttgccacttcctgggctgctttcagatccggtgaacccggcagacctacagcaaaggagtgtaactgcggccaccaggcttcagagcgttcctgatcttccacgcgacgggctgcgtatttcttggtgatagcggaaataattgaggaatccagaccaccagaaagcagcacaccgtaaggcacatcagacatcagatggcttttaacggaatcttccagagcctgacgcagctcgtttttgtcggtcacgttatctttcactgcatcaaagtcgaaccagtcgcgatgataataagaacgaatttcgccgtcctgactccacaaatagctccccgccgggaactctttaatcgtgcggcaaactggcaccagggctttcatttctgaggccacatacagctgaccgtgttcgtcatagcccatatacagtgggatgatccccagatggtcgcgaccaatcaggtaggcatctttttcgctgtcgtacagggcaaaggcaaacatgccctgcaagtcgtcgagaaattccggccctttttcctgatacagcgcgaggatcacttcacagtcagaccctgtctggaactgataacgatcgccatattcagcgcgcaatgcctggtgattgtagatttcaccgtttaccgccagtacgtgggttttttgttggttgtagagaggttgcgcccccgcnttaacgtcaacaattgacagacgttcgtgagcgagaatggctttatcgctggcataaataccggaccagtccgggccacgatgacgcatcaggcgtgacagctcgagtgctttcttacgcagctcaactgcgtctgttttgatatcgaatacgccaaaaattgaacacataaccttctccgttaacctggtatttgttgcttgttgtgtttgcttgtttaaaaaaatgccgcaaagcagcactgtgcgcaagcgatttggcggtgaaaaaataaaaaacgtaatggtgattgctgatttgtgaaaaaggggagggtgcggtgatgtatttattgatggatcgataattttnnnngggttttattgaatgggatgattttaatgatgggtaaaaataagaaaccacgtcctgagacgtggttgctattcagataacgtcgatttcagcgactgacgggtaaatccagctggggcggaaaggcatactgtcgatatcgtcgagcgacgaaacaccagaaagcaccagaatcgtctccagacctgcctggaagccggccagaatatcggtacgcaggttatcgccgacaatcaccgtttcttccgaatgtgcctgcattttgtttaatgccgcgcggataatccacggactcggcttaccaacatagaacggtttgcgcccggagattttctcaatccctgcacacaacgcgccacaggccggataaaaaccgcgcccgtgggtgtccgggttggtggcgataaagcgtgcaccgttagcgacgaaataggccgctttatgcatcatgtcccagttgtaggaacgcgtttcgccaacaatcacaaaatcagggttcacatcggtaatagtgaaaccggctttgtacagttcatgaatcagtgcgccttcgcccaccacatacgctttcttgccttcctggcgacgcaggaaatcggcggtcgccatcgcagaggtataaaacacgctgtcaggtacatcgacaccggcagtggcaaagcggttcgccagatcttgcccggtctgcgaaggatagttggtcagcaacaccagcggcaggcctttatccataatcccgtgcaaaaattccgctgcacccggtacggcgacgttatcgtgcatcagcacgccgtcgatatcgcaaattacatttttaatggtcatggactacccagaatattgacaacaataagcgccactataaaagcacattaattttccagcaaatgctggagcaaaataccgttgagcatggcgcgttttaccagcgcaaaagcaccgattgccgagcggtggtctagctcagaacgtaccaccggcagattagtacgaaacgccttcagcgcctgagtattaatgcagctttcaatagcagggagcagcactttatcggcttcggtgatttcaccggcaataacaattttttgcggattaaataagttgatagcaatggcgatggttttgcccagatgacgaccgacatactcaatcacttccgaggccaggctatcgcctttgttcgcggctttgcagatagttttgatggtgcagtcgtccagcggcacgcggctctggtagccctgctttaacagattcaacacccgttgttcaatagcggcgttggcagcgatagtttccaggcagccaaagttgccgcagtggcagcgttcacccagcggttcgacctgaatatggccaatttcaccgacgttgccgttgcggccaataaaaatgcgcccgttagagataatcccggccccggttccgcgatggacacgcaccagaatggagtcttcgcaatcctgacttgcaccgaagtagtgctccgccagcgccagactacggatatcgtgaccaacgaaacaggtcactttaaaacgctcttccagtgcttctaccagcccccagttttctacctgaatatgcggcatgtaatgaattttgccgctgtccgggtcaacaagtcctggcaggataacggaaatggcgatcagctcgcgcagtttgcgctggtagctatcaataaactgagcaatggcattcagcagggcatgttccagcgtctgctgggtacgttccggcagcgggtaatgttcttctgccagcactttgctgctgagatcaaacagggtgatggtggcgtcgtgacgaccaagccgtacgccgattgcgtggaaattgcgggtttcggtgacgatagagatagcgcggcggcccccggtggaggcctgctgatcaacttctttgatcagcccgcgttcgataagctgacgcgtaattttggttacgctggcgggggcaagctggctttgctcggcaatctgaatccgcgagattggcccgtactggtcaatcaggcgataaaccgccgcgctgttaagctgttttacgagatcaacattacctatctgagcttgtccgcctggtgtcatactttctcttattgagttacgacctcgttaccgttaacgatggtcttggtgattttaaaatcaggtgtgaatgcggtcaggttggctactttacctgcggcgagtgtgccgagacgtttctcaacgccaatcgcacgcgccggatagagcgtcgccatacgcagcacttcatccagtgcgataccgcaatgttcgaccagattacgcacgccttcaatcatggttaaggatgaaccgcttaacgtaccgttctcatccacacaaagtccgttacggtagtatattgttttacccgcaaaaatgaactgttcaatgttggcacctgctggcgcggtggcgtcggtaaccagacacagtttgtcgcctttaaggcgtttagcattacgaatgttggcgtaatcaacatgcaggccatcagcgataataccgcaataaatgtcagcttcatcgaggatcgcgcccgccaggcccggttcacgaccggtaatatacggcatcgcgttgtacagatgggtggcaaaggtaatccccgcgcggaaaccggctttcgcttctttcaacgtcgcgttggagtgaccggcagaaaccacaatcccggcatttgccagtttgctgatgacttccgcaggaaccatttccggtgccagggtcactttggtaatgacgtcggcgttttcacacaggaaatcgaccagcgcggcatcaggcttacgcacaaaattcggattatgggtaccttttttcaccagattcagccacgggccttccagatgcagacctaacgcctgattcggatgttttgccaggtactcgcgcataacgcgcacgccctgtttcatcagctcatcgctggtggtgataagcgtcggcagatagttagtacagcctgatttctcattggctttctgcatgatttccagcgtttccacgctgaccgcttcagcggtgtcgttaaactgtacgccgccgcagccgtttaactgcacatcgataaaaccgggggagagaatggccccgttcagtgaacgttgttcgatctctggcggcagttccgctaccggacagacgcttttaatcaggccatcagcgataacaaccgcgtggtcatcaagaaattcgtggccggtaaagatccggccctgggttaatgcatacattctgacccccgattttaaaaaatattgccctgagcaaggagccagggcagggataacaattacagacctttgatattttctgcttctaattcattgaaatatcttaaagtcttaactttcagctccatggtggaaggctcatcgcacaccatgatggctttcggatgcagttgcagacagctgatggtccacatatggttcacgcaaccttcaactgcggcctgcagcgccagtgctttctggctacccagcaccagaatcatcacttnttcggcatccagcagtgtaccaacaccgacagtcagggcatattttggcacctgattgacatcgttatcaaagaaacgagagttcgcgacgcgagtgtcatgagtcagggttttgatacgagtacgagaagccagagaagacgccggttcgttaaatgcaatatgaccgtcgttacctacaccgcccataaacagatgaatttttccgtaagaacggattttttnttcatactggcggcactcggcgtcgatatccggggcgttgccgttgagaaggttgatgttttctgctggaatatcaacgtgatcgaagaaattacggtgcataaagctgtagtagctttccggatgctctttcggcagaccgacatattcgtccatgttgaaggtgacaacgtgcttaaagctgacctggcctgctttatgcatttcgactaacgctttataggtggtcattggcgtgccgccagttggcaggcccagaacaaacggacgatcagcagtcggtttgaacgcattgatacgattgacgatatggcgagcagcccatttgccgacctgttcagcggtagtcagggggatcagtctcattattcacctcaataagtaaaatgtaagccgttggcggattaggcatctttaagcgtaacctggatttgcgcagacaggcgtcaatccgacctgattttttgaatgataaaataagttttctggtttagccagtaaaagggagtgatgataacgatatttggtgacaaaactcacaaaagacacgngtttaatttgcgatacgaattaaattttcacacactctgtggcagatgatctaacaatctgattacagaacatcggcagtacaatttgcagcacaataaaaatacggctttaaacgagccaaatagggttctcgtagggggaataagatgaatattttaggttttttccagcgactcggtagggcgttacagctccctatcgcggtgctgccggtggcggcactgttgctgcgattcggtcagccagatttacttaacgttgcgtttattgcccaggcgggcggtgcgatttttgataacctcgcattaatcttcgccatcggtgtggcatccagctggtcgaaagacagcgcaggtgcggcggcgctggcgggggcggtaggttactttgtgttaaccaaagcgatggtgaccatcaccccagaaattaacatgggtgtactggcgggtatcattaccggtctggttggtggcgcagcctataaccgttggtccgatattaaactgccggacttcctgagcttcttcggcggcaaacgctttgtgccgatcgccaccggcttcttctgtctggtgctggcggccatttttggttacgtctggccgccggtacagcacgctatccatgcaggcggcgagtggatcgtttctgcgggcgcgctgggttccggtatctttggtttcatcaaccgtctgttgatcccaaccggtctgcatcaggtgctgaacaccatcgcctggttccagattggtgaattcaccaacgcggcgggtacggttttccacggcgacatcaaccgtttctacgctggtgacggcaccgcggggatgttcatgtccggcttcttcccgatcatgatgttcggcctgccgggtgcggcgctggcgatgtacttcgcagcaccgaaagagcgtcgtccgatggttggcgggatgctgctttctgttgctgttactgcgttcctgaccggtgtgactgagccgctggaattcctgttcatgttccttgctccgctgctgtacctcctgcacgcactgctgaccggtatcagcctgtttgtggcaacgctgctgggtatccatgccggcttctctttctctgcgggggctatcgactacncgttgatgtataatctgccggccgccagccagaacgtctggatgctgctggttatgggtgttgtcttcttcgctatctacttcgtggtgttcagtttggttatccgcatgttcaacctgaaaacgccgggtcgtgaagataaagaagacgagatcgttactgaagaagccaacagcaacactgaagaangcctcaatcaactggcgaccaactatattgctgcggttggcggcactgacaacctgaaagcaattgacgcctgtatcacccgtctgcgccttaccgtggctgactctgcccgcgttaacgatacgatgtgtaaacgtctgggggcttctggggtagtaaaactgaacaaacagactattcaggtgattgttggcgcgaaagcagaatccatcggcgatgcgatgaagaaagtcgttgcccgtggcccggtagcagctgcntctgctgaagcaactccggcaactgccgctcctgtagcaaaaccgcaggctgtaccaaacgcggtatctatcgcggagctggtatcgccgattaccggtgatgtcgtggcactggatcaggttcctgacgaagcattcgccagcaaagcggtgggtgacggtgtggcggtgaaaccgacagataaaatcgtcgtatcaccagccgcaggaacaatcgtgaaaatcttcaacaccaaccacgcgttctgcctggaaaccgaaaaaggcgcggagattgtcgttcacatgggtatcgataccgtagcgctggaaggtaaaggctttaaacgtctggtggaagagggcgcgcaggtaagcgcagggcaaccgattctggaaatggatctggattacctgaacgctaacgcccgttcgatgattagcccggtggtttgcagcaatatcgacgatttcagtggcttgatcattaaagctcagggccatgttgtggcgggtcaaacaccgctgtatgaaatcaaaaagtaatctgctttatgcctgatgcgacgcttgagcgtcgcatccaacaatgacaagcggtggagatcttctctgccgctttttttttcatcaatcatccccataatctcagtgagattttcgattttcactaactaacagttgtcagcctgtcccgcttataagatcatacgccgttatacgttgtttacgctttgaggaatccacgatgagtgaggcagaagcccgcccgactaactttatccgtcagatcatcgatgaagatctggccagtggtaagcacaccacagtacacacccgtttcccgccggagccgaatggctatctgcatattggccatgcgaaatctatctgcctgaacttcgggatcgcccaggactataaaggccagtgcaacctgcgtttcgacgacactaacccggtaaaagaagatatcgagtatgtcgattcgatcaaaaacgacgttgagtggttaggttttcactggtctggtaacgtccgttactcctccgattattttgatcagctccacgcctatgcgatcgaactgatcaataaaggcctggcgtacgttgatgaactgacgccggaacagatccgcgaataccgcggcaccctgacgcagcctggtaaaaacagcccgtaccgcgaccgtagcgttgaagagaacctggcgctgttcgagaaaatgcgtaccggcggttttgaagaaggtaaagcctgcctgcgtgcgaaaatcgacatggcttcaccgtttatcgtgatgcgcgatccggtgctgtaccgcattaaatttgctgaacaccaccagactggcaacaagtggtgcatctacccgatgtacgacttcacccactgcatcagcgatgccctggaaggtattacgcactctctgtgtacgcttgagttccaggataaccgtcgtctgtacgactgggtactggacaacatcaccattcctgttcacccgcgccagtacgaattctcgcgcctgaatctggaatacactgtgatgtccaagcgtaagctgaacctgctggtgaccgacaagcacgttgaaggctgggatgacccgcgtatgccgaccatttccggtctgcgtcgtcgtggttacactgcggcttctattcgtgagttctgcaaacgcatcggcgtgaccaagcaggacaacaccattgagatggcgtcgctggaatcctgcatccgtgaagatctcaacgaaaatgcgccgcgcgcaatggcggttatcgatccggtgaaactggttatcgaaaactatcagggcgaaggcgaaatggttaccatgccgaaccatccgaacaaaccggaaatggggagccgtcaggtgccgtttagcggtgagatttggattgatcgctccgatttccgcgaagaagctaacaagcagtacaaacgtctggtgctgggtaaagaagtgcgtctgcgtaatgcttatgtgattaaggcagaacgcgtcgagaaagatgccgaaggtaatatcaccaccatcttctgtacttatgacgccgataccttaagcaaagatccggcagatggtcgtaaagtcaaaggtgttattcactgggtgagcgcggcacatgcgctgccggttgaaatccgtttgtatgaccgtctgttcagcgtgccgaacccaggtgctgcggatgatttcctgtcggtgattaacccggaatcgctggtgatcaaacagggctttgctgaaccgtcgctgaaagatgcggttgcgggtaaagcattccagtttgagcgtgaaggttacttctgcctcgatagccgccattctacggcggaaaaaccggtatttaaccgcaccgttgggctgcgtgatacctgggcgaaagtaggcgagtaattttaagtttcgctatgccggatggggcgtttacgtcgcatccggcaaggaacagacaaacagtttcaaacgctaaattgcctgatgcgctacgcttatcaggcctacatgatctctgcaatatattgagtttgcgtgcttttgtaggccggataaggcgttcacgccgcatccggcaagaaatatgcaaacaatccaaaacgccgcgttcagcggcgttttttctgcttttcttcgcgaat

SEQ ID NO: 170 - DNA, 5418 bp, Escherichia coli
  Strain O55:H7
  modified_base (2648)..(2651): a, c, g or t
  modified_base (3119)..(3122): a, c, g or t
ttcgcaatttatccataaaataaatttaaaaacacaaaacataattagataaaatgtaaccgctttcatcttgctggaatttcacgcttttattcttctgcaagcctttcaaccgcaaacttaagccttgtaacaaaaatcatcaaaatatgtgcggttgctcatgttcttacattctggttacagaaagagattgataattcgcgtcgcgaaaaatagtctgttcctgtagtcagcgagacttttctcaacgctacttttttaatttttatttttttcgctgttcacctgtggtgcagcaatttatacgtcaaagaggattaacccatgcgtacgtttagtggcaaacgtagtacgctggcgctggctatcgccggtgttacagcaatgtcgggctttatggcaatgccggaggctcgcgccgaaggattcattgacgattcaaccttaaccggcggtatctattactggcagcgtgaacgcgaccgtaaagatgttaccgacggcgataaatacaaaaccaacctttctcactccacctggaacgccaacctcgattttcagtccggttatgctgctgatatgttcggccttgatattgccgcgtttacggcgattgaaatggcggaaaacggcgacagctctcacccgaacgaaatcgcgttttcaaaaagtaataaagcctatgacgaagactggtccggcgataaaagcggtataagcctgtataaagcagcggccaaatttaaatacggtccggtgtggcgagggtaggttatattcagccaactggtcaaacgctgttagcgccgcactggagctttatgccgggtacttatcagggtgcggaggccggggcgaattttgattacggcgatgctggtgcgttgagtttctcctacatgtggaccaacgaatacaaagcaccgtggcatctggaaatggatgagttttatcagaacgataaaaccaccaaagttgattatctgcactcccttggggcgaaatacgacttcaaaaataacttcgtactggaagcggcatttggtcaggcggaagggtatatcgatcaatactttgccaaagccagctacaaatttgatatcgccggtagcccgttaaccaccagctaccagttctacggtacgcgcgataaagttgacgatcgcagcgtcaacgatctttatgacggcaccgcctggctgcaagcgttgacctttggttaccgggcggctgacgtagtggatttgcgcctcgaaggcacctgggttaaagctgacggtcagcagggatacttcctgcaacgtatgactccaacctacgcttcctcgaacggtcgcctggatatctggtgggataaccgttctgacttcaacgccaacggcgaaaaagcggtcttcttcggtgcgatgtatgacctgaaaaactggaatcttccaggcttcgccatcggcgcttcctacgtttacgcatgggatgctaaacctgcgacctggcagagcaatccggatgcgtactacgacaaaaaccggactattgaagagtctgcatacagcctggatgcggtctacaccattcaggacggtcgcgccaaaggcacgatgttcaaactgcacttcaccgaatacgacaaccactccgacatcccaagctggggcggcggttacggcaacatcttccaggatgagcgtgacgtaaaatttatggtaatcgcaccattcaccatcttctgatgcccgacgcggcaggttttgtgcctgccgcacgtttgaggaatttgctatgaaaaaactgattctcatcgccatgatggcatcggggctggtagcttgtgcgcaatcaaccgcgccacaggaagacagccgtctgaaagaggcatacagcgcctgtatcaacaccgcacaaggttcgccggaaaaaattgaagcctgccagagcgtgttaaacgtgctgaagaaaaagaaacaacatcagcagtttgccgaccaggaaagtgtccgcgtactggattatcagcagtgtctgcgtgcaacgcaaaccggaaatgatcaggcggtgaaagccgattgtgataaggtctggcaggaaattcgcagtaataacaaataagtgagagctgtaactctcgcttttcttatttcccttgcataaaaaagccaacccgcaggttggcttttctcgttcagactggcttatttgccttcgtgcgcgtgctcatcttcgcggcaatcgccttcggcgcagtgaccgtaaagatagagactgtggttagtcaggcgaatgccatgttttgcggcaatttcacgctgacgcgcttcgatggaatcatcactaaattcgataaccttgccgcagtcgaggcagatcaggtgatcgtggtgatgttgctgtgtcagttcaaatacggatttaccgccttcaaaattgtggcgggtgacgataccagcgtcgtcaaactggttcagtacgcgatataccgtagccagaccaatttcttcacccatatcgatcagacgtttgtataaatcttccgcactgacgtgatggttgtccggctcctgaagaacttccaggatttttaaacgaggaagcgttactttcaggccagctttctttagggcggtattgttatcagtcatgcggaatcnnnncctgttactaagcggttcacttcattagaagaagtgacagaatttgctcttgagataatgcggtatcattatagaattgccacgcctaaatgaaaaccacaagtccctggcaaatattgttaataaaaacgtggcacagcttacatttacaacggcaaggccacttgaacaccgggacattgtacaggtacaacggcaaaagttacaaatttgtagcaattattttgattggcattatctattaatacggcgtagacatgagtctacgccgcatcacatcaggcattgagaatttcgtcgagatgcaactcttcagaaatctgtttaacccatttttctacacgttcagcggtcagttccggctgacggtcttcgtcgatagccagaccgacaaagtggtcgtcatctgccagaccttttgatgcttcgaaatgatagcccgcagttggccagtgaccaacgatggtnnnnccgcgcggttcaatgatgtcgcggatggtgcccaatgcgtcgcagaaatattcggcgtaatcttcctggtcaccacaaccaaacagcgcaaccagtttgccattgaaatcaatctcttcgagagtcgggaagaagtcatcccagtcacactgcgcttcgccgtaataccaggttgggatgcccagcagcagaatgtcataagcttccagatcttctttgctgctttttgcaatgtcatggacatcggcaacgtctttaccaagctgtttttgaatcatttttgcgatattttcggtattaccggtgtcgctgccgaaaaagatgccagtgatagccatgagtgaaataacctcttgaaacttattgaaatgggggtggaaaattgcccacggataaaggcaatcatagcagaacaggcagtcttgcggaatcagcaaacgagcaggactgcacactgtgctacatgaaagtggaaatttaaacgatgccctgactacgcagcgccgccagttgctgcattaacatctcttcgatcagttcgctacggctcatattgcgcgattccgccagctcgttcagcgcctcgacagcttccgcgttcagcttcagttcgacacgcttaaggccacgtactttgtcgcgttttagttggttgcgtttattaatacgcagctgttcatcgcgcgaaagcggatttgttttcggtcgtcccggtcgacgctcgtgcgcgaacagatctaatgtcgtacggtccgtttgttctttggccatgatcttggtgacttcgggggaaacaatcagccaggcctctgcccggatggatagcgcgccataatacatcagcgcgatgagtcacgccaacgcccacgcgcggaaagcgacgcggacgctgggtttttaatcagttgcgttaatcattgagatagcgacggatagcgcgtaataccgcatccggtttttcagcatggacccagtgacccgcgcctgcaatcacatgcgcccgtgcctgtggaaattgtgccagtaaatcatcacggtactgctcgctaacatacggagaattaccaccagggataaacagggcagggtgatcccatgccgggattttctcccaacccacaatatgcggatactgatcccacaataccggcacgttaaagcgccactccccgtcaacaaaagatttcaacagaaactgaatcaccccttcttcattaagatgctggcgcattattgctgctgcttgctggcgagtttgtgcgtccgattcactgaccgcgttgatagccgagaaaatctcatcatgacggcgtacgtgatagtcgaccggtgcgatatcgatcgccaccagtttatcgatgcgatcgggggccagtgcagtaagtgccattaccgctttaccgcccatggagtgaccgataaatgttgctttgtcgatctgctgtgcatccagagtatcaacaagatcctgcgccatcgccgggtaattcattaccggatctctcggtgaaagaccgtggttacgcatatcaacctggatgatattgtgatcgtttaccagatcgcgagccagtacgccaaggttgtcgaggctgccaaacagaccatggacaagaacgatgggagaattattgtgctggttttgtgcagtttgcgcgcggatattcaatttcatggcaaagttctttttttcgcgttgtcgggttagggtattatgttgaccattgtgccacagggctgcaacaaataaggtttattccgagtttttctgcaagccaggcttgacgctatccgctgccgggatttattcatatactcctggcgacttgtattcagctaagacactgcactggattaagatgaaaacgattgaagttgatgatgaactctacagctatattgccagccacactaagcatatcggcgagagcgcatccgacattttacggcgtatgttgaaattttccgccgcatcacagcctgctgctccggtgacgaaagaggttcgcgttgcgtcacctgctatcgtcgaagcgaagccgatcaaaacgattaaagacaaggttcgcgcaatgcgtgaacttctgctttcggatgaatatgcagagcaaaagcgagcggtcaatcgctttatgctgctgttgtctacactatattctcttgacgcccaggcgtttgccgaagcaacggaatcgttgcacggtcgtacacgcgtttactttgcggcagatgaacaaacgctgctgaaaaatggtaatcagaccaagccgaaacatgtgccaggcacgccgtattg

SEQ ID NO: 171 - DNA, 17971 bp, Escherichia coli
  Strain O55:H7
  modified_base (1328)..(1328): a, c, g or t
  modified_base (4147)..(4147): a, c, g or t
  modified_base (4504)..(4504): a, c, g or t
  modified_base (4940)..(4943): a, c, g or t
  modified_base (6356)..(6359): a, c, g or t
  modified_base (6642)..(6642): a, c, g or t
  modified_base (7973)..(7973): a, c, g or t
  modified_base (11035)..(11038): a, c, g or t
  modified_base (12709)..(12709): a, c, g or t
  modified_base (12874)..(12874): a, c, g or t
  modified_base (14355)..(14356): a, c, g or t
  modified_base (14634)..(14635): a, c, g or t
  modified_base (15107)..(15107): a, c, g or t
  modified_base (15721)..(15721): a, c, g or t
  modified_base (16166)..(16166): a, c, g or t
  modified_base (16452)..(16452): a, c, g or t
  modified_base (16852)..(16852): a, c, g or t
  modified_base (17026)..(17027): a, c, g or t
  modified_base (17033)..(17034): a, c, g or t
  modified_base (17774)..(17775): a, c, g or t
caccaacaccaacaccggccgtaaatgcagcatgatcgaacacatcatgcagtcgatgcaattcccggcggaattgattgagaaggtttgcggaactatctaaaacgttgcagacaaaggacaaagcaatggcaatccacaatcgtgcaggccaacctgcacaacagagtgatttgattaacgtcgcccaactgacggcgcaatattatgtactgaaaccagaagcagggaatgcggagcacgcggtgaaattcggtacttccggtcaccgtggcagtgcagcgcgccacagctttaacgagccgcacattctggcgatcgctcaggcaattgctgaagaacgtgcgaaaaacggcatcactggcccttgctatgtgggtaaagatactcacgccctgtccgaacctgcatttatttccgttctggaagtgctggcagcgaacggcgtagatgttattgtgcaggaaaacaatggcttcaccccgacgcctgccgtttccaatgccatcctggttcacaataaaaaaggtggcccgctggcagacggtatcgttattacaccgtcccataacccgccggaagatggtggtatcaagtacaatccgccaaatggtggcccggctgataccaacgtcactaaagtggtggaagacagagccaacgcactgatggccgatggcctgaaaggcgtgaagcgtatctccctcgacgaagcgatggcatccggtcatgtgaaagagcaggatctggtgcagccgtttgtggaagggctggccgatatcgttgatatggcggcgattcagaaagcgggcctgacgcttggcgttgatccgctgggcggttccggtatcgaatactggaagcgtattggcgagtattacaacctcaacctgaccatcgttaacgatcaggtcgatcaaaccttccgctttatgcaccttgataaagacggcgcgatccgtatggactgctcctccgagtgtgcgatggcgggcctgctggcactgcgtgataagttcgatctggcgtttgctaacgacccggattatgaccgtcacggtatcgtcactccggcaggtttgatgaatccgaaccactacctggcggtggcaatcaactacctgttccagcatcgtccgcagtggggcaaagatgttgccgtcggtaaaacgctggtttcatctgcgatgatcgaccgtgtggtcaacgacttgggccgtaaactggtagaagtcccggtaggtttcaaatggtttgttgatggtctgttcgacggcagcttcggctttggcggcgaagagagcgcaggggcttccttcctgcgtttngacggcacgccgtggtccaccgacaaagacggcatcatcatgtgtctgctggcggcggaaatcaccgctgtcaccggtaagaacccgcaggaacactacaacgaactggcaaaacgctttggtgcgccgagctacaaccgtttgcaggcagctgcgacttccgcacaaaaagcggcgctgtctaagctgtctccggaaatggtgagcgccagcaccctggctggtgacccgatcaccgcgcgcctgactgctgctccgggcaacggtgcttctattggcggtctgaaagtgatgactgacaacggctggttcgccgcgcgtccgtcaggcacggaagacgcatataagatctactgcgaaagcttcctcggtgaagaacatcgcaagcagattgagaaagaagcggttgagattgttagcgaagttctgaaaaacgcgtaaacacattaaataagaaaaagggcggtcgcaagatcgcccttttttactttgcttttttaaccgtgtttatttttcagttcaaagcgtggtgataccagaccatacagtgtccaaccaaggaaggtcacgatggaaccgtacagcatggcttcttccccggatgagtacagcgcataaaagctgtacatcgcgccaacaaaagcaacaaagtttgcaactttcgcttttgaggggggcacattagcgaccttctgaataatgactaatgccgccattgacagaatatacggaatgatattggtcaccacggccaggttaaccagcacgttgaactgactgtttagcgacgggctaatcgtcatcagcgccaacccgctctggataatcacaatggtcaacattccctgcaccggtgcatccactttggttacatgggagaaaattttagggaagtagccttcatcagatgaagatttaaacacctgggcaatggtgaactgccagccaagcagcgaaccgcagcaggacatcaccatcagcgccataatgactttacccacttccggcgtgaacatctgcgcgaaggccagaccaaatggtgccgttgaatttgccagctccatatttggcacaatcccggcaatcacgttggtggagacgatataaatcaccgccgcacctaacgtaccgccgagtaccgcgattggcacattacgttccgggttttccactacatcagtatttgcacacgcagactccagaccaagaaaagcccacagcgtcatagcgatggaagaacctaccgcactgaagaacggtgcatgatgcggattccaggaatcaacgtacagcgtcgggctaaaccagaaccagccaataatgcacagaccgacgaccggaataatgactccccacacagtaatgctactgatttgcccggtaatgcgcgcaccaccaaagttagccacggtacaaatccacagcaccccgatggtcgcaagaccaatctgcactggcgacaaactcgcgccgagcagttcggtgccgtaaccaaccgccgaaatagcaatcgcgacgttagcaatcagcagtgagacgccgtaggtatagttcgccataaagttaccggatttaccgaaagcatactcggcataaccgcccataccgcctgatttacggctgaacataccgcattttgcgaatgcccatgccagtgccattgagcctacggctgtcaccagccaggagataattgagattgtcccaacttcggcaagctttgtcggcagcatgatgataccggagcccatcatgttgaccatcgtcagtatggttaactgaacgacgcccattttgttcgatttagcctgactcataatttttcccctttcagcagggtgctttgcgcatcacgaggcttgatgacatagcaccaaacttgcttacgaccatcatgttcttcgatatagacaccctgcagctccggtgcaaaacctggcagcaggttgatcccttcttccagagcgctgaagtaacgcaaaacagcaccaccccagatttcacccggaacaacacacagcacacccggaggataaggaagcgcaccttcggcagcgatacggccttctgcatccggcagacgaaccagctccacttcaccgcgtaaataggcgtagttagcttcttgcggattcatgctgacgcgtgggaagtgttccttacggaacatctctttttgcagttgtttcacgttgtggcgggcatacaaatcatgcatttcctggcacaactgacgaagggtataaccggcgtagcgctcttcatgctgtttgtagatggaaggtagcacttccgccagcggcgcatcagattccagcagtttttcgaagcgtaccagcagggcaacaagttgctgaagtttggccatatcttctgccggagtcagcaggaagaggatggagttaagatcgcatttttccggcactacgccattttcgcgcaggaagttagcaagaatcgtcgcgggtacaccgaacgcttcatattcgccgttacgtgcatcaatacctggggttgtcagcaacagtttgcacggatcaacaaagtattgattctctgcataaccttcaaaagaatgccagtgctcacctggtacaaactggaagaagcgcagatcaaccgcaatttgcgctgtttcatacgactgccagggtttaccatccaccagttcaggtatgaacggacgaatatgctgacagttatcgaggatcagtttgcgggcattaatgccatttaccacacaatccatccacatattacgaccgctgacaccttcatgcattttggcgttgatatccagtgcggcaaacagcggatanaacgggctggtggaggcatgcatcataaaggcgttgttcatgcgtttgtgcggtacataacgctgttgccctttgatgtggctgtcttttttatggatttgtgaagtttgagaaaaaccagcctgctgtttatgtacggattgcgtaaccagaatacccggatcgttctcattaagatccagcaacagcggcgaacagtcagccatcatcggaataaactgttcatagccgacccatgcggaatcaaacaggatgtagtcacacagatgaccaattttatccaccacctggcgggcgttataaatcgtaccgtcgtaggtgcctagctgaatcacagcgaggcggaacggacgcgcntcttttgcccgttgcggtgcaacttctgtaatcagttcacgcagataactttcttcgaagcagtgtgcatcaataccaccgataaaaccatacgggttacgtgctgtttccagataaaccggtgttgcaccagcctgtagcaaggccccgtggtggttagacttatggttattgcggtcaaatagcaccagatcacccggtgtcagcagggcgtttaaaaccactttgttagaagatgaagtgccatttaaaacgaagtaggttttatcggcattaaacacttttgctgcatgttgctgtgcaatgcatggcgcgccttcgtgaatcagcagatcgcccatcgctacgtcggcgttgcacaagtcggcacggaacagcgcctcaccaaagtattccacaaactgattccccgccggatggcgacggaaaaattcgnnnncctgatgaccggggcagtcaaatgcgctgttgccctgattgacataatcgaccagtgcgcgaaagaaaggtgggcgcagttgagtttcataatggctggcagcggtttctaactgacgaccataaaattctttgcgtgcttctccatgttcgaagacaccagaaatacgtgaaagatattctgctggtatacgttcttcattttccgttgcaataaaaacaggaatgtcatagccagtagcgtctatttcatcgagttttccacgttcaacatcactgactgataaaataatggcggcaacgtcaatataattactttcgtctatattcacgcatgcacgatgagtggaaaaacaatccgggcaagaacgactaacggcaatttttaattctgacattttgttcatctctttatttcaggtaatagcaggtcctcaatttctcaaaggagaaatcgatcacgccggaaaaaaagcaaagctccaccgctgataaataaatcagtagtttgctttttgcagatgcaataacccagaccagcccggtaactggctatactcgtcatacttcaagttgcatatgctgcgactcgaattatgtagagtttaaaagggttagcagtatatgagcaccgagggatacaggtattaacctgtaatgcttaaagtcagggagacctgtacgctggggtgccctttagtcagaagactagcgggcattaaagaaatgaaagtcaaaactattacgatgggcaaacttcatgatatgggttgtccgccttatatgaggcattaagcggttattattttccatttacctttacctcttgctgtgtcagttgaaggtagagttattctatccatgaaatggctataatctgtgaagaagatcaacaaaaaacgatcataccccagataataaatcattaattatgaatagcgccatactagatgctgttttgttacttaaatgttgtaatttcgtgttttatatttgcgttaagaaattaaacctgccaaataataatatttggcgcaggtttaataataaattaatcactatttaggcgaatttattgaataaaaattcaaagcataaaccgataaccaataccggtttcagtaatgaaatggctggggcgagcgggatcctgttccagtttttgtcgcagatgtcccatataaatacgcaaataatgactgtgttcgaccgcgtttggcccccacacctggttaaggagttggcgctgggtgagcacttttccggcgttgttgagcagcactgccagcaggcgaaactcaatcggggtgagatgcacctcttcctcaccccggtgaatcacgcgggcggctaaatcgacggtaacatcggaaaatttcaccagcggatcgggcgcggcggtggcggagtggcnnnntaaagcgacgcgcagacgggcctgcaattcgccaatgccaaacggcttacttagataatcatccgctccggcatccagcgcggcgattttgtcgctctcttcgctgcgtgcggaaagcacaatcaccggcaccgcgctccactggcgcaggtcgcggataaactcaatcccatcaccatcgggcaggccgagatcgagaataatcaaatctggcttacgggtagccgcttccagcaagccgcgttgcagcgtttcggcctcatagacgcgcatcccgtcgccntccagcgccgtgcgcagaaagcgacgaatagcctgttcatcttcaacaatcagaacgtttgtcacatatcctcatgaaattcttcaagttcaggggcagtttgctggggaagtgtaacacgaaaacaggcaccaccttccggccggttgaacgcggtaatagtgcccccgtgtacatccactatcgcccgacaaattgccagtccaagccctacccccggtactgccgactctttattcccgcgagcaaacttatcaaatatcgtctgctcctggcctggcggaagaccggggccgttatcccagacatccagttgtagattttcgccctcaacgtgggcatcgataccaatttcggcctgcgcacccgcatatttcaccgcgttctccagcagattaatcagcacccgttcaaagagtggcccgtcaacgtggattaaggtcagcggttctggcagagaaagattgatgggcgacgataaacccggttccagcatttgcagcgcgctgccgactacttcttccagcgttaaccactctttcttcaaattaaagccgccggactgaattcgcgccatatccagtagattattcaccagtcgggtagtgttcagcacatgctgacgaatctcgctggcctggcgggcgtggggtgatccttcgcttgccagatcgagcgttaagatttctgcctgaccaaacagcaccgtaagcggagtgcgtaaatcatgcgaaagcgccgccagcagggcgttgcggatctgttcacgttcgcttgccatccgcgcctgttcttcgctggcggtcagcgtcagccgctcaagcgcattggcgactaacagcgtaaacgtctccagcaggcgctgctgttccgggatcatcaactgacgcagattccccggttccaccaccaccagcccgtaggttttctcaccgctttttaacggcaaaatctggtacggcacgccgggtaacgtgtcggtgcccgcacccgcaggcaggcctttatcaaaactccactgcgcgatggcatcgtcccacggcgtcattccttgcggatgtgttaacggctgcaatttaccgttgtcatcgggcaacaacacctgactgcgggcatgaaacgtggaggcaataaattgttcgctggtggcggcgatgtcctgcggactgcggcccaccgccagagctttcgacatttcatataagtgccgtgtgcgttgctcgcggtaacgggctacccgcgcctgataacgcacacccgcagtaaggttcccgatcaccagcccgacggttaacatcaccgcgaaggtcagcagatattgcacatcaganacggcgagcgtgccgcgtggggcgataaaaaagagatcgaaactcaccacattaatgacggtagcaaccaccgaaggccagcgtccataaaatagcgccaccaccaccacgccaagtagatacagcatcaccaggttggcggcatcaaacgccatcagccactgcatggcaattaaggtgataacggcgcataacgcggcggcaaccacgcatccctgaatctgtacccgccacttgtctttaaaagagcggctatccggcgcgttgttaatcgtgcgggcgggtggttcatcaagcgcgaccagcacctgatcgagatcgggggcgatgcgcgccagtcggtcagcaaacgtttcccgacgccaccagcggcgcgaggctgggcgaccgagaataatcttgccgagattatgttcacgggcataacgcactaccgctttctcttccgctggatcagaaagtgttgccgtctccgcgcccagctcctgcgccagacgtaaggcgctgagaattgcccgacgttttttctccggtaagcgatgcagggcaggggtttcaacatacaccgcgtgccagacgctccccagccgtgacgccagccgcgccgccgcgcggaccagtttttcgctgccggtgttatggccgatgcataaaaggatcgcgtcgcgcgtgtgccagactttctcttcgccaggatgcccccgccaggcgcgcatttgctcatcaacgcgatcggcagtacggcgcagtgccagttcgcgcagggcgatcagattgcctttgcggaaaaaatgttcaatggcgcgctccgcctgcccggcaatatagactttgccttctttcagccgctggcgcagatcgtccgggggcaagtccaccagcaccacgtcgtcggcggcatcgaaaaaaggatcgggcacggtttcccgtacctgaattccggtgacgccgctgaccacatcattcagactttccagatgctgaacgttgacggttgtgaaaacatcaatgccagcttccagcagttcttcgatatcctgccagcgtttaggatgacgagaacctggcgcattactgtgcgccagttcgtccattaagatcagcgccggacggcgggcgagggcggcatcgagatcaaactcgctgatgtgccgcccacggtacgccaggcgttttggcggcagaacagccagcccttccagcatggcggcggtatctttccgcccgtgggtttctaccacgccaaccacaatatccagcccttgcgcccgcagtcgctgggcttctgccagcatcgcccaggtcttcccgacgcctgcgcaggcaccgaagaaaactttcagcttcccccgatgcggcgcggcagtttgttccagcagacgatcggggtcgggacgtaagggttcgttattcatcaagtttatccagcgccagattgagttcgacaatgttgacgaccggctggccgatatatttcaccagtggttgttggctgtattttgcgatcagttgcgtgagctgttcaacgctgagattacgcgctttcgctacgcgtgggatctgccaggccgccgcttgcggggtgatgttattgtccagcccgcttgccgacgccgtcaccagttcaaccggaacgctcgtgctggcattcgggttagcggcccgtaatgcagcaacgcgtgcggctattagtttatccagctcagggttactgaccgccagattgctcccgccagaagcctgtggattataaggcatttctgccgttgccgacgggcgaccatgaaaatagccgttgtcggtaaaattctgcccgattaatgccgaaccccgcaccgtatcaccttcacggatcaacgaaccgttggcctgccagggaaaccaccattgccccagcgcggtggtcagcagcgggtaaacaccgccagtaatcaataacagaaagataaatgtcgataatgccggacgtaatccacgcatggtaaacctcacaccagaccgcaaacggtcagtagtaaatcaatgactttgataccaataaacggcaccagcagcccacccagaccgtaaatccataagttacggcgcaacatggcagaagcggtaagcggtttataactcacgccttttaacgccaggggaatcaaaaagacgataatcaaggcgttgaaaatgaccgcactgagaatggcggagtcgggcgaatgcaggcgcatgatgttcagcgcatttaactgtggatacgttaccgcgaatgccgccggaataatggcgaagtatttcgccacatcgttggcaatgctgaaggtggtcagcgagccacgggtcatcagcatctgtttgccaatatgtaccacctcgatcaacttggtcgggttagagtcgagatccaccatattgcccgcttctttcgccgcctgagtaccggagttcatcgccaccgcgacatctgcctgcgccagcgccggagcatcgttggtgccgtcgccggtcattgctaccaaacggccttccgcctgatactgacggatcaatgccagcttggcctccggtgtcgcttcggcgagaaaatcatcgacgcccgcttccgcagctatcgcggcggcagtcagacggttatcgccggtaatcatcaccgttttaatacccattttgcgcagttgggcgaagcgttctttaatgccgcctttgacgatatctttcaacgcaataacgcccagcacacgagaaccttctactactaccagcggtgtggccccctgacgcgcaacctgatcgactttttgatcaacatcggcagggaagtgaccaccgttagcctcaacatggcggcgaatggcatcgacagaacctttacggatcatgcggttgtcgatattgatcccgctcatccggctttgcgcagtaaacggtacaaaggtggcatggagcgactgcacatcgcgctcgcgcaggttaaaacgctgcttggcgaggatcacaatactgcggccttccggcgtttcatcagccagcgaagccagttgtgcggcgtcagccagcgttttttcatccacgccctnnnnagggataaactccgatgcctgacggttaccgagtgtgatggtgccggttttatccagcagcagaacgtcaacgtcacctgccgcttcaactgcacgtccgctggtggcaaccacattcgcgcccagcatccgactcatcccggcgacgccgatcgctgacaacaggccgccaatagtggttgggatcagacagaccagcagcgccaccagtaccgttacgctgactgcattaccgccccacgcggaaaacggccacagcgtggcggttgccagtaaaaagacgatagtcagggcaatcagcaggatggtcagggcaatctcgttcggcgttttgcgtcgctgtgcgccttccaccatcgcgatcatccgatccagaaatgtctcgccggggttaacgctacactcaatcaccagccagtcagaaagaatacgcgtgccgccggtgacggaggcaaaatcgccgccggattcacggatcaccggtgccgattccccggtgatggcgctttcatcgaccgatgcgccgccttcaataacttcaccatcgcaggggataatatcgcctgcttctaccagtacgatatcgcctttacgcagttgatcggcgggaactttgtccgccgcagcgccatatttcggctcacgcagcttgcgggcaaaggccgtttttttcacccctttcaggctgttggcctgcgctttactgcggccttctgccagcgcctcggcgaaattagcgaacagtacggtgacccacagccagccgctaatggccacgctaaacagcgcattgccaggcatcgcgccgcttgccatcgcgatgctaatacaggtggtcagcagactgccgatccagacgataaacatcaccggattgcgccattgcgcctgcgggtttaattttttcaccgcttctttcagcgcctgaacgacaagtgttggttcgaatagcgccagttgtttacgactcatattcagtgctcactcaatatcatcaggagagatattccgccaccggaccaagcgccagggcagggataaaggtcagtgcgccaaccagcaacacggtgccgattaacaggccaacaaacagcgggccgtgcgttggcagcgtgccggagctggcgggttggctctttttactcaccagcgaaccggcaattgccatcaccgggataatcaccccgaagcgaccgacaaacatgcagaacgccagtaaacagttccagaacggagagttggcgcttaatccggcaaaggcgctgccgttgttgttagcggcggatgacacggcgtacagcacttcgctaaaaccatgcgggccagggttgagcatggcgctacgtccggcgtcggtcatcattgccagcgccgcgcccatcagcaccagcgtcggggtgaccagaatcgccagtgcagtcagtttcatctcacgtacgtcgatttttttacccagatattccggtgtacgaccaatcatcagcccggcaataaacaccgccagcaggacaaacagcatcatgccgtaaagaccagaaccgacaccgccgaataccacttcaccaatttgcatcagccacatcggcaccatgccaccgagagcggtaaacgaatcatgcattgcaatcaccgcgccacaggacgccgccgtagtcacgaccgcaaacaggntactgaccagcacgccgaaacggctctctttaccttccatattgatgctgctgtctgcgccgagcgccagcagatgaggattaccctgaacttctgcccacatcaccacgcctacgcagatgacaaaaatcactgacatcgcccacagcaacatgcgcccctganggcgatcgcccgtcacttcaccaaaggcaaagcacagcgctgttgggatcaagaagatcgccagcatctgcacgaagttggtcagtgcggttgggttttcaaacggatgcgacgagttggcattaaagaaaccaccgccgttagtgccgagcatcttgatcgcttcctgagaagccaccggacccattggtaacagctgttgcgctccttcaacggtattcactgcctgatagggcagaaagttttgcagcgcaccttgttgaataaaaaacagtgcgatcaccaacgccacagggacgagcacccataacgtgatgcgtagcagatcgacccaggcattcccgagtgtgctcatgctctggcgggtaaatgcacgaatgagggcaaaaatcaccgcaatcccgctggcggcagaaagaaagttttgcaccgttaagcccgccatctggctgaaatagctcaacgtggtttcaccgctataagattgccagttggtattcgtgacaaagctgacggcggtattcagcgccagatcccacgacagccccggcaactgctgtggattaagcggcagatagtgctgaccgagcaacataaaaaacagcaccgccagccccagcatgttcaggccgagaatggcacagagatactgcttccagttcatctcatggttagagacgccaagcgcgctaaagagtacgcgttcaacgcccgtcgtaccaggaagaggaatatcattaatcagccacgccagcccgctacctaagggacgcgccagcaccattaataccagtaaaaacgtggcaatcagtaagaacccttgcgcagccatcagaatgcctccgcatggatcagggcataaaccaaataacccagtaataaaaacaccagcaacacgccggctatcacgcctgcactcacagtgcacctccagtggcctaaaagtgataccggaagggtagaattctggctgcaaagatttcgcaaaaatctgcggacggggtgtaaaaaaagtataaaaatggcaaaagccatgatttaactaatgtttagtattaatttaacttttgtgtaacttaattacaggatgaatgtaaataaaccatcaataagcaaaaataagtggtcggatgagtagtaaaattacacaaaaggcggtactattttcatcagataaacaaattcatttttccggtgctattcaccgggtagatacaaaagggggagaaaagtatggaactctacagagaatatcctgcatggcttatctttttacgccgtacttatgcggttgcagcgggcgttctggcgctgcctttcatgcttttctggaaagaccgcgcccgcttttacagctacctgcatcgcgtctggtcgaaaaccagcgataaaccggtttggatggatcaggccgaaaaggcaaccggtgatttttactgattgctgagttttgaatacattgaaaaccgccagcggaaacnntggcgtttttttgtatcaggaagatgttcagaggaatatttagacaccgttataccaatcgaaacatatattcatgaaatatatataaatattttcctaattgtttctatctgacggatatctcacttaaggctttcttataaatctgtagggttttgcctggaagcagacaaataacccgataaaacaaggatgagcagatgagcggaaaaccggcggcgcgtcagggcgacatgacgcagtatggcggtagcattgtccagggttcagccggggtnngcattggtgcccccaccggcgtggcctgttcggtgtgccccggcggagtgacgtccggccatccggtcaatccgctgctcggtgcaaaggtccttcccggtgaaaccgacatcgccctgcccgccccgctgccgttcatcctctcccgcacctacagcagttaccggacaaaaacgcccgcgccggtggggagcctcggccccggctggaaaatgcctgcggatatccgcttacagctgcgcgataacacactgatactcagtgataacggcggcagaagcctgtattttgagcacctgtttcccggtgaggacggttacagccgcagcgagtcactctggctggtgcgcggcggcgtggcgaaactggatgaaggtcaccggctggccgcactctggcaggcgctgccggaagaactccgcttaagtccgcatcgttatctggcgacaaacagtccgcaggggccgtggtngctgctcggctggtgtgagcgggtgccggaagcggatgaggtgctgcctgcgccgctgccgccgtaccgggtactgaccgggctggtggaccgcttcgggcgcacacagacgttccaccgcgaagccgccggtgaattcagcggcgaaatcaccggcgtgacggatggtgccgggcgtcacttccggctggtactgaccacgcaggcgcagcgggcagaagaagcccggcagcaggccatttccggcgggacggaaccgtccgcttttcctgataccctgtcgggttacaccgaatatggccgggacaacggcatccgtctgtctgccgtgtggctgacgcacgacccggaatacccggagaatttacctgccgcgccgctggtgcgctatggctggacgccgcgcggcgaactggcggtggtgtatgaccgtagtggcaaacaggtgcgcagctttacttacgatgataaataccggggccggatggtggcgcaccgtcacacgggccggccggaaatccgttaccgttacgacagcgacgggcgggtgacagaacagctaaacccggcaggcttaagctacacgtatcagtatgagaaagaccgcatcaccntcaccgacagcctgaaccgccgtgaagtcctgcacacgcagggtgaaggcgggctgaagcgggtggtgaaaaaggaacacgcggacggcagcgtcacgcagagtcagtttgacgcggtgggcaggctcagggcacagacggatgccgcaggcaggacaacagaatacagcccggatgtggtgacgggcctcatcacgcgcatcaccacgccggatggcagggcatcggcgttttactataaccaccacagccagttaacgtcagccaccgggcctgacgggctggaaatacgccgggaatatgatgaatggggccgtctgattcaggaaactgcccctgacggcgatatcacccgctaccgttatgataatccacacagtgacttaccctgcgcaacggaagatgccaccggcagccggaaaaccatgacgtggagccgttacgntcagttgctgagcttcaccgactgttccggttatgtaacccgttatgaccatgaccgcttcgggcagatgacggcggtgcaccgcgaggaagggctgagtcagtaccgcgcatacgacagccgtggacagttaattgccgtgaaagacacgcagggccatgaaacgcggtatgaatacaacgccgccggtgacctgaccaccgtcattgccccggacggcagcagaaacgggacacagtacgatgcgtggggaaaagccatctgtaccacgcagggcggtctgacncgcagtatggaatacgatgctgccggacgggtcatccgcctgaccagtgaaaacggcagccacaccaccttccgttacgatgtactcgaccggctgatacaggaaaccggctttgacggccgcacacagcgttatcaccacggcctgaccggcaaacttatccgcagcgaggatgaggggctggtcacccactggcactatgacgaagcagaccgcctcacgcaccgcaccgtgaagggtgaaaccgcagagcgctggcagtatgacgaacgcggctggctgacagacatcagccatatcagcgaagggcaccgggtgacggtgcattacgggtatgatgagaaaggccggctgaccggtgagcgtcagacggtgcatcacccgcagacggaagcactgntctggcagcatgagaccagacacgcttacaacgcgcaggggctggcgaaccgctgtataccggacagcctgcccgccgtggaatggctgacctatggcagcggctggctggcaggcatgaagctcggcgacacaccgctggtggatttcacccgcgaccgcctgcaccggaaanngctgcnnagattcggccgttatgaactcaccaccgcttatacccctgccgggcagttacagagccagcacctgaacagcctgcagtatgaccgcgattacacctggaacgacaacggcgaactcatccgcatcagcagcccgcgccagacccggagttacagctacagcgactccggcaggctgaccggcgttcacaccaccgcagcgaatctggatatccgcatcccgtatgccacggacccggcaggtaaccgcctgcccgacccggagctgcacccggacagcaccctcagcatgtggccggataaccgtatcgcccgtgacgcgcactatctttaccggtatgaccgtcacggcagactgacagagaaaaccgacctcatcccggaaggggttatccgcacggatgatgagcgcacccaccggtaccattacgacagtcagcaccggctggtgcactacacgcggacacaatatgcagagccgctggtcgaaagccgctatctttacgacccgctgggccgcagggtggcaaaacgggtgtggcgacgtgaacgggacctgacgggctggatgtcgctgtcacggaaaccgcaagtgacctggtacggctgggacggcgaccggctgaccacgatacagaacgacaggagccgcatccagacgatttatcagccggggagcttcacgccactcatcagggtcgaaactgccaccggtgagctggcgaaaacgcagcgccgcannctggcggatgcgcttcagcagtccggcggcgaagacggtggcagtgtggtgttcccgccggtgctggtgcagatgctcgaccggctggaaagtgaaatcctggctgaccgggtgagtgaggaaagccgccgctggctggcatcgtgcggcctgactgtggcgcagatgcaaagccagatggacccggtatacacgc

SEQ ID NO: 172 - DNA, 1937 bp, Escherichia coli
  Strain O55:H7
  modified_base (1936)..(1936): a, c, g or t
aaaaatccacctgtaccactgcgaccatcgcggcctgccgctggcgcttatcagcacggaaggggctacagaatggtgcgcagaatacgatgaatggggcaacctgctgaatgaagagaactcgcaccagctgcagcagctcatccgcctgccgggtcagcagtatgatgaggagtccggcctgtattacaaccgccaccgctattatgacccgctgcaggggaggtatatcactcaggatccgattggactgaaggggggatggaatttttatcagtatccgttgaatccggttcagtatatagattcaatgggactggcatcaaaatatggacacttaaataatggcggatatggagcgagacccaacaaaccgcctacgcccgatccaagtaaatttccagacatagcgaaacaattaagactgccatatcctattgaccaggccagtagtgcgcctaatgttttcaaaacattcttcagagcattaagcccttacgactacacactgtattgcaggaagtgggtaaaaccaaatctgacttgtacgccacaggatgatccccagtatccagggatggatacaaagacagcaagtgattacctgccacagacaaattggccaacaactcaattaccaccaggatatacttgtgcagaaccctatttattccctgacattaataaacccgatgggccagcaacagcagggatagatgatttgggtgaaattttagctaaaatgaaacagagaacatcgagaggaataagaaaatgaaaagagttttgttttttttgctgatgatatttgttagttttggtgttatagctgattgcgaaatacaagctaaagatcatgattgttttactattttcgctaagggtactattttttccgcgtttcctgtcttaaataataaagccatgtggagatggtatcagaatgaggacatcggtgagtattattggcaaacagaactgggtacatgtaaaaataataaattcacaccaagcggggcgagactcttaattcgtgtcgggtcactacgccttaatgaaaatcatgccatcaaaggaacgttgcaggagttgataaatacagcagaaaaaacggcgtttctcggcgatcggtttagaagttatataagagcgggtatctatcaaaaaaagagcagtgatccagctcagttgttggcagtccttgataattcaatcatggttaaatattttaaagatgagaagccaacttatgctcgaatgacagcacatctcccgaacaaagatgagtcttacgaatgtttaacaaaaatacagcatgaactgcttcgtagtgaagaaaaataaaacatcttcctgagaaaataaattaaccattcggaaaaacatgttcttaatggatatccaggtacaccagaaggtcgatttggaaaaatggattccgatggtaagaatatcatatattctgaatgtaatgttttacccacaacttttgagattcgataggtgtagaacatgagaaactcactaatattacttattatgatattgtttacaatatcacactcagtatttggaaaagaaaatccagtggaaatttaagtaaatagtcgtgaaatggctttggaattatcatatgtttacattaaatatgtatacgggaaagaaaaagcagaatttcagaaaccatatagtattacagatgacaataattgttggaaaatcgagggaaaacaaccgaagaattcaggaggaaattttacaatactaatagcgaaaaaagatgggcaagtgttgaatgtaatacacacaaaataatccactgtacagtcgattcaaatattttaccaaggtgtgtttcgtaacaattttgtgtacaatatgactctacatatcgacgaaaaaaacacttgatttgacaggaatacattcaaaaaant

SEQ ID NO: 173 - DNA, 4263 bp, Escherichia coli
  Strain O55:H7
  modified_base (415)..(415): a, c, g or t
  modified_base (3705)..(3705): a, c, g or t
tttcatttcaggagcgattttcatctgttacttgaagtatctgtgagattaagtgactccccctaacgtcgtactaaatagtaattactggccataccgggagcagtattcggcgctccccacatgcagcagaataaccgcatcagcgaagatgtatttttactatcacaatgtgtacggacggtttatggaaaagaatgaacattagatacgcgatgcggcggcaggttacacggttatcactacgatagccaatactggctggtgcattaccgccgtgaacaataggacgccgtactgctggaaatttcttacctttataactccccgcgccgccgtatcgggaaacgggaagcaatcaagatgaggctgatataatgtgcggaatgcctgagtatttttagaataggggggnaatatgtttgatagaatatatcttggtgatcgagcaataaaaaaattgaatttgatttatggagtaaacaaattagaattcaggttaatttaatctcaaggatagcctatggtacaacagaatggaatttttatgataatgaagacttagaagatggttatttggtattttcaggtgttagtttcttcaatataactcctaatggctctattccaaatgattatataatttcaataattacagataatgtcaatgttgaatattttgaatcaactatagtttcagttggacaaattccaaatacaaattcttgagacattgataatattggtgagtgtcaaattttcatcaggtgtaaacacagctggattgagaataaattcaaagaaaaaataattgaataaccatgttatgtatagacattttagacagggaaagatcattagaagttcactttttgtactaaataattcgcattttatgtttaaaaattgagatactcctcattacctgaagctgttttttattgcttatatatgatcaaatactccttacataattaaggagaacaaaatggaacttaaaaaattgatggaacatatttctattatccccgattacagacaagcctggaaagtggaacataaattatcggatattctactgttgattatttgtgccgttatttctggtgcagaaggctgggaagatatagaggattttggggaaacacatctcgattttttgaagcaatatggtgattttgaaaatggtattcctgttcacgataccattgccagagttgtatcctgtatcagtcctgcaaaatttcacgagtgctttattaactggatgcgtgactgccattcttcagatgataaagacgtcattgcaattgatggaaaaacgctccggcactcttatgacaagagtcgccgcaggagagcgattcatgtcattagtgcgttctcaacaatgcacagtctggtcatcggacagatcaagacggatgagaaatctaatgagattacagctatcccagaacttcttaacatgctggatattaaaggaaaaatcatcacaactgatgcgatgggttgccagaaagatattgcagagaagatacaaaaacagggaggtgattatttattcgcggtaaaaggaaaccaggggcggctaaataaagcctttgaggaaaaatttccgctgaaagaattaaataatccagagcatgacagttacgcaatgagtgaaaagagtcacggcagagaagaaatccgtcttcatattgtttgcgatgtccctgatgaacttattgatttcacgtttgaatggaaagggctgaagaaattatgcgtggcagtctcctttcggtccataatagcagaacaaaagaaagagccagaaatgacggtcagatattatatcagttctgctgatttaaccgcagagaagttcgccacagcaatccgaaaccactggcacgtggagaataagctgcactggcgtctggacgtggtaatgaatgaagacgaccgcaagataagaagaggaaatgcagcagaattattttcagggatacggcacattgctattaatattttgacgaatgataaggtattcaaggcagggttaagacgtaagatgcgaaaagcagccatggacagaaactatctggcgtcagtccttgcggggagcgggctttcgtaatcttgccctggtattcgctgctttgatgatgatgtaaaatgattgtttttgaactggatataacagcttggtagggaagaaagcataaccccacaaaattcatttaccatcgtctacacttactcctgtaaaccgttcaggagcagtaatgaatcagcaacgatttgatgacagcactctaatccgtatcttcgcgcttcatgagttacatcgactgaaagaacatggcttaacgcgcggggcgcttctcgattatcacagccgctataaactcgtatttctggctcattcccagccggaataccgcaaacttggcccgttcgtggctgatattcaccagtggcaaaatctggatgatttttacaaccagtaccgccaacgcgtaattgttttgctttctcatcccgccaacccgcgcgatcacaccaacgttttgatgcacgttcagggttattttcgcccgcatattgagtccacagaacgccagcagctggctgcgcttatcgacagttatcgccgtggcgagcaaccgcttcttgcgccgctgatgcgtatcaaacactatatggcgctttatccttacgcctggctttcagggcagcgttatttcgaactttggccgcgtgtgattaacttgcgccattcaggagttttatgactacccatctggtctggtttcgccaggatttacgtctgcatgataatctcgcgctggctgccgcctgccgcaattcatctgcacgcgtgctggcgttgtatatcgctacaccacgccagtgggcggcgcataatatgtcgccgcgtcaggctgaacttatcaatgctcaactgaacgggctacaaatcgcgctggcggaaaaaggcattcctttattgttccgtgaagtggatgactttgccgccagcgtcgaaatagttaaacaggtgtgcgcggaaaacagcgttactcatcttttttataactatcagtatgaggtgaatgagcgggcgcgggatgtgcaggttgagagaactctgcgtaacgtggtgtgtgaaggatttgatgacagcgtgatccttccgcctggcgcggtgatgaccggcaatcatgagatgtacaaagtctttacgccttttaagaatgcctggctgaaacggctgcgggaagggatgccggagtgcgtcgctgcaccaaaagttcgtagtagcggatcgataaagcccgcgccatccattacgctgaattatcctcgtcagtctttcgatactgcgcatttcccggtggaagaaaaagcggcgattgcgcaattacgccagttttgccagaacggtgccggagaatatgagcaacaacgagattttccggcagtggaaggcaccagtcgtttgtccgccagcctggcaacgggcgggttatcgcctcgccagtgtttgcatcgcttgttggcggaacagccgcaggcgctggacggtggggccggtagtgtctggcttaatgagctgatctggcgcgagttctaccgtcatctgatgacgtattacccctcgttgtgtaaacattgtccgtttattgcctggacggatcgtgtgcagtggcagancaatcccgcacatttacaggcctggcaggaaggcaaaacgggatacccgattgtcgatgctgccatgcgtcagcttaacagcactggctggatgcataacaggctacggatgattacagccagttttctggtgaaagatttgttgatcgactggcgcgaaggcgagcgatatttcatgtcgcagctgattgatggtgatttggcagccaacaacggtggctggcagtgggcggcttctacgggtactgatgcagcgccgtattttcgtattttcaacccgacaacccagggcgagaaatttgaccgcgaaggcgagtttatccgccagtggctaccggaactgcgcaatgtaccggggaaatcggtgcatgagccgtggaagtgggctgagaaagcaggtgtgaagctggattatccgcaaccgatagtcgagcacaaagaggcgagagtacaaacgttggcagcgtatgaggcggcgcggaaggggaaataacagacgcgtcaggcaatcgagcccagatgccggatgcggcgtgaacgccttatccagcctacaaa

SEQ ID NO: 174 - DNA, 7920 bp, Escherichia coli
  Strain O55:H7
  modified_base (298)..(298): a, c, g or t
  modified_base (420)..(420): a, c, g or t
  modified_base (824)..(824): a, c, g or t
  modified_base (2381)..(2381): a, c, g or t
  modified_base (3321)..(3321): a, c, g or t
  modified_base (5242)..(5242): a, c, g or t
tcaataaattgcaggaaatacgtaggcctgataagacgcgtcaagcgtcgcatcaggcatcggtgctggcctattaagactccagcgccagcgcgcggtttctgaatttcagcgcctgatacagccaaatcatcagtaccactcctacacacgccagtgcgccccaggtaatttgatcaaatacttcaatatatgcattgatggagtagttgatcgccccggaagcatcaaacgaagcctgcgatgtctgatcggcaatcacgcccgccagatagttcgcaatcgcgccggaaagcancatataaatgccggttaatacgccggtcacaccggggatttcaatgcgcgtaatctgcgacatagcaaccgggtcgataaacagttccgcaaagcccatcaccgccaggcctaataccatcngtggcagagaagagtgaccatacattgcggaccagcgggcgcttaaggtcagaatgcagaatccggcgctcatcaggccaaggccaagagcaaattttccccagatgcgcacggtacgattacccgcgacactctcttttaccacccacgccaggaacacaccgcacagcataactgcgaaggcattaatcgactggaacatcgcggtcggaacggtataaccaaacatatcgcgattaacgaagcggtcgatataaaggctaatcgagctaccgccctgttgtgcgaaggcccagaacaacatactgaagaaggtgagcgtcacaatcagcctcagctccttccgctgtttctggttttctgctttgcgataaatttttgccagtacacccaggccaatgatnttcgcgacaatcaaggcgtataccgaccattctttccagaacagtacggtaatcagcgcaggcgttgccaccagcagaaccagcagccatccccagttcggcagcagaaagtttgtcgcacgcagtacttttttgttaacgccgcgggtatgtgtgaaatgacgattgccacataagaaaataaccagacccgcgatcatacccaccgccgccaggccaaagcccatcgcccaactgtactcttcctgggcgtagccacaggcaataggtgcgataatagaccccacgttacccgctgcatacatcagcgagaaaccgccatcacgacgcggatcggttggctcatacagctcgccgagcaggcaactgacattggatttaaacagaccatagccacaaacgattatcgccagggacagatagaggaatgacggatggatctcacttgcacccaacaccatatgaccgatcgccatcaataacgcccccagcatcaccgccatgcgattgccgagaactttatccgccaaaaagccaccgaggattggcgtgacatacaccagcgaacagtaggcgctaaataactcgtaggcgtgagtatcgttgtattttagttgattggtgagatagagaatcagcagggcacgcatgccgtaaaagctaaaatattcccagatttgcagcgcaacgacatagtaaatagcgcgcggttgtgatgcgtgtttattcataataattccacaattgacggcaacgtcacgtaatagttgcgcggcgtgcttgtgtttccttaaagttaaaactttgatacagatctgattatttatgcaatatgctgtctgattgcataaatatacattagctgaagcgtgatgatataaacaatttgcgtcttttggcgtcgggtttgtttcttaatatgtcaaaagattggctatcgacgaacaggcgaggtaacgctatgttaacggtgtagctatcagaatacggaaggcgcgaagatgaaaaacaccgaactggaacaactgattaacgaaaaactgaacagcgcggcgattagtgattacgcgccgaatggtttgcaggtggaaggcaaagagacggtgcaaaaaattgttaccggtgtcactgccagccaggctttgctcgatgaggcagtgcgtctgggcgcggatgcggtcattgtgcatcatggctacttctggaaaggcgaatctccggtcattcgcggcatgaagcgtaaccgtttaaaaacgttgctggcgaatgatatcaacctgtatggctggcatttgccgcttgacgcacatcctgagctgggcaataacgcacagctggcggcgttactggggatcacggtcatgggcgaaattgagccgttggtgccgtggggcgaactgaccatgcctgtgccgggactggagctggcttcctggattgaagcgcgtctgggacgtaagccgttatggtgtggcgataccggacctgaggtggtccagcgcgtcgcctggtgcacgggcggcgggcaaagttttatcgatagcgccgcgcgttttngcgtggatgcttttattactggcgaagtttctgaacagaccattcattcagcccgcgagcagggattgcatttttatgctgcaggtcaccatgccactgaacgtggtggtattcgcgcattgagcgagtggctgaatgaaaataccgatcttgatgtgacctttattgatattcctaatcctgcataacgaataatcagagggatcgaaagtgcaacgagcgcgttgttatctgataggtgaaacggcggtagtgctggaactggaaccgccggtgacgctggctagccagaaacggatctggcgactggcgcagcgtctggtggatatgccgaatgtggttgaagccattcccggcatgaacaatatcacggtgattttgcgtaatcctgagtcgctggcgctggatgccatagagcgtttgcaacgctggtgggaggagagcgaggccctggaacctgagtctcgctttattgaaattccggtggtttacggtggtgcaggcggaccggatttggcggtggtcgcggcgcattgcgggttgagcgaaaaacaggttgttgaattgcactcctccgtggaatacgtggtctggtttttaggttttcaaccgggcttcccgtatctcgggagtttgccggaacaactacacacgccacggcgcgctgaaccgcgcttgctcgttccggcaggttctgtcgggatcggcgggccgcagactggtgtttatccgctggcaacgccgggtggctggcagttgattggtcatacctcactcagcctgtttgatccggcgcgtgacgaacccatcttattacgtccgggagacagcgtgcgctttgtaccgcaaaaggagggagtatgctgaagattattcgtgcgggcatgtataccactgtgcaagatggcggtcgtcacggttttcgccagtcgggtatcanccactgcggcgcactggatatgcctgcgttacgcattgctaacctgctggtgggtaatgatgccaatgcccccgcgctggagatcacgctcggtcagttaacggttgagttcgaaactgatgggtggtttgctctgacgggtgccggttgcgaagcgcggctggatgataatgccgtctggaccggctggcgattgccgatgaaagcaggccagcgtttaacgcttaaacgcccgcagcacgggatgcgcagttatctggcggtcgcgggtggtattgatgttccgccggtaatggggtcatgcagcaccgatctcaaagtggggattggcgggctggaaggccgtttactgaaggatggtgaccgactcccgattggcaaagcgaagcgtgattttatggaagcgcagggcgttaaacagctgctgtggggcaaccgcattcgcgccttgccggggccggaatatcatgagttcgatcgcgcctcgcaggatgcattctggcgttcgccctggcagcttagctcgcaaagtaaccgcatgggctatcgcttacaggggcaaattttaaaacgcaccaccgatcgcgaactgttatctcacggtttgttactgggcgtggtgcaggtgccgcataacgggcagcccattgtgttgatgaacgacgcacagaccaccggtggttacccgcgtattgcctgtatcattgaggctgatatgtaccatctggcgcaaattccgctcggtcagccgattcattttgtccagtgttcactggaagaggcactgaaagcgcggcaagatcagcaacgttatttcgaacaattagcgtggcggctgcacaatgaaaattgacctgaacgccgatctgggcgaaggctgcaccagcgacgcagagctattaacgctggtttcctctgccaatattgcctgtggatttcatgcaggcgatgcgcaaaccatgcaggcttgcgtgcgtgaagcaataaaaaatggtgtcgcgattggcgctcatccgagttttcccgacaggaaaaattttggtcgcagcgctatgcagctgccgccagaaaccgtttacgcccagacgctgtatcaaattggcgcgctggcaacgattacccgtgcgcaaggcggtgtaatgcgtcatgtcaaaccgcacggcatgttatacaaccaggcggcgaaagaggcacaactggcagacgccatcgccagagcggtatacgcttgcgatccagcattggttctcgttgggctggcaggaagcgagctgattcgtgcaggcaagcaatatggcctgacaacgcgcgaggaagtgtttgccgatcgcggttatcaggctgacggctcgctggtgccgcgaagccagtcaggcgcgctgattgaagacgaagaacaggcgcttgcgcaaacgttggagatggtgcaacacggcagagtcaaaagtatcaccggcgaatgggcaacggtcacggcgcaaacggtctgcctgcatggcgacggcgagcacgcactggcgttcgcccgccgactacgctctgcatttgccgaaaaggggattgttgtcgcagcataaccccgattaataaagaatgaaaaaaggatatcaccatgcctgaaggcccggagatccgccgtgcagcggataacctggaggcggcgatcaaaggcaaaccactaactgatgtctggtttgccttcccgcagttaaaaacttatcaatcacaacttatcggtcaacacgttacccatgtggaaacgcgtggtaaggcgttgttaactcatttttccaacgacttaacgctctacagccataatcagctttatggcgtctggcgcgtggttgataccggcgaagagtcgcagaccacgcgagtattgcgggtaaaactgcaaacggctgacaaaaccattctgctntatagcgcctcggatattgagatgttgaccccggaacaactgaccacgcatccgtttttacaacgcgttggtcccgatgtgctggatccgaatctgacgccggaggtggtgaaagaacggttattgtcgccgcgctttcgtaaccgtcagtttgctggattactgctcgatcaggcgtttctggctgggcttggcaattatttgcgtgtggagatcctctggcaggttgggttgactggaaatcataaagcgaaagacctcaatgcggcgcaactggatgcactcgcacacgcgttactggatattcctcggttttcttacgctacgcgggggcaggtggatgagaataagcatcatggggcgctgtttcgctttaaggtttttcatcgtgatggcgaactgtgcgaacgctgtggcggcatcattgagaaaaccacgctgtcatctcgcccgttttactggtgtccgggctgccagcactaggccgtacgtttcggcgcataggttgaaataaaccgcgcaatggcaggccctgtcagcaaaatactgaacaggcgcagggtttgcatcgccataatgagcgccatatcggcattgctccctgcggcgatgaccgccacggtatcaagcccgccggggctggtggcgaggtaggcagtcataaaatcaatgtgcataaaccgggtcagtccccacgccatacccgcacaaatagccagcagagcaaaaatcgacagcaggatttgtggtagcgggcgtagtgcccgcagtaagatttgtttatcgaaaccaaggccaatccgccagccaattgccatatacgccatcgccagtagccattccggtagttcgatggtgatgagctgaccagactggagcactgcgcccgccagcatcgggatgagcatcgtgccggaaggaagacgcagcaggcatcccactgtaccggcaacgaccgcgagcaaaatagtaagcaggagattaatgctcactggcgggaaccagacgatatgctggttaaccgcttcagcgttatcgcccagcatcattcgcgtgaccagaactgcggcccccgcgacaaacagcactcgcagatactgcataaacgccaccaggcggatatctgcgccgtaatcctgcgccatcgcgaccattgccgccgccccgccaggcgaggagccccaggcaccagtatttccgggcagtgagctatagcgcaccagtagccatcccacgatagcgctggaaagcaacgtcaccagtaaaatagctaacacaatcggccagttaacctccagcgtggtcaggatcgaaccggtcaagttttgcgcaatcatgcagccaagaatggcctgcgcggcgagaaaagcggagcgggggagttgcagggtaaccccgcgcatactgaagatgatcccggcgatcatcggtccaagtaagagtgccgccgggagatgtaatccgaggaaaccaatagaaaggagaagtgatagcacacataacattccccactgcaaaactggcatcctttgctccctcattattttctctttggtgtatcgatacagcataaagaatgccgggcatggaaaaaataacggtaatcaataaaagccggaaaattggcaattaaccgaagaagccctctccggctggaaagggcaataggctaaatcagttgtagttaattttgaaaagtaccactgtatcaaagggaccaacgtcgatgggcgtacccggcgtggatgacaattctgccgtgtaggttttttcatacactaacaggtcgctggtaaaatcggcatactcactgtatttgttgaaagtatagggtgaggcattttcatccaacaatcgaagcttcaagccattgccaatgagcagtgatttatcttcgtcgataagggtttcatcggtataaaacgaagagctgactttaaaaccgtcggtacactggtcgttttgtgatttggttgtagttattttaaattgctgcgacatcgtatggcgacgaatatccagcacgttaaatcggccaaaatcaacgacctgggtttcaggtgagatagcaaagttgacgctgcaatccagcacgcggatattttccagaccggtaatgtgatatttcagattcttcgcggtagggtcttcgttcacgctgcctgcgccatcaaactgtacgacgatgtaatcgctgagtttgctctgataatcatggggcggcatggcgcgaactttaacgtaaagccgcatacgcgccacaaacgtccgcgatttgtgcataacggttggatcgccggagcaaagtttattttgccagcccatcgcaatgatctgctccggggtgtaaatatcaatattcttactgtcgatgcactgattcgtgtcgatgcggcttttcccaaggcttgcgtcatagtccacgccttcataggttacgcccaattgataatagggatcctgaataccggggtaagggtttacccaggcgtagacgtgctcgctttcaaaattaccgtttgtgttgttgtcacagtagaccggaatttttatatcgtcagattcccagattttatcgccgggtttggaattggccggaacggcgaagggcataatagcttccgatttttctacagcgccgtttgcggtaccaaaatagcagttcagcgccagcgccg

SEQ ID NO: 175 - DNA, 4207 bp, Escherichia coli
  Strain O55:H7
  modified_base (1287)..(1287): a, c, g or t
  modified_base (3946)..(3946): a, c, g or t
  modified_base (3948)..(3951): a, c, g or t
  modified_base (4177)..(4177): a, c, g or t
cggcaaaaaaatcagacagatggcgagcaacacgcctttggcgaatctcattttttattctccaccggctgcaggcggcattgccgctggcaggagagcgtgttcatacgcaatgcgccgtagtcgtccatgtagccaagataaaactgcttgccgctatagctgcccgtgctggtggtgaccgaactgaacggtgcgaccatcgtgcttttaaagccaggcagcacgcctttctcatcccgcccaagataggcaatagtcagatagtatccggtcgggtttttcagggtaagctggttattctgctggctaacctgtagctgttgctcaacatgatcgcccatttttttgcgtaatgcggcgggtcgccagaatagcttaatgcgactttggacggcgacttgcaggatcgcatggccctcgctgccttccgggacaggcggaatttcacgcaggttatagtaaaagagagattcgcgatcggtgggtaatttcgcggtggcggcttgtttcatgatccgaacctgcgaagtcgcttttggctccagtcgctggataggcggcagggcgacgagaaattcatcgcttttctctcccttttcattttctatccatgaataggcgaggtaggggagtttatcgctgcggttttccacgcgcaggctggttgctttatctttgctattaaagatgatgcgcgtgcggtcaggctgcactgcgccgtggctgcacatactggcaaccagaagaatcaaagggaatcctttaacaaatgtcatcgtcttttccttaattaatgacagggtaaaatcaggcgcttagtcacatcttccagatgttccggcagatgaatggcacacgttttctggtcgccccagtgcacggtaaattgttgattttcatcgaccccactcagccatgcgtgaccgttttcgccaaccatcccgacgctgacaccgccttcagcctggcgaacatcggcaccgagcggcgggaaatgcccgttagcatcgctgataatgacgttgagatctttcccggcgcgggacgccagcgatttaaagccgatggcgccttcggtccaggtttctttcaccacgttttcggaaacggtaacgccgtcaggcaagtcgttcatattgaccgccaccgtcgtaggctggtagctggaaacaaacggtaccacggcaataccaaagcggttggtgtagtcaatattgccctgaatcggaatatcgcccacgccgtcggtgctgaccatcaggcgtggttcattggtggaactgnggcgatggaatgccgcgccatgttgagtcgcggtaaacgagccgctccaactggcactggcggaagtgtaatcattggcggcataggttccggtcagatcccattcccccgccgaactgaggtgttggtaattgccgctgacctgcgcaccgttatccgggcgatcggattgtattccagccgacattccccaactgtttcgttcatccagggtatcgttccacgacatgcggtgggtggtagtattactgttgttctgcatgtcataacccagtcgaccactttccccaatcggtaaggagatcgaaaagtaaatctggttgtcgcgatctttatcttcataatgggtggtgttgaacgaggtcgagacagaaatatctttccagtcgccaatgtcgacgttaaaaccgacggtaatgttggccgtggtggaggtatccgcattccaccagctctgatgcaggatgttggcgtagagattaagattcagcagagtaataggctgaccgaaggagaggctgattgtttgcttttcatcctgcgcgtcggcgtcattgtatttgtgatcaatgtagttagcgtagctgtgaaaatggcgatcggagaagcgataggctgccaatgagatggtgctgttggtcgcatcaacctgtttgctgtagttaaagcggtagctgtaaccctgctcatcctgttgagtatcaaaatggctgtcggcccaggtcacgtcaaacgacagcgcccccatccagagcatattttgcccaatacccagcgcgccggaacgatagtcatcgcctgcgagaagcatgccgccatatagtgaagtgttggagagcattccccaggagacttcatggctaatgaaggtttcatcctcggtgtggtgcgacatagaggaacgcgggcgaccggcagccagtttatagcgcacctggccctgacgcgtcaggaacggggtagaggccgctgaaacctggaagttattcacccgtccatcttcttcgctcactttgacatccagtgtaccttgcactgactgattcaggtcatcaataataaatgggcctggcggaacttttttctggtaaatcacgcgaccagaatggcttatcgtgaccgtggcgttagtctgtgcgatgccgctgatttgcggcgcgtagccgcgtaactcccaggggagcattcgatcgtcgctggctaacgccgcaccggtataggagaaaccatcaaaaatgttagagctaaaatcggtttcgcccagggttaatcgggaacctatttgcggtaacgggcggaacaggtaggtccgtgaaatcgccccagattgttcacggttgtcgccgctatcggactggctaagctgataatcgctgcgcagacgccatgccccggcgttgaggcccgtggtgccataggcgttcaggttgttgctgctgctgccgctttgtgggcgataagtgctggcaaacaggttgtaatccatcaggaagccaggaataccgttattccacgttgagggtggcgtccagttttctgaatgccacgccagccatgcctgcgggattgtaatattgagctgttgatttgcctgatcgaaagtaaagatgatttcagggaagacactaaaatcgacacattcttttattgccggtaattttttacgaaagtcagatttaagtccgaagagttcgatcagcgattcattgatacaaggaataattttatcgccagatttttgccagcgaatttgttgcccattactgattttattattattaaccgtaacactaacaaagtaatcgccgggagctacgacgcctttttgattgagcaacgaaatatcaacgctatcccgaatcgacttatcgagaacgttaaggttaaattcagctgtcagcgcaggaggggttaccattgccagacaggaaagaacagagagtcgataaatattcacggcatccatacctgaacaatattcgcaaaaggcggctaatcagccgccttaaaaaggattattggtaatccagaacgtaagttgcgttagcagtaacggcccccgcggtaaccgaaactgcgttatccatctgttccatccaggcaaagaagtttaacgtttgttctgttgaacttgccaataagtcaattgttggcgcttctgttcccaatgtaacaaatgattcatctttgttcatgagacgtacgccaacgccggtagcctcgccagcactgatgttactaaggagcggggttgcacctgtcgttttagccgtgctgtcgaaggtcacgcctacctttgagaccacgccacccttgccatcatcccagcctgcaatatcacagttgattaagcgaatattgacaggttttttctcgctatgatgttctcgatttatgtgggatgtggttacttcacccaggtcaatgttcatatcaaggtcatcagggtgaatttcacatggtgcttcaataacttcacctttaaagtggatttcaccagatccttcatctgcagcaaaaacaggtgaagcgaatagtagagatatggccagggcggccagtgttttttgtcctttaaacatacatgaatccttcatgggctatgataaagtatactaattattccgacagaatagtggttttttgttcatgtaataanannnntgttgctacattatgtttgagagtttctcaaagctctcgaatcataaataaagtgaattaatcctattacgagtttatttaattgtgggtgctacccaatgtattctacatcgattggcgggataacggtggtggtgaatgaaaaattaggattttatttagttatcggatatgtattcttgtaacgtgtaattatgtatttgtgtccgattacgtttttttgtcnatagacataactaacgaacaaaaaaaagcc

SEQ ID NO: 176 - DNA, 3525 bp, Escherichia coli
  Strain O55:H7
  modified_base (1248)..(1248): a, c, g or t
gatattcaggcgggctaaacgatatatggttcaaatcagataattaatgtttaacatctgatttaaagtctcgtttttcatagccggtgtacaactggcgcggacgggcgatcttcatgccgtcactgtgcatttcgctccagtgagcgatccagccaacggtacgggccatagcgaagatgacggtgaacatggaagacggaatacccatcgctttcaggatgataccagagtagaaatcgacgttcgggtacagtttcttctcgataaagtacgggtcgttcagcgcgatgttttccagctccatagccacttccagcaggtcatctttggtgcccagctctttcagaacttcatggcaggtttcacgcattacggtggcgcgcgggtcgtaatttttgtacacgcggtgaccgaagcccatcaggcggaaagaatcatttttatctttcgcacgacgaacaaattccggaatgtgtttaacggagctaatttcttccagcattttcagcgccgcttcgttagcaccaccgtgtgcaggcccccacagtgaagcaatacctgctgcgatacaggcaaacgggttcgcacccgaagagccagcggtacgcacggtggaggtagaggcgttctgttcatggtcagcgtgcaggatcagaatacggtccatagcacgttccagaatcggattaacttcatacggttcgcacggcgtggagaacatcatattcaggaagttaccggcataggagagatcgttgcgcggataaacaaatggctgaccaatggaatacttgtaacacatcgctgccatggtcggcattttcgacagcaggcggaacgcggcaatttcacgatgacgaggattgttaacatccagcgagtcgtgatagaacgccgccagcgcgccggtaataccacacatgactgccattggatgtgagtcgcgacggaaagcgtggaacagacgggtaatctgctcgtggatcatggtatgacgggtcaccgtagttttaaattcgtcatactgttcctgagtcggtttttcaccattcagcaggatgtaacaaacttccaggtagttagaatcggtcgccagctgatcgatcgggaaaccgcggtgcagcaaaataccttcatcaccatcaataaaagtaattttagattcgcaggatgcggttgaagtgaagccagggtcaaaggtgaacacaccttttgaaccgagagtacggatatcaataacatctngacccagcgtgcctttcagcacatccagttcaacagctgtgtccccgttgagggtgagttttgcttttgtatcagccatttaaggtctccttagcgccttattgcgtaagactgccggaacttaaatttgccttcgcacatcaacctggctttacccgtttgttatttggctcgccgctctgtgaaagaggggaaaacctgggtacagagctctgggcgcttgcaggtaaaggatccattgatgacgaataaatggcgaatcaagtacttagcaatccgaattattaaacttgtctaccactaataactgtcccgaatgaattggtcaatacttccacactgttacataagttaatcttaggtgaaataccgacttcataacttttacgcattatatgcttttcctggtaatgtttgtaacaactttgttgaatgattgtcaaattagatgattaaaaattaaataaatgttgttatcgtgacctggatcactgttcaggataaaacccgacaaactatatgtaggttaattgtaatgattttgtgaacggcctatactgccgccaggtctccggaacaccctgcaatcccgagccacccagcgttgtaacgtgtcgttttcgcatctggaagcagtgttttgcatgacgcgcagttatagaaaggacgctgtctgacccgcaagcagaccggaggaaggaaatcccgacgtctccaggtaacagaaagttaacctctgtgcccgtagtccccagggaataataagaacagcatgtgggcgttattcatgataagaaatgtgaaaaaacaaagacctgttaatctggacctacagaccatccggttccccatcacggcgatagcgtccattctccatcgcgtttccggtgtgatcacctttgttgcagtgggtatcctgctgtggcttctgggtaccagcctctcttcccctgaaggtttcgagcaagcttccgcgattatgggcagcttcttcgtcaaatttatcatgtggggcatccttaccgctctggcgtatcacgtcgtcgtaggtattcgccacatgatgatggattttggctatctggaagaaacattcgaagcgggtaaacgctccgccaaaatctcctttgttattactgtcgtgctttcacttctcgcaggagtcctcgtatggtaagcaacgcctccgcattaggacgcaatggcgtacatgatttcatcctcgttcgcgctaccgctatcgtcctgacgctctacatcatttatatggtcggttttttcgccaccagtggcgagctgacatatgaagtctggatcggtttctgcgcctctgcgttcaccaaagtgttcaccctgctggcgctgttttctatcttgatccatgcctggatcggcatgtggcaggtgttgaccgactacgttaaaccgctggctttgcgcctgatgctgcaactggtgattgtcgttgcactggtggtttacgtgatttatggattcgttgtggtgtggggtgtgtgatgaaattgccagtcagagaatttgatgcagttgtgattggtgccggcggcgcaggtatgcgcgcggcgctgcaaatttcccagagcggccagacctgtgcgctgctctctaaagtcttcccgacccgttcccataccgtttctgcgcaaggcggcattaccgttgcgctgggtaatacccatgaagataactgggaatggcatatgtacgacaccgtgaaagggtcggactatatcggtgaccaggacgcgattgaatatatgtgtaaaaccgggccggaagcgattctggaactcgaacacatgggcctgccgttctcgcgtctcgatgatggtcgtatctatcaacgtccgtttggcggtcagtcgaaaaacttcggcggcgagcaggcggcacgcactgcggcagcggctgaccgtaccggtcacgcactgttgcacacgctttatcagcagaacctgaaaaaccacaccaccattttctccgagtggtatgcgctggatctggtgaaaaaccaggatggcgcggtggtgggttgtaccgcactgtgcatcgaaaccggtgaagtggtttattttaaagcccgcgctaccgtgctggcgactggcggagcagggcgtatttatcagtctaccactaacgcccacattaacaccggcgacggcgtcggcatggctatccgcgcaggcgtaccggtgcaggatatggaaatgtggcaattccacccgaccggcattgccggtgcgggcgtactggtca

SEQ ID NO: 177 - DNA, 3764 bp, Escherichia coli
  Strain O55:H7
  modified_base (2009)..(2009): a, c, g or t
  modified_base (2316)..(2316): a, c, g or t
  modified_base (2333)..(2333): a, c, g or t
  modified_base (2613)..(2614): a, c, g or t
gttgccgtggtgaaggcggttatctgctgaacaaacatggcgaacgctttatggagcgttatgcgccgaacgccaaagacctggcgggccgtgatgtggtggcgcgttcaatcatgattgaaatccgtgaaggtcgcggctgtgatggtccgtgggggccacacgcgaaactgaaactcgatcacctgggtaaagaagttctcgaatcccgtctgccgggtatcctggagctttcccgtaccttcgctcacgttgatccggtgaaagagccgattccggttatcccaacctgtcactacatgatgggcggtattccgaccaaagttaccggtcaggcgctgactgtgaatgagaaaggcgaagatgtggttgttccggggctgttcgcggtaggtgaaattgcctgcgtatcggtacacggtgctaaccgtctgggcggcaactcgctgctggacctggtggtctttggtcgcgcagcgggtctgcatctgcaagagtctatcgccgagcagggcgcattgcgcgatgccagcgagtctgatgttgaagcatctttggatcgcctgaaccgctggaacaataatcgtaacggtgaagatccggtggcgattcgtaaagcgctgcaagaatgtatgcagcataacttctcggtcttccgtgaaggtgatgcgatggcgaaagggcttgagcagttgaaagtgatccgcgagcgtctgaaaaatgcccgtctggatgacacttccagcgagttcaacacccagcgcgttgagtgcctggaactggataacctgatggaaacggcgtatgcaacggctgtttctgccaacttccgtaccgaaagccgtggcgcacatagccgcttcgacttcccggatcgtgatgatgaaaactggctgtgccactccctgtatctgccagagtcggaatccatgacgcgccgaagcgtcaacatggaaccgaaactgcgcccggcattcccgccgaagattcgtacttactaatgcggagacaggaaaatgagactcgagttttcaatttatcgctataacccggatgttgatgatgctccgcgtatgcaggattacaccctggaagcggaagaaggtcgcgacatgatgctgctggatgcgcttatccagctgaaagagaaagatcccagcctgtcgttccgccgctcctgccgtgaaggtgtgtgcggttccgacggtctgaacatgaacggcaagaatggtctggcctgtattaccccgatttcggcactcaaccagccgggcaagaagattgtgattcgcccgctgccaggtttaccggtgatccgcgatttggtggtagacatgggacaattctatgcgcaatatgagaaaattaagccttacctgttgaataatggacaaaatccgccagctcgcgagcatttacagatgccagagcagcgcgaaaaactcgacgggctgtatgaatgtattctctgcgcatgttgttcaacctcttgtccgtctttctggtggaatcccgataagtttatcggcccggcaggcttgttagcggcatatcgtttcctgatcgatagccgtgataccgagactgacagccgcctcgacggtttgagcgatgcattcagtgtattccgctgtcatagcatcatgaactgcgtcagtgtatgtccgaaggggctgaacccgacgcgcgccatcggccatatcaagtcgatgttgttgcaacgtaatgcgtaaaccgtaggcctgataagacgcgcaagcgtcgcatcaggcaaccagtgccggatgcggcgtgaacgccttatccggcctacaagtcattacccgtaggcctgataagcgcagcgcatcaggcgtaacaaagaaatgcaggaaatctttaaaaactgcccctgacactaagacagtttttaaaggttccttcgcgagccactacgtagacaagagctcgcaagtgaaccccggcacgcacatcactgtgcgtggtagtatccacggcgaagtaagcanaaaaaagatgcttaagggatcacgatgcagaacagcgctttgaaagcctggttggactcttcttacctctctggcgcaaaccagagctggatagaacagctctatgaagacttcttaaccgatcctgactcggttgacgctaactggcgttcgacgttccagcagttacctggtacgggagtcaaaccggatcaattccactctcaaacgcgtgaatatttccgccgcctggcgaaagacgcttcacgttactcttcaacgatctccgaccctgacaccaatgtgaagcaggtaaaagtcctgcagntcattaacgcataccgnttccgtggtcaccagcatgcgaatctcgatccgctgggactgtggcagcaagataaagtggccgatctggatccgtctttccacgatctgaccgaagcagacttccaggagaccttcaacgtcggttcatttgccagcggcaaagaaaccatgaaactcggcgagctgctggaagccctcaagcaaacctactgcggcccgattggtgccgagtatatgcacattaccagcaccgaagaaaaacgctggatccaacagcgtatcgagtctggtcgcgcgnntttcaatagcgaagagaaaaaacgcttcctaagcgaactgaccgccgctgaaggccttgaacgttacctcggtgcaaaattccctggcgcaaaacgcttctcgctggaaggcggtgacgcgttaatcccgatgcttaaagagatgattcgccacgctggcaacagcggcacccgcgaagtggttctcgggatggcgcaccgtggtcgtctgaacgtgctggtgaacgtgctgggtaaaaaaccgcaagacttgttcgacgagtttgccggtaaacataaagaacacctcggcacgggtgacgtgaaataccacatgggcttctcgtctgacttccagaccgatggcggcctggtacatctggcgctggcgtttaacccgtctcaccttgagattgtcagcccggtcgttatcggttctgttcgtgcccgtctggacagacttgatgagccgagcagcaacaaagtgctgccaatcaccattcacggtgacgccgcagtgaccgggcagggcgtggttcaggaaactctgaacatgtcgaaagcgcgtggttatgaagttggcggtacggtacgtatcgttatcaacaaccaggttggcttcaccacctctaacccgctggatgcccgttcaacgccgtactgtactgatatcggtaagatggttcaggcaccgatttttcacgttaacgcggatgatccggaagccgttgcctttgtgacccgtctggcgctcgatttccgtaacacctttaaacgtgatgtcttcatcgacctggtgtgctaccgccgtcacggccacaacgaagccgacgagccgagcgcaacccagccgctgatgtatcagaaaatcaaaaaacatccgacgccgcgcaaaatctatgctgacaagctggagcaggaaaaagtggcgacgctggaagatgccaccgagatggttaacctgtaccgcgatgcgctggatgctggcgattgcgtagtggcagagtggcgtccgatgaacatgcactctttcacctggtcgccgtacctcaaccacgaatgggacgaagagtacccgaataaagttgagatgaagcgcctgcaggagctggcgaaacgcatcagcacggtgccggaagcggttgaaatgcagtctcgcgttgccaaaatt

SEQ ID NO: 178 - DNA, 7094 bp, Escherichia coli
  Strain O55:H7
  modified_base (982)..(982): a, c, g or t
  modified_base (1899)..(1900): a, c, g or t
  modified_base (1902)..(1904): a, c, g or t
  modified_base (5536)..(5538): a, c, g or t
  modified_base (5541)..(5542): a, c, g or t
  modified_base (6297)..(6297): a, c, g or t
  modified_base (6553)..(6553): a, c, g or t
  modified_base (7092)..(7093): a, c, g or t
ccaggcgatggctgccggtgagaaactgttcgactggggcggcgcggaaaacctcgcttacgccacgctggttgacgaaggcattccggttcgcctgtcgggtgaagactccggtcgcggtaccttcttccaccgccacgcggtgatccacaaccagtctaacggttccacttacacgccgctgcaacacatccataacggccagggcgcgttccgtgtctgggactccgtactttctgaagaagcagtgctggcgtttgaatacggttatgccaccgcagaaccacgcactctgactatctgggaagctcagttcggtgacttcgccaacggtgcgcaggtggttatcgaccagttcatctcctctggcgaacagaaatggggccggatgtgtggtctggtgatgttgctgccgcacggttacgaagggcaggggccggagcactcctccgcgcgtctggaacgttatctgcaactttgtgctgagcaaaacatgcaggtgtgcgtaccgtctaccccggcacaggtttaccacatgctgcgtcgtcaggcgctgcgcgggatgcgtcgtccgctggtcgtgatgtcgccgaaatccctgctgcgtcatccgctggcggtttccagcctcgaagaactggcgaacggcaccttcctgccagccatcggtgaaatcgacgagcttgatccgaagggcgtgaagcgcgtagtgatgtgttctggtaaggtttattacgacctgctggaacagcgtcgtaagaacaatcaacacgatgtcgccattgtgcgtatcgagcaactctacccgttcccgcataaagcgatgcaggaagtgttgcagcagtttgctcacgtcaaggattttgtctggtgccaggaagagccgctcaaccagggcgcatggtactgcagccagcatcatttccgtgaagtgattccgtttggggcttctctgcgttatgcaggccgcccggcctccgcntctccggcggtagggtatatgtccgttcaccagaaacagcaacaagatctggttaatgacgcgctgaacgtcgaataaataaaggatacacaatgagtagcgtagatattctggtccctgacctgcctgaatccgtagccgatgccaccgtcgcaacctggcataaaaaacccggtgacgcagtcgtacgtgatgaagtgctggtagaaatcgaaactgacaaagtggtactggaagtaccggcatcagcagacggcattctggatgcggttctggaagatgaaggtacaacggtaacgtctcgtcagatccttggtcgcctgcgtgaaggcaacagcgccggtaaagaaaccagcgccaaatctgaagagaaagcgtccactccggcgcaacgccagcaggcgtctctggaagagcaaaacaacgatgcgttaagcccggcgatccgtcgcctgctggctgaacataacctcgacgccagcgccattaaaggcaccggtgtgggtggtcgtctgacccgtgaagatgtggaaaaacatctggcgaaagctccggcgaaagagtctgcaccggcagcggctgctccggcggcgcaaccggctctggctgcacgtagcgaaaaacgtgtcccgatgactcgcctgcgtaagcgtgtggcagagcgtctgctggaagcgaaaaactccaccgccatgctgaccacgttcaacgaagtcaacatgaagccgattatggatctgcgtaagcagtacggtgaagcgtttgaaaaacgccacggcatccgtctgggctttatgtccttctacgtgaaagcggtggttgaagccctgaaacgttacccggaagtgaatgcttctatcgacggcgatgacgtggtttaccacaactatttcgacgtcagcatggcggtttctacnncnnncggcctggtgacgccggtactgcgtgatgtcgataccctcggcatggcagacatcgagaagaaaatcaaagagctggcagttaaaggccgtgacggcaagctgacggttgaagatctgaccggtggtaacttcaccatcaccaacggtggtgtgttcggttccctgatgtctacgccgatcatcaacccgccgcagagcgcaattctgggtatgcacgctatcaaagatcgtccgatggctgtgaatggtcaggttgagatcctgccgatgatgtacctggcgctgtcctacgatcaccgtctgatcgatggtcgcgaatccgtgggcttcctggtaacgatcaaagagttgctggaagatccgacgcgtctgctgctggacgtgtagtagtttaagtttcacctgcactgtagaccgacgtggatagggtgtcggtctacggtttaaaagataacgattactgaaggatggacagaacacatgaacttacatgaatatcaggcaaaacaactgtttgcccgctatggcttaccagcaccggtgggttatgcctgtactactccgcgcgaagcagaagaagccgcttcaaaaatcggtgccggtccgtgggtagtgaaatgtcaggttcacgctggtggccgcggtaaagcgggcggtgtgaaagttgtaaacagcaaagaagacatccgtgcttttgcagaaaactggctgggcaagcgtctggtaacgtatcaaacagatgccaatggccaaccggttaaccagattctggttgaagcagcgaccgatatcgctaaagagctgtatctcggtgccgttgtagaccgtagttcacgtcgcgtggtctttatggcctccaccgaaggcggcgtggaaatcgaaaaagtggcggaagaaactccgcacctgatccacaaagttgcgcttgatccgctgactggcccgatgccgtatcagggacgcgagctggcgttcaaactgggtctggaaggtaaactggttcagcagttcaccaaaatcttcatgggcctggcgaccattttcctggagcgcgacctggcgctgatcgaaatcaacccgctggtcatcaccaaacagggcgatctgatttgcctcgacggcaaactgggcgctgatggcaacgccctgttccgccagcctgatctgcgcgaaatgcgtgaccagtcgcaggaagattcgcgtgaagcacaggctgcacagtgggaactgaactacgttgcgctggacggtaacatcggttgtatggttaacggcgcaggcctggcgatgggtacgatggacatcgttaaactgcacggcggcgaaccggctaacttcctggacgttggcggcggcgcaaccaaagaacgtgtaaccgaagcgttcaaaatcatcctctctgacgacaaagtgaaagccgttctggttaacatcttcggcggtatcgttcgttgcgacctgatcgctgacggtatcatcggtgcggtagcggaagtgggtgttaacgtaccggtcgtggtacgtctggaaggtaacaacgccgaactcggcgcgaagaaactggctgacagcggcctgaatattattgcagcaaaaggtctgacggatgcagctcagcaggttgttgccgcagtggaggggaaataatgtccattttaattgataaaaacaccaaggttatctgccagggctttaccggtagccaggggactttccactcagaacaggccattgcatacggcactaaaatggttggcggcgtaaccccaggtaaaggcggtactacccacctcggcctgccggtgttcaacaccgtgcgtgaagctgttgctgctactggcgctaccgcttctgttatctacgtaccagcactgttctgcaaagactccattctggaagccatcgacgcaggcatcaaactgattatcaccatcactgaaggcatcccgacgctggatatgctgaccgtgaaagtgaagctggatgaagcaggcgttcgtatgatcggcccgaactgcccaggcgttatcactccgggtgaatgcaaaatcggtattcagcctggtcacattcacaaaccgggtaaagtgggtatcgtttcccgttccggtacactgacctatgaagcggttaaacagaccacggattacggtttcggtcagtcgacctgtgtcggtatcggcggtgacccgatccctggctctaactttatcgacattctcgaaatgttcgaaaaagatccgcagaccgaagcgatcgtgatgatcggtgagatcggcggtagcgctgaagaagaagcagctgcgtacatcaaagagcacgttaccaagccagttgtgggttacatcgctggtgtgactgcgccgaaaggcaaacgtatgggccacgcgggtgccatcattgccggtgggaaagggactgcggatgagaaattcgctgctctggaagccgcaggcgtgaaaaccgttcgcagcctggcggatatcggtgaagcactgaaaactgttctgaaataaatatctgtaataagaaatagccctcgccgcttccctctacaggaatggcgaagggctgtcggtttcgacatggttggccatcgtatgatggccttttttatgccttaaacggttaaccacggtcgaaatctgactgcaggcttgactgcatgaccacagccactgtggattgccgcaaccgaccgcaagccacgaataagaacgacggcgaatttcgaatcgttacctgatgcactggcttcccagcgtttgaccgtagcgttaagtaaatcaacaaaagcgatgttcaccgcttttcgtcaagtcgtgccatttgtcagccaggatcgggtctttaccccggatattgcagcatcgcaaaaattcttagagggatatgctataaatcaaaaataaaatctttgttgattgtttatcataatatccacagatatgataaatgatatcaatttaataattttcacttaatgtgattccggataattcgaaaggcgctgtgcttttcggattattattatctgattaagatatttgtcacgccagccttactggtttataaatgtcaatcatgattcttataaattatttattgctgctttggttaccattacttcgtaataagtaatgtatttttgatggtttaaactatttttaagggacggcattatgcgagggaaaatacctaaaacggaactgctggtgacttttgaggtcgtcgcacgtcatgaaagttataccagagcggcagaggagttagcgttaacccaaagtgcagtattcagacaagtaagtgcgctggaggaatttttacgtactccgttattttcacactctaaaaaacgcatttttcttaatgatacagggaagtattacctggggatagtaaaagaaacattaaataagctggaacgcgataccaataccattatgacctggcagcctacggttcaggttattgaacttgccgttaatcctacttttagtacccactggttaatcccaaatttacatgaattcacaaagttacatcccgatattattgttaatattcattctttagctaataacggcgattttcttaatcgggagtacgatgctgtcattatgcgcgaaannnttnncgcgccctgggcggaagtagaatatctctttgaagaggagattttgccggtatgcagcggcagtttgcttgcaatgtccgatcaaaaactgtcagtggcagaactgcttactgagttaccacttctgcatcaaagcacccgtattactggctgggaagagtggtttgctttatctggcgttagcagtccgctggtcaacaacggaccacgtttcgatttgctttcaatgctgattgccgccgtgcgctctaatctcggcgtggcgctgttaccacgtttcgctattcaacatgatttggatagtggcgatatggtgattccctgtgatgtgcctattcgtaccggtaatcgttttattatgacgtggcaggaagagaagtctgactcaccgcacttgcagcaatttcgtgaatggttgctggcgaaatcggtcgtaccgcaggagatgtaaaacctgcgcctggcgggatgccaggcgcagttattaccagtcgatacccggctgggcctgaatgccgttatcaaaagcatgtttgacggggcggatttcgctgaccgtatctgccatttttaatatctgactgtggcaaccgcgtccggtgacaatgacactttgttgtgccgggcggttttgcagagaagcgatcacttcttcggtatccagataatggtaagccagcatataggtcagctcatcaagcaccactaagtcgtaacgcttgtcagccagcatccgtttgctttccgaccagacntctttcgccgcgtcgatatccgcttgccggttctgtgtctcccaggtaaaaccggttcccataatatgaaactcaacccccagcggctggagaaggttgtattcgccgttgtcccattgccccttgatgtactgcgcaacccccaccgttttgccatgacccaccgcgcgcgtcacagtaccaaacgcggcagtggatttccctttgccgttgccggtgaaaacaatcaagatcccttttttctctatcgccgccncgacgcgcgtatcgacctgttccttcaatttctgttggcgctgcacatgccgttcagttgaaattcgcgcttccattcattttccttaatgtcccgcagggcaactggcgcagcggtgttgctgctcaaactgactaaagaaattattgcctttatcatctaccaggatgaatgcgggcagattttccacttccatcatccacaccgcttccatacccagctccgggtattccaggcaacgcagacttttgacatattcttgcgccagtaacgcagctgcaccgccaatacttcccagattgaagccgccatgtttgtgacaggcatcggtgacctgctggctgcggttacctttcgataacatcactagactgccgccagccgcctggaaggtatcgatataaccgtccattcgaccgcccgtggttggacccagtgaaccgcaggccatgttctccggtgttttcgccgggccagcgtaatagacaatatgatgcttcaggtactccggcatcggttcgccgctatccagccgcgcnnt

SEQ ID NO: 179 - DNA, 8371 bp, Escherichia coli
  Strain O55:H7
  modified_base (461)..(461): a, c, g or t
  modified_base (610)..(613): a, c, g or t
  modified_base (617)..(617): a, c, g or t
  modified_base (3632)..(3635): a, c, g or t
  modified_base (7415)..(7418): a, c, g or t
  modified_base (7816)..(7816): a, c, g or t
atatcgcgcgccactacgatgggaccacttaacgacacgcgggtgcctactggtaatctggcgagatcctgcatcacgtcacgcaacggacggtttagatccagttgtacatgttgcgcgtgattttcttcccgcagtgaggctggaatatattgccccggattgtgttcgagtttttccagccagataccgtgtttgttaatttttgctttgatattgcgatcggcagaacaggagagcgccatagctatcgggcaagagccaccgtgacgcggcagacgaatgacgcgaatatcatgagcgaaatatttacccccaaattgcgcaccaataccaaattgctgactggcctcgagcaacactttttccagctcaatatcacggaatgcttgtccctgctcgtttccgctggtgggcaaattgtcgtaatatttcgttgaggccagcttggcaatttttanggtttgatcggctgaaagccctccgacgacaaaggcgatgtggtaaggcgggcaggcagcggtgcccagcgatttcattttttcgattaaaaatgcggtcagtttttctggttgcaataaggatttggtttcctgataaagcgcggctnnnntggnggagccgccccctttattaacacagagaaaatggtactcatcaccagcgacagcgctgatatcaatctgcgccgggagattggtttgcgtattgacttcggtatacatatccagcggcgcattttgtgaaaagcgcagattattttcctggaaagtactgtaaatgcctttacttaaggcttcggcgtcgttacctccggtccatatctgttgccctttactggcaacaatagttgcggtgccggtatcctgacagttgggtaataccccttttgctgagacttcagcattacgtaataactgcaacgcaacgtatttatcattactgctggcctgctgatcgttaagaatgctggcgacctgttgcaaatgagcggaacgtaagaaaaaagaggcttcataaaatgcctgccgggcaagcagcgttaatgcttcaggagcgatttttatcacttcttcgccgtctaattccgttactgtaatatgttgatcgctaattaatgtatattctgtaccgtctttattttgtagaaacggttcttgccagataaatggtttggacatatttcacttttcaccttaaacgttagtgttacttaattgccgtctaacttcatgatccggcttataaaaatgcgtagtcattggcttctgattgcttaagatccccctcagggcagagcaacgttcgattcattgggttttaatgctttaccccgacagccctcgccgaaatgttcgccttcccaccgactcaccatcgcagcgcccatcagcaagatcagccccgcttccgaaatattgaactggttgagcgtggcggcgataaccaccattgaggcgcgtggtacgccagccattcctttcgaggtcaacatcaggatcaacagcatggtgatttgctcaccgatggataaatggatattgcaggcctgggcgatgaaaactgtggcgaaggagcagtaggccattgatccaacgagattaaatgagtagccaatgggtaagacaaagctggcaattttgggggaaacgccaaattgctccagtttttcaagcgttcccggaaaagccgcttcagaactggatgtggtaaatgccagcagggcgggttccgaaagggcgcgggtcaggcgtctgatgcaggggccgacataaacgatggccagaccgataagcagtacccaaagtaataacatggtgaaataaaattcacccataaagatcccggcgctcaccataactgccagtcctcgttcagcaatcaatgctgaaatagcagcgaatacggtcaggggagcgaagagcatgacgtagccagtgagctttaacatggcatgtgccagcgaatctaaggcgtgaacgatagcgctgcctttctcgccaatcgccgtcaggctacagccgaggaaaattgagaacaccacgatttgcaaaatttcattgtgcgccatggcatcgacaatgctggtggggaaagcatgcgaaataaatacttttagcgtaaagggttctgccgcgaccactccggtggtttcggcaccgtgtgcaacaaaattaattcctgtacctggcatgaagaaatttaccgttatcaagcctaaggcaattgacagcaatgaggcgcaaataaataaaaagagtgttttagaaaaaatacgaccaagggctttggcatcgcccattttagcaatacctaccaccagggtagagaccactaacggagcgataatcatttttatcagtcgtaagaaaatcgtcgtgaatatcgatatttcttgcgcatagagttttgcggtttccggtgaagcagtgttattgagcactacgccgataatcattccaagtaccagcgccaaaagaatcatcgtggttaaacttattttcttcattttttcctccatcaggtgcacggcgataaatcagaatcaggagaagtagatgcctgaatagagattcaggcatctacctgctattacaaccttacaaatagctgaagtgttgaactgcaataagtgacgggatgtcagttggctaaaagtattcggatttttacaaatcgaaactcatatttaataaaggtgcatgttgctgtgcaccatagacatcattgtcacctacattcccggagataatatctcgtggcatgacgatttttactgcgttagaaggatcaaaccagacaatacgatgaataaagtcaggttcaacatgatataagcgtgcaatcagttctggggttaattgccctgatgatttaactcgctcatagttttctttcgttttaaataaaatatctaaaaccagttcgtaaggtccggcatttttcgaacgaatgacttgcgccagtgagacaattgactgtttcatgcctgaactccttctggcgtcacctgttcaatatggaaatcaaaacgcagagcgtcgttggcttcaatcaggtgatatatggaaaattcgtataccggcccgccctggatatcagaaggggagaacgggaacgccagattacctgcggtagcgatgcggttttcatagccgtagtgcagcatggtagagcgcaccagcgagcaaacgctgttggcaatttcctgggtcggtgcaactacatcaaggacaatccccagctcatgcccggcagtttgcatcggttcatggtctcccatcaccccgtttttgccgtacaggtggaaattgatgcgaatgctgtcatcgtcgagcgacaggttacgcgaaacgctggttttgacttcatcgatgattttatcgatcccggcgatcataatcgggtcgcgcgttccggcgatggtcagacagcggaagcccacccgtcgtgcaccttccagtttcagggcatacggcgtttcttcatgcttagaaccgctgacgtagacttcgccgtcatttactgctttaaatgtgcagcctttcaggttcaacacgccgccaggtcctggcaggaagtagggatcggatttctcatacagtgtgtgtgcagctgctgacgtttcggtnnnnttacgcttcggattaaatgttttcagcgtaaagccgttgtcatcaatgatgcccatcgcacagtcagagcctgagccgggcgttgcggcgattgccgcgcattcaaggattttcccacaatgcagcgccagaccttcatcaaagccttgcatgatcgggagcgcagcaaagcaggccgggtcgtaagcgcgcccgcccagcaccacttgcgcgcgttctttcagcgcccgctggaagggttcgatgcccatttgcgcgacgatatacgtactttcgtcaatcgcgtcgtgggttaacggcgggacaaaatccagcgccgtgattttgccgttatccagcgcctggtggacgatggctttgtcaacgtctgccgggatcaacgccatcgagaacgagaggtgctcttcccgggcaatctcatgaattatttctcggcaccactccaggtgtggtgcggcaccagaaccgccagccgttccgatcaccaccggtatattattttgcacgcctgcggtgatcatatagcgcagatcgcgcttgacccctgcgcgatcggtaaacggtttgcctgccccgaggtagtgggggcctggatcggaagagcctgcatcaacggcgatcagatcgggcgattctgccatcgctttgcggaagctctcttccgggaatccatacccgaggattgccgttggcgataagactttaaaagaacgagccatttgttaatccttagcctgcaacagcgcgatagtacgattcatttcgttgaagacgatatcgaggccttcgtcaaagcccatccctggttttaccagcatacgcatggggcgagcggcaagggcgacgtggacacaggtgcgggcactgacatcagtttcattgcaggtgccgccctggtacgcttccatgctgtggctgttgcagtaaagaaccgcatcgacgatgttgtgaatactgcccagatccggggttttgatttgcaccatgtgacaactggcagcatcagtgaaatcaacaatatcctggtaggtgttacaccattcatcggccacaattttcacgccggaaccgaggcgcgtcagctctttggtaatcgcggtcagcaggcgaatttgatcgggcttgttaccggcatcgaccggcccttcgatgtagagcggcaggccttgcgcttctttttccaggctggcgatgtattgcgcacagcgaagcggatccatatcgaagatcagaccgatagtgccgtatacatcgatgtgcagggtagggtggtagcgtgcgctggtgcgcttgcttagaatgcgatccgacaaccagcggacatattcgcgcagtttttcacctttaaagcccagcttctcttcgacgttattaatcagcgcatggggcagcacgtcgatgcctttaaggatcatcttatcgacggcgatatatcgatcgtcgccgctctgaccaaataatggaatggattccgccacgcgtggcaactgccattcatcacagaccacttcagttttcagacggccggttgccagcgcggtagcatcaagcagcgcctgtgataatccgtagcgcacggcggtatgcagcaagttgccgtcaatacgcaatttgtcgaagaaacgggcattcggcaggaaagcatccacatcgcggcctaccagtaatggcttgatatggtcgttgaggaacggaataaagtgctctgcgaggaacagtggatcgcgaccgcctgccccggaatactgtacggcagtacagtcacctacggcgaccgcgccgttttccagaatcaactgtaccgatacgcactccccggcctgacgtacggcgttaaacccctgtgttactggctccccggtataaaaaaagccgtcatgacccgctccgttttttatcgcctgctggtcatcgaaatagaatgaggagtagccagcggtgaacagagcctgttttattttcattatggtcttcctattaatttactgtgggatacagcattgatgtcatctacaaccatctggaatgtcggttggcgtccttcacagcgtgcgcgttccgcaacgtaatcgtggtggaggtcgagaatatcttttggcaatggaacggctccggcttccagtacgcgtatcgcgccggtgttgtcacggaccggaagaattttgcccgcgttgcaggcggctggcgcaaacggcacatccagtacgcccgcttcaaatgccagcaccgttccgcgcgcaatatcaccattacccagttcgaacactttattcagtaccgcgcgaacctcgctcttaatcagttcaatttccagttcaaccgcagggcacggcgggaatttctgctcattgaccatgttgagcatttggcgggaggctttcagcccctgaatgttggcagcggcagtcgggataccccaggcttcgtgcggacttttggtgatgactttggtggcaccagacatccccgcgacggctgcgccccaggagataatagcgaacgctttcgattcgtcttccggaaagccgcccatccactggtgaaacacggtactcaattcatagtcggtatagccatagctctgaaaatattcgtgtgcaagttcacgcagagactggatcgccgcaacatcctgcgtcaggctgccgacctggccataaccaacggtgatagatttcacaccctgttccagcgccagcaagccttcgattatcgcgatagagtgcgagataaacggcgggatcagcgtacccgttagtgggccaaacggttcgcggttgatgcggatcccgtgttcttcatacatccccattaaacggtcgcagtactgccagtcgcggatcgatttttccagcgttacgcgtttggcatacggaatgttgtaggaaatgccaccgccttcataactggtaaagccgctggccattgagatttcagccagcagacgcgcatctggcgtgccgtggcggatctgtagcggtttttgcagggtttcggtgaggcgacggcaagctgcgacaccatggttaactaccggtaaaccgttcagtttagaggttccggcttcgatggattttttaatccctacagccgcttcttcgtaccgattcagacgggtatatgcatcgatggtgcttggcagcagatcgcactcttcttgtagtgttttcagcagttcgatgtgttcgtccatcagcgccacacctgcgcgcggttggctaagggttttaccttccttgtctgctttcagcagcgcaagagagaaacgtttatgctcagggatggtttgttggtatttaacgccatcttcaaagttttcaacatccttgccggtttcccaggttttcagtacctgttgccgctcggtcatgaattcgtcatgggttaatttcttatttcgaagttccattgattgcagccttaattgttatagggttaagcattgaatactggtgcgcgcggcggccagcggatcgactctggcgacgtttgccagcagtggtaatagcccccgggaatcgcggtaatattcaaattcggtcggtaagagaatgcgtttaccgtcgtcgtttaactcgcggtatttcaaccagtgatgcatatcgaactgactggcacgcgagagccatccgccggatccgacgactttacgcacggttgtcaggtcacgtcccatctgtaaatcgacattgccgacgcaggtgcagacctcttttttggtgcccgcatgtctttcggtggcataacccacacacagtccggccaggacggtatcgaaannnntctcttctgcatttgcgggtaagtagtcgggatgagcgactagatgacggaggtaatgataaaaagcgtccagctgtgcgggttgctgagcaaaattcacattgactaactctttcgcactttcaccaaccaccactgccgagacgcgcattcccagatcgccttccaccgtccgttttacgaagggttccggtacgccgtgtaaaacggtgtcgggcgagagcgtgttggcacaggcggaataaacatcggtggttgcgccgcccatgtcgatcagcatgaactctttccagctgtgatcgacgttactgattgccttgaccagttcaaagaccgtccatggtgtcggcattggttcttcgcctgttttatcaacaatgacatccagccctttcccnttaacgatgcgtttaaggaatatgtcgcaaatagcctggcgtgcagctacagggttcggatggtcaagatcgggcagaacgttgtcgacaatggtcaggtctttatgcccgaggatctcctgcacctcgtcctgaatatcccggtttccggcataaataatggcgcagtcgagtttggattctgccagcacacgggcgttattcagtccgtagctttcttctccgccgtcggtgccgccggtgaacaagagaatatcgggctgcgtttcttccagtgcctggatatcacggcggttcagcttgtaggcgtaatattgcgcaattttagcacccgcagagtgagcggttactttcgcggtttccagggtgatagaaggcaccaatcccattgcggcaaccgccagcccacctttggcagaggaggaatacttcaatgcaacctcaccgctgtttaacagggggagggcattatctacgtttaacacctggttcaggctggagaaaaaccccttcgccagatgatgggtggtggttggggtcagtacgtggttaacc

SEQ ID NO: 180 - DNA, 12557 bp, Escherichia coli
  Strain O55:H7
  modified_base (742)..(745): a, c, g or t
  modified_base (1808)..(1811): a, c, g or t
  modified_base (9659)..(9659): a, c, g or t
  modified_base (11724)..(11724): a, c, g or t
  modified_base (12387)..(12390): a, c, g or t
  modified_base (12554)..(12555): a, c, g or t
cgtccccctcccgggtaaagagggctgctttggtccacgtcgatccaatatcgacagagacgatttgcatcagatagcctcttcaagaatacgagtatcaacgtcatgacgttggttgatatcgtgggccatcagctggcaaacatcttctaagtcatgacttggggcaaagacgcgatcaaatcccatctctttgaatttggtttccacgtcagcgaagtcatgttttccgaccaccaggttaccgcccacatagagcaggatgtcccccagtccacgctcgatgcagcgttcgcgcatgcccagacagtcgatatcgccatgcccatagatagaggagacgacaatcgcgtcagcgccagtttcaatggcagcatcaatatattcgtcctggctgaccattacgcccagattaatgactctgaagtcgtggttgctaaaaacgcggtccagaactttattgcctactgcatggcagtccgcgccaataacgccaatcacaagtgttgctttcttcatgggtaatcctttgtaagacagagagtaaaataagttacacacgtcgtatttatggccgttcataacggcacaggtttaatatcacaggagtgtctttatctgaccgtaatgttgcaattgatctattttcaaaatgtctttcgggaaatgattgtttaaagtgtgtttttaaatttccatgttaattcagtgtgttatgtcaactaatgtcatgagtgttaannnnttaaaattaacttgatttaatgtattgagataattgtgatctacttctaatttgcatttttgtgacgtggttttagccatgagtaaatgcatttcataagatttaagtcgaatttcactgcaattcatctctgcttaatgtaaaaataatgttgaaaataacaaatggttaatgattcatgcgaattatgaccttagttagctcttttaatttttcgtaaaaaagagaggtacatgaaggtgctatcagtatgagtaacgttaatcaaaggttttattacgtctggcaataacgcaggccatttttcgcgacagggtggatttaatcagtataatcctcatacaatagttcacgattaactgaaccgttaacggggatttggtgttgaaatttagaaatggcggagtcaattaatgaagacaatatcgaaaaaatgactgtgtcagaattaatttcaattaatccttctcgttgttgaccaaaaaagatatttatcttgatttcatttgtactacggcaatcaatatgtagtaatttttgatcgctgagattttctgtttcataaatgtttttggcgagagtcgggtgtattgatgccagacatctgctcagataagccatatcctttagggaacaccccgctgagtagaggatgtcagagaatttttgtgtgtcaactgttgtctctgaagcgtatgttgcattgactggaagggtattgaaagagatctgagatggtatcattatttaaatctttccgtgagtaataaaaattaatccccaggcattgtttagcaatatttgccataggggatatatagaaaattaaagtattttattggcttcggttaactgatctataaccagtgccagattggtaaacattttgaaaaagcgatactggctcggaatatctctttcaaagacgaaacattcaatgtcattgtttgaaaaataaaggactagtgttgctgattcgtcagggaaaacatggaaatgtatctggttaccagaaggaggatagtccagaagaagggtatctttgcctgtcacatacctgttnnnntcgtggacgctacgctcacacttcatcagaggtgtcaggatactcatgtattcatctgatgttaatttattaaaatcatcattcattttaaagaaacgataaagtaacagtacatcctcttgcgtaaccggttcgtttgtttttagagggaaataagcgggaaccagaagatgaggttctaatctattttgttgagcgctataactgaatttgaacataaattccggatcgctcatcaattgagcgacataattatgcctggcttcgaaaattttaatttttatcaggttaaataagtctgtttcgtcatcctgtattacaagacattggccatagcagccaggttttttttcattataagcagaaacggttattctgtcagaggtgtcaacgttatattcaaaagccagatagtgaccttcttcatcgcgatttgtttccagattatttaaattcatcacatgaagtgtttgcaatgctgattcaatgagctgttgactctctgaggtaaatgtttcgcgctgcgttgtataaagtgtatcaattccaacgactatccgatgtgggtcaaggatggcggcaatcatctttattacctgcacagtcacgggtgatgtcattgattctttatctgtttttagagaatcattagatggccaacctgagaagcgattgacagccgaaccgatattatcaggactcatagcagcaacctcattgtaatcaagcgaggcgctgagcgtactcggctatagaaaaactaacttgcaaaaatcgctcatttttcatttatcaggcgaaagtggcctctgttcactcagaaacaatcactcccggtaagtcatacctgtttcatcgatacatttaagtgattattactaatgaaacaataacataacgggcttacggtcggtgctcataaaggcaacaatcaattaactttgataaaaatatgttatgtaaaatagcaacaaattggctactctaatcaattggtattataaaaagtggataaggcggttctgttaaataaaatactggttttttatctataccttttcattgtaataattgtgttgcataaatatttcacaataaattaacaataaaatcaccaatgatctatggtttatacataattaacatatttggttggttttgatataaatcaatttttaattcttgaaaaaaatctgcaaaacacgataaattgtcgtagatcaaattggtgagatcgtgacaatttcgctataaattgatcactgtcgaaaaatgcaaatttgctcaataaaaacctgtttattgtaaggattttgcggcgtaatataattacgggatcaatttggtttattcattaacatatttgtaacttttttatcattgtcttttcctcttttgatgaaatggcaacgatagaggcgagcaaataattttgtattggggcatgcgtgtgaccctttctaacggggttcactctcggagtcttcatgcgatgagcaaggagtcatgatgttagatatagtcgaactgtcgcgcttacagtttgccttgaccgcgatgtaccacttcctttttgtgccactgacgctcggtatggcgttcctgctggccattatggaaacggtctacgtcctttccggcaaacagatttataaagatatgaccaagttctggggcaagttgtttggtatcaacttcgctctgggtgtggctaccggtctgaccatggagttccagttcgggactaactggtcttactattcccactatgtaggggatatcttcggtgcgccgctggcaatcgaaggtctgatggccttcttcctcgaatccacctttgtaggtctgttcttcttcggttgggatcgtctgggtaaagttcagcatatgtgtgtcacctggctggtggcgctcggttcaaacctgtccgcactgtggattctggttgcgaacggctggatgcaaaacccaatcgcgtccgatttcaactttgaaactatgcgtatggagatggtgagcttctccgagctggtgcttaacccggttgctcaggtgaaattcgttcacactgtagcgtctggttatgtgactggcgcgatgttcatcctcggtatcagcgcatggtatatgctgaaaggtcgtgacttcgccttcgctaaacgctcctttgctatcgctgccagcttcggtatggctgccgttctgtctgttattgttctgggtgatgaatccggctacgaaatgggcgacgtgcagaaaaccaaactggctgctattgaagctgagtgggaaacgcaacctgcgcctgctgcctttactctgttcggcattcctgatcaggaagaggagacgaacaaatttgcgatccagatcccttacgcgctgggcataattgcaacgcgttccgtggatactccagttatcggcctgaaagaactgatggtgcagcatgaagaacgcattcgtaacgggatgaaggcgtactctctgctcgaacaactgcgttctggttctaccgaccaggcggttcgtgaccagttcaatagcatgaagaaggacctcggttacggtctgctgctgaaacgctatacgccaaacgtggctgatgcgactgaagcgcagattcaacaggcaaccaaagactccattccgcgtgtagcgccgctgtacttcgcgttccgtatcatggtggcgtgtggcttcctgctgctggcaatcatcgcgctctctttctggagtgtcatccgcaaccgcattggcgagaaaaaatggctcctgcgcgccgcgctgtacggtattccgctgccgtggattgctgtagaagcgggctggttcgtggctgaatatggccgccaaccgtgggctatcggtgaagtgctgccgacagctgtggcgaactcgtcactgaccgcaggcgatctcatcttctcaatggtgctgatttgcggcctgtataccctgttcctggtggcagaattgttcttaatgttcaagtttgcacgcctcggcccaagcagcctgaaaaccggtcgctatcactttgagcagtcttccacgactactcagccggcacgctaagacaggagtcgtcaaatgatcgattatgaagtattgcgttttatctggtggctgctggttggcgttctgctgattggttttgcagtcactgatggtttcgacatgggggtgggcatgctcacccgtttcctcggtcgtaacgacaccgagcgtcgaattatgattaactccatcgcaccacactgggacggtaaccaggtttggctgatcaccgcaggcggcgcactgtttgctgcctggccgatggtctatgccgctgcgttctccggcttctatgtggcgatgatcctcgtgctggcgtctttgttcttccgtccggtcggttttgactaccgctccaagattgaagaaacccgctggcgtaacatgtgggactggggcatcttcattggtagcttcgttccgccgttggtgattggtgtagcgttcggtaacctgttgcagggcgtaccgttcaacgttgatgaatatctgcgtctgtactacaccggtaacttcttccagctgcttaacccgttcggcctgctggcaggcgtggtgagcgtagggatgatcattactcagggcgcaacctatctgcaaatgcgtaccgtgggcgaactgcacctgcgtacccgtgcaacggctcaggtggcggcactggtgacactggtctgtttcgcactggctggcgtatgggtgatgtacggtatcgatggttatgtcgtgaaatcgacaatggaccattacgcagcctctaacccgctgaataaagaagtggttcgtgaagctggcgcatggctggttaacttcaacaacacgccaattctgtgggctattccggcactgggtgtggttctgccgctgctgaccatcctgactgcacgtatggataaagccgcgtgggcgtttgtgttctcctccctgacgctggcctgcatcatcctgactgccggtatcgcaatgttcccgtttgtgatgccgtccagcaccatgatgaacgcaagtctgacaatgtgggatgcaacttccagccagctgacacttaacgtcatgacctgggttgcggtggttctggtaccgatcattctgctctacaccgcctggtgttactggaaaatgttcggtcgtatcaccaaagaagatattgaacgtaacacccactctctgtactaagtaaggagctaaaaatgtggtatttcgcatggattctgggaacgcttcttgcctgttcgtttggggtaatcaccgcgctggcgcttgagcacgtcgaatcaggcaaagccggtcaagaagacatctgatgagtaagattatcgcaaccttgtatgcggtaatggacaagcgccccctgcgggcgctttccttcgtgatggcgcttctgttagcaggatgtatgttttgggacccatctcgtttcgccgcgaagaccagtgaactggaaatctggcatggtttattgctgatgtgggccgtctgtgctggtgtgattcacggcgtgggctttcgtccgcagaaggttctttggcaagggattttttgcccattgcttgccgatattgttctcattgtcgggctgattttcttcttcttttaaatcagaattctctttaaaaaattatgggccgtgccaggcccataaatttttacgctcccttaacttgccctcattcccaaacctcaatcgcgcgcgtatagtagcagcgtttaaaagctctaacttttgttgcattaccgggatgtaaagtgaatacaacgctgtttcgatggccggttcgcgtctactatgaagataccgatgccggtggtgtggtgtaccacgccagttacgtcgctttttatgaaagagcacgcacagagatgctgcgtcatcatcacttcagtcaacaggcgctgatggctgaacgcgttgcctttgtggtacgtaaaatgacggtggaatattacgcacctgcgcggctcgacgatatgctcgaaatacagactgaaataacatcaatgcgtggcacctctttggttttcacgcaacgtattgtcaacgccgagaatactttgctgaatgaagcagaggttctggttgtttgcgttgacccactcaaaatgaagcctcgtgcgcttcccaagtctattgtcgcggagtttaagcagtgactgacatgaatatccttgatttgttcctgaaggctagccttctggttaaacttatcatgttgattttgattggtttttcaatcgcatcctgggccattattatccagcggacccgtattcttaacgcagcggcgcgcgaagccgaagcgtttgaagataaattctggtctggaatcgaactctctcgcctctatcaagagagccaggggaaacgggataatctgactggttcggaacaaatcttttacagcgggttcaaagaatttgtgcgcctgcatcgtgccaatagccatgcgccggaagccgtagtggaaggggcgtcgcgtgcgatgcgtatttccatgaaccgcgaacttgaaaatctggaaacgcacattccgttcctcggtacggttggctccatcagcccgtatattggtctgtttggtacggtctgggggatcatgcacgcctttatcgccctcggggcggtaaaacaagcaacactgcaaatggttgcgcccggtatcgcagaagcgttgattgcgacggcaattggtctgttcgccgctattccggcggtaatggcttataaccgtctcaaccaacgtgtaaacaaactggaactgaattacgacaactttatggaagagtttaccgcgattctgcaccgccaggcgtttaccgttagcgagagcaacaaggggtaagccatggccagagcgcgtggacgaggtcgtcgcgatctcaagtccgaaatcaacattgtaccgttgctggacgtactgctggtgctgttgctgatctttatggcgacagcgcccatcatcacccagagcgtggaggtcgatttgccagacgctactgaatcacaggcggtgagcagtaacgataatccgccagtgattgttgaagtgtctggtattggtcagtacaccgtggtggttgagaaagatcgcctggagcgtttaccaccagagcaggtggtggcggaagtgtccagccgtttcaaggccaacccgaaaacggtctttctgatcggtggcgcaaaagatgtgccttacgatgaaataattaaagcactgaacttgttacatagtgcgggtgtgaaatcggttggtttaatgacgcagcctatctaaacatctgcgtttcccttgcttgaaagagagcgggtaacaggcgaacagtttttggaaaccgagagtgtcaaaggcaaccgaacaaaacgacaagctcaagcgggcgataattatttcagcagtgctgcatgtcatcttatttgcggcgctgatctggagttcgttcgatgagaatatagaagcttcagctggaggcggcggtggttcgtccatcgacgctgtcatggttgattcaggtgcggtagttgagcagtacaaacgcatgcaaagccaggaatcaagcgcgaagcgttctgatgagcagcgcaagatgaaggaacagcaggctgctgaagaactgcgtgagaaacaagcggctgaacaggaacgcctgaagcaacttgagaaagagcggttagctgctcaggaacagaaaaagcaggctgaagaagccgcaaaacaggccgagttaaagcagaagcaagcggaagaggcggcagcgaaagcggcggcagatgctaaagcgaaggccgaagcggatgataaagctgcggaagaagcagcgaagaaagcggctgcagacgcgaagaaaaaagcagaagcagaagccgccaaagccgcagccgaagcgcagaaaaaagccgaggcagcagctgcggcgctgaagaagaaagcggaagcggcagaagcagctgcagctgaagcaagaaagaaagcggcagcagagaaagctgcagccgacaaaaaagcagcagaaaaagcggctgctgaaaaggcagcagctgataagaaagcagcggcagaaaaagccgccgcagacaaaaaagcggcagctgcaaaagcagcagctgaaaaagccgctgcagcaaaagctgccgcggaggcagatgatattttcggtgagctaagctctggtaagaatgcaccgaaaacggggggaggggcgaaagggaacaatgcttcgcctgccgggagtggtaatactaaaaacaatggcgcatcaggggccgatatcaataactatgccgggcagattaaatctgctatcgaaagtaagttctatgacgcatcgtcctatgcaggcaaaacctgtacgctgcgcataaaactggcacccgatggtatgttactggatatcaaacctgaaggtggcgatcccgcactttgtcaggctgcgttggcagcagctaaacttgcgaagatcccgaaaccaccaagccaggcagtatatgaagtgttcaaaaacgcgccattggacttcaaaccgtaatcgcgatgttgactgttccgacggtcaacatcaggcaccggttgccacggggttctggtagttttgtgtattttagtttgttaacattctgctaaattatcgtgggccatcggtccagataagggagatatgatgaagcaggcattacgagtagcatttggttttctcatactgtgggcatcagttctgcatgctgaagtccgcattgtgatcgacagcggtgtagattccggtcgtcctattggagttgttcctttccagtgggcgggncctggtgcggcacctgaagatattggcggcatcgttgctgccgacttgcgtaacagcggtaaatttaatccgttagatcgcgctcatctgccacagcagccgggtagtgcgcaggaagtacaaccagctgcatggtccgcgctgggtattgacgctgtagttgtcggtcaggtcactccgaatccggatggttcttacaatgttgcttatcaacttgttgacactggcggcgcaccgggtactgtacttgctcagaactcgtacaaagtgaacaagcagtggctgcgttatgctggtcataccgccagtgatgaagtgtttgaaaaactgaccggtattaaaggtgcgttccgtacccgtattgcctacgttgttcagaccaacggcggtcagttcccgtatgaactgcgcgtatctgactatgacggttacaaccagtttgtcgttcaccgttcaccacagccgctgatgtccccggcgtggtcaccagacggttctaaactggcttatgtgaccttcgaaagcggtcgttccgcgctggttatacaaacgctggcaaacggcgctgtacgtcaggtggcttcattcccgcgtcacaacggtgcgcctgcattctcgccagacggcagcaaactggcattcgccttgtcgaaaaccggtagcctgaacctgtacgtaatggatttggcttctggtcagatccgccaggtgactgatggtcgcagtaacaataccgaaccgacctggttcccggacagccagaacctggcatttacttctgaccaggccggtcgtccacaggtttataaagtgaatatcaacggcggtgcgccacaacgtattacctgggaaggttcgcagaaccaggatgcggatgtcagcagcgacggtaaatttatggtaatggtcagctccaatggtgggcagcagcacattgccaaacaagatctggcaacgggaggcgtacaagttctgtcgtccacgttcctggatgaaacgccaagtctggcacctaacggcactatggtaatctacagctcttctcaggggatgggatccgtgctgaatttggtttctacagatgggcgtttcaaagcgcgtcttccggcaactgatggacaggtcaaattccctgcctggtcgccgtatctgtgataataattaattgaatagtaaaggaatcattgaaatgcaactgaacaaagtgctgaaagggctgatgattgctctgcctgttatggcaattgcggcatgttcttccaacaagaacgccagcaatgacggcagcgaaggcatgctgggtgccggcactggtatggatgcgaacggcggcaacggcaacatgtcttccgaagagcaggctcgtctgcaaatgcaacagctgcagcagaacaacatcgtttacttcgatctggacaagtacgatatccgttctgacttcgctcaaatgctggatgcacatgcaaacttcctgcgtagcaacccgtcttacaaagtcaccgtagaaggtcacgcggacgaacgtggtactccggaatacaacatctccctgggtgaacgtcgtgcgaacgccgttaagatgtacctgcagggtaaaggcgtttctgcagaccagatctccatcgtttcttacggtaaagaaaaacctgcagtactgggtcatgacgaagcggcatactccaaaaaccgtcgtgcggtactggtttactaagagaattgcatgagcagtaacttcagacatcaactattgagtctgtcgttactggttggtatagcggccccctgggccgcttttgctcaggcaccaatcagtagtgtcggctcaggctcggtcgaagaccgcgtcattcaacttgagcgtatttctaatgctcacagccagcttttaacccaactccagcaacaactctctgataatcaatccgatattgattccctgcgtggtcagattcaggaaaatcagtatcaactgaatcaggtcgtggagcggcaaaagcagatcctgttgcagatcgacagcctcagcagcggtggtgcagcggcgcaatcaaccagcggtgatcanagcggtgcggcggcatcaacgacgccgacagctgatgctggtactgcgaatgctggcgcgccggtgaaaagcggtgatgcaaacacggattacaatgcagctattgcgctggtgcaggataaatcccgccaggatgacgcaatggtggcatttcagaatttcatcaaaaattaccctgattcaacttacctgccaaacgccaattattggctgggtcagttaaactacaacaagggtaaaaaagatgatgcggcgtactattttgcttcggtagtgaaaaactatccgaagtcaccaaaggctgcagatgcgatgtttaaagtcggcgtcatcatgcaggacaaaggtgacaccgcaaaagcgaaagccgtataccagcaggttatcagtaaataccctggtactgatggcgctaaacaggcacaaaaacgtctgaacgcgatgtaatgcataacacacgaccagaagtcgcattatttctggtcgtgtcgtgcgaatcataagcagttgagtgatctacatcgaaatttttgttgcgctcaagtctgaaatcagtaatatatgccgccgttgccacgggatatcaaacaaaccgaaagcaacgaaaaagtgggtcgttagctcagttggtagagcagttgacttttaatcaattggtcgcannnncgaatcctgcacgacccaccactaacctagttagttgtagtatccagcgtaatatcgggtgattagctcagctgggagagcacctcccttacaaggagggggtcggcggttcgatcccgtcatcacccaccaccgggtcgttagctcagttggtagagcagttnnct

SEQ ID NO: 181 - DNA, 104 bp, Escherichia coli
  Strain O55:H7
cctgcacgacccaccactaattacggtgggttcggtggaagtagtttgtagtatccagcgcagtatcgggtgattagctcagctgggagagcacctcccttaca

SEQ ID NO: 182 - DNA, 68 bp, Escherichia coli
  Strain O55:H7
  modified_base (3)..(3): a, c, g or t
gcngttcgatcccgtcatcacccaccactcgggtcgttagctcagttggtagagcagttgacttttaa

SEQ ID NO: 183 - DNA, 10104 bp, Escherichia coli
  Strain O55:H7
  modified_base (4670)..(4670): a, c, g or t
  modified_base (4673)..(4673): a, c, g or t
  modified_base (5137)..(5137): a, c, g or t
  modified_base (6829)..(6829): a, c, g or t
  modified_base (8386)..(8386): a, c, g or t
  modified_base (8407)..(8407): a, c, g or t
  modified_base (8637)..(8637): a, c, g or t
  modified_base (9154)..(9156): a, c, g or t
  modified_base (9355)..(9356): a, c, g or t
  modified_base (9359)..(9362): a, c, g or t
  modified_base (9541)..(9541): a, c, g or t
ctgcacgacccaccaattttaacatcaaactcagatgttaagcgtgaaggataacgttgcgtcagcaacggcccgtagggcaagcgaagcgagtcatcctgcacgacccaccaattttaaagattggttccgagtagaaatctttcaggtaacacccgtatgggtcgttagctcagttggtagagcagttgacttttaatcaattggtcgcaggttcgaatcctgcacgacccaccaatgtaaaaaagcgccctaaaggcgcttttttgctattcaggcatctctcaatttcaattcttgaccctgatgacatactccgcgcttgctgcgtaaacaactttacgtcggaggaataagacgcaaagtgtggcattcggcatctcatacgtaattcgagtgacttttccccaccattcgactatcttgtttagcatataaaacaaattacaccgataacagcgaatatcacgctaatgtcggttttaacgttaagcctgtaaaacgagatggtaagatgagcgtgatgtttgatccagacacggcgatttatcctttccccccgaagccgacgccgttaagcattgatgaaaaagcgtattaccgcgagaagataaaacgtctgctaaaagaacgtaatgcggtgatggttgcccactactataccgatcccgaaattcaacaactggcagaagaaaccggtggctgtatttctgattctctggaaatggcgcgcttcggtgcaaagcatcccgcttctacgttgttagtcgctggggtgagatttatgggagaaaccgccaaaattctcagtccggaaaaaacaattctgatgccgacacttcaggctgagtgttcactggatctcggctgccctgttgaagaatttaacgcattttgcgatgcccatcccgatcgtactgtcgtcgtctacgccaacacttctgctgcggtaaaagcgcgggcagattgggtggtaacttcaagcattgccgtcgaacttattgatcatctggatagtttgggtgaaaaaatcatctgggcacccgacaaacatctggggcgttacgtgcaaaaaaagacgggckcagacattttatgctggcagggtgcctgcattgtgcatgatgagtttaagactcaggcgttaacccgcttgcaagaagaatccccggatgctgccatactggtgcatccagaatcaccacaagctattgtcgatatggcggatgcggtcggttccaccagtcaactgatcgctgctgcgaaaacattgccacatcagaggcttattgtggcaaccgatcggggtattttctacaaaatgcagcaggcggtgccagataaagagttactggaagcaccaaccgcgggtgagggcgcaacctgccgcagctgcgcgcattgtccgtggatggccatgaatggcctccaggccatcgctgaggcattagagcaggaaggaagcaattacgaggttcatgttgatgaaaggctgcgagagagggcgctggtgccgctcaatcgtatgctggattttgcggctacactacgtggataacgaataataaggcgtaacgttacgctttgggggaaagatggatttttttagtgtgcagaatatcctggtacatataccaataggagcaggcggttatgatctctcatggatcgaagcggtaggcacaatcgccgggttgctgtgtattggccttgccagtctggagaagatcagcaactacttctttggcctgatcaacgtcaccttgtttggcattattttctttcagattcagctgtatgccagcctgctattacaggtgtttttctttgccgcgaatatttacggctggtatgcgtggtcgcgacaaaccagtcagaacgaggcggagttaaaaattcgctggttgccattgccgaaggcactcagctggttggcggtttgcgttgtttcgattggtctgatgacggtatttatcaatccggtgtttgcatttttgacccgcgtggcagtcatcatcatgcaagcattaggattacaggttgcgatgcctgaactacaaccggacgctttcccgttctgggattcttgcatgatggtgttatctatcgtggcaatgattctgatgacgcgtaagtatgtggaaaactggctgttgtgggtgattattaacgtgattagcgtcgttatttttgcacttcagggcgtttacgccatgtctctggagtacatcatcctgacctttattgcgctcaacggcagccggatgtggatcaatagcgcacgcgaaagaggctcacgcgcgctgtcccattaatggtgatgatgtgaatggccagacaccccttcattcaggtggcagtctggcccatgacaaggttgatattccatctgaatggtggcgtgctcaatctgatagtgatccatcaggtagtgttggatctgatccaacaaggcatcgtgatcgtgtggcgggatcacctgcacatgcaacgtcatcaccggcttctcgcctaccatccatacatgcacatggtgcacattgcggacttccgggatttcccggcacatacgacgcttcagttcagcgatatccagcgataccggtgcaccctcaagtaattcattcacgctatctttcaacagtcgccacgcgctacgcagaaccagaagcgacaccagtatcgagagaatggggtcagcaggtgtccagccggtccagataataatcaacgcggcaataatagccccaaccgaacccagcaggtccccgagcacatgcagtgccgctgctcgtacgttgaggtttttctcttcgctgccgtgatgaagtaaccagaaagaaagtatatttgccagcaacccagccacggcaattgccatcatcatgccgccctcgaccggacgcggcgtgcggaagcgttctatcgcctcccagacaatcaaaatggtaattaccacgagggcgatggcattcacaaacgccgcgagcgtggtcaatcttagccaaccgaaagtgtggcgaatggtgggaggacgacgtgaaaattgcacggcgagtagggcgaaaagcagggcggcagtatcggtcaacatatgacccgcatcggccagcaaagccagagaaccggaaagaaaaccaccaatgacttctaccagcataaacccggcagtcacgccgaaagcatacaacaagcgacgagcattattatcttctggcaggtgtgaggacgtgtgtgagtgcgccatgacgagtcatcccttaattattctcacttaactttatgacatcatactgcttttagaagggaaaaattaaaagggagagactccgctctcccattattggctattttgcagggttactgcgtggtaccgtcggttttggtatcgacatcattattgatgccatcaccggtttgtacctttttattgatatccgggcagcgaccatctttgcacatggtgttcttgtgctcttcatctttggtcatgccgtcattgttcattgaagaaccatccggatgcagcatagtgccgccagaaccggtatttaccccgttattgtcgacgttatttggcgcgacattttcacgggcgtcaggggctacctggcccgcatcagctgcggcgtttgcctggccgttattggtttgcgctccgctatcggcagccagtgcggcaccgctggcaaggcttagagtggcagtcagaaatagtgtggccagttttgtcattttcataggatgctcctgttatggtcgttatgtcggataacctcttccaacagtgcatttgcaggtgaatataaggcattggtttaagatttcagccaggcaaagaaatccagcagagaatcttgaaataattaacaaacaaaggagttacagttagaaattgtaggagagatctcgtttttcgcgacaatctggcgtttttcttgctaattccaggattaatccgttcatagtgtaaaaccccgtttacacattctgacggaagatatagattggaagtattgcattcactaagataagtatggcaacactggaacagacatgaattatcagaacgacgatttacgcatcaaagaaatcaaagagttacttcctcctgtcgcattgctggaaaaattccccgctactgaaaatgccgcgaatacggttgcccatgcccgaaaagcgatccataagatcctgaaaggtaatgatgatcgcctgttggtggtgattggcccgtgctcaattcatgatcctgtcgcggctaaagagtatgccactcgcttgctggcgctgcgtgaagagctgaaagatgagctggaaatcgtaatgcgcgtctattttgaaaagccgcgtactacggtgggctggaaagggctgattaacgatccgcatatggataacagcttccagatcaacgacggtctgcgtatagcccgtaaattgctgcttgatattaacgacagcggtctgccagcggcgggtgaattcctcgatatgatcactcctcagtatctcgctgacctgatgagctggggcgcaattggtgcacgtaccacggaatcgcaggtgcaccgcgaactggcgtctggtctttcttgtccggtaggttttaaaaatggcacagacggtacgattaaagtggctatcgatgccattaatgccgccggtgngcngcactgcttcctgtccgtaactaaatgggggcattcggcgattgtgaataccagcggtaacggcgattgccatatcattctgcgcggcggtaaagagcctaactacagcgcgaagcacgttgctgaagtgaaagaagggctgaacaaagcaggtctgccagctcaggtgatgatcgatttcagccatgctaattcgtccaaacaattcaaaaagcagatggatgtttgtgctgacgtttgccagcagattgccggtggcgaaaaggccattatcggtgtgatggtggaaagtcatctggtggaaggcaatcagagcctggagagcggggagccgctggcctatggtaagagcatcaccgatgcctgcattggctgggaagataccgatgctctgttacgtcaactggcgaacgcagtgaaagcgcgtcgcgggtaaagtttaattgtcggatgcgccgtcagantggcgtatccgatgaatcaccgtagccctgacaagacgcgcagcgtcgcatcaggcaatgtgctccattgttagcgacgacaaacaaaaaagccgactcacttgcagtcggctttctcatttttaaacgaatgacgtttacttcgctttaccctggttcgcaacggctgctgctttcgccgcgatctcgtcagcattacccagataatagcgtttcagcggtttgaagttctcgtcaaactcataaaccagcggcacgccggtcgggatattcagctcaagaatctcttcttcgctcatgttatcgagatatttcaccagcgcacgtaacgagttaccgtgtgcagcgatgattacgcgctcaccgctcttcatacgcggcagaatggtttcattccagtaagggatcacgcggtcaatggtcagcgccaggctttccgtcagcggcagttctttctcgctcagtttcgcgtaacgcggatcgtgacccggataacgctcatcatctttagtcagttccggcggagtcactgcaaaaccacgacgccactgtttcacctgctcgtcgccatatttttcagcagtttccgctttgttcagaccctgcaacgcaccgtagtgacgttcgttcagtttccaggatttctcaacgggcagccatgcctgatccagttcgtccagcacattccacagggtatggatagcgcgtttcagcacagaggtgtaagcaaagtcaaagctgtaaccttcctctttcagcagcttacctgctgcttttgcttcgcttacgcctttctcagacagatccacgtcgtaccaaccggtgaaacggttttctttgttccactgactttcgccatgacgaaccagaaccagcttagttacagccatatacttactcctcaaatcatcttttaatgataataattctcattatattgccgtgacgaagcaacagcaatgcttacgcataaccatagcgaaaatagtggcgcagtgtaaggttgttgtgaatattgagttgcaaatatgtcggtgtttgctggtgatttgaacaatatgagataaagccctcatgacgagggcttaacattactcagcaataaactgatattccgtcaggctggaatactcttcaccaggatgcaggaaacagtccggttgcggccattcagggtggttcgggctgtccggcagaaactcgctttccaacgccagcccttgccagtcggcgtaaggttcggttccccgcgacggtgtgccgccgaggtagttgccggagtagaattgcagagccggagcggtggtgtagaccttcagctgcaatttttcatctgctgaccagacatgcgccgccactttcttgccatcgcctttggcctgtaacaagaatgcgtgatcgtaacctttcactttgcgctgatcgtcgtcggcaagaaactcactggcgatgattttggcgctgcggaaatcaaaagacgttccggcgacagatttcaggccgtcgtgcggaataccgccttcatcaaccggcagatattcgtccgccagaatctgcaacttgtgattgcgcacgtcagactgcttgccgtcaagattgaaatagacgtgattagtcatattcaccgggcaagatttatcaactgtggcgcgataagtaatggagatacggttatcgtcggtcagacgatantgcaccgtcgcgccgagattacccgggaagccctgatcgccatcatctgaactcagggcaaacagcacctgacgatcgttctggttcacaatctgccagcgacgtttgtcgaacccttccgggccgccgtgcagctggttaacgccctgacttggcgaaagcgtcacggtttcaccgtcaaaggtataacgactattggcgatgcggttggcataacgaccaatagaggcacccagaaacgcggcctgatcctgatagcattccgggctggcacagccgagcagcgcctcgcggacgctgccatcggaaagcggaatacgggctgaaagtaaagtcgcaccccagtccatcagcgtgactaccatccctgcgttgttacgcaaagttaacagtcggtacggctgaccatcgggtgccagtgcgggagtttcgttcagcactgtcctgctccttgtgatggtttacaaacgtaaaaagtctctttaatacctgtttttgcttcatattgttctgcgacagcttgctgtacggcaggcaccagctcttccgggatcagcgcgacgatacagccgccaaatccgccgccggtcatgcgtacgccacctttgtcgccaatcacagctttgacgatttctaccagagtgtcaatttgcggcacggtgatttcgaaatcatcgcgcatagaggcatgagactccgccatcaactcgcccatacgtttcaggtcgccttgctccagcgcgctggcagcttcaacggtgcgggcgttttcagtcaggatatgacgcacgcgtttcgccacgattgggtccagctcatgtgcaacagcgttgaactcttcaatggtgacatcgcgcagagctggctgctggaagaaacgcgcaccggtttcgcactgttcacgacgggtgttgtattcgctgccaaccagggtacgtttgaagttactgttgatgatgacgacagccacacctttcggcatggaaactgctttggtccccagtgagcgacagtcaatcagcaaggcatgatctttcttgccgagtgcggaaattagctgatccatgatcccgcagttacagccaacaaactggttttctgcttcctgaccgttaagcgcgatttgtgcgccgtccagcggcagatgataaagctgctgcaatacggttccgaccgcgacttccagtgaagcggaagaacttaacccggcaccctgcggcacattgccgctgatcaccatgtccacaccgccgaagctgttgttacgcagttgcagatgtttcaccacgccacgaacgtagttcgcccattgatagttttcatgcgcgacaatgggcgcatcaagggaaaactcatcaagctgattttcataatcggctgccattacgcgaactttacggtcatcgcgtggcgcacagctgatcacggtttgataatcaatcgcgcagggcagaacgaaaccgtcgttgtagtcggtgtgttcaccaatcaaattcacgcggccaggcgcctgaatggtatgagtggcagggtagccaaatgcgttggcaaacaganattgtgttttttctttcagantcatttcttacactccggattcgcgaaaatggatatcgctgactgcgcgcaaacgctctgctgcctgttctgcggtcaggtctcgctgggtttctgccagcatttcataaccaaccataaatttacgtacggtggcggagcgcaacagaggcggataaaagtgcgcgtgcagctgccagtgttgattctcttcgccattaaacggtgcgccgtgccagcccatagagtangggaaggagcactggaagaggttgtcataacgactggtcagctttttcaacgccagtgccaaatcgctgcgctgggcgtcggtcaaatcggtgatccgcaaaacgtgggctttgggcagaagtagcgtttcgaacggccaggcagcccagtaaggtacaactgctaaccagtgttcggtttcgacaacggtacggctaccgtctgccagctcgcgctgaacataatccaccagcattggcgatttctgctcggcaaaatattctttttgcaggcggtcttcgcgctcagcttcgttaggcaggaagctatttgcccaaatctgtccgtgcggatgcgggttagagcagcccatcgccgcacctttgttttcaaagacctgcacccacgggtatgttttccccagttctgcggtttgctcctgccaggttttgacgatttccgtcaatgccgcaacgctcagttctggcagcgttttactgtgatccggtgaaaagcagatcacccggctggtaccgnnngcgctctggcaacgcatcaaaggatcgttgctttctggcgcatctggcgtgtcagacatcaaggccgcaaagtcattagtgaaaacgtaagtcccggtgtaatcggggtttttatcgcctgtcacccgcacattacctgcgcagaggaagcaatctggatcgtgcgcaggtaacacctgtttggctggcgtttcctgcnnccnnnnccaggggcgcttagcgcggtgcggtgaaaccagaatccattgcccggtgagctggttgtagcggcgatgtggatgatcaacgggattaaattgcgtcatggtcgttccttaatcgggatatccctgtggatggcgtgactgccagtgccaggtgtcctgcgccatttcatcgagtgtgngcgttacgcgccagttcagttcacggtcggctttgctggcgtccgcccagtaggccggaaggtcgccctcgcgacgcggtgcaaaatgatagttaaccggtttgccgcaggctttgctgaaggcattaaccacgtccagcacgctgctgcctacgccagcaccgaggttgtagatgtgtacgcctggcttgttcgccagtttttccatcgccacgacgtgaccgtccgccagatccattacgtggatgtaatcgcgtacgccagtaccgtcttcggtcggataatcgttaccaaaaatcgccagcgagtcgcgacggcctacagcaacctgggcgatgtatggcataaggttattcggaatgccttgcggatcttcgcccatatcgcccgacggatgtgcgccaaccgggttgaagtagcgcagcagggcaatgctccagtccggctgggctttttgcagatcggtgaggatctgttccaccatcagcttgcttttgccgtaagggctttgcggtgtgccggtcgggaagctttcaacgtatggaattttgggctgatcgcca

SEQ ID NO: 184 - DNA, 10186 bp, Escherichia coli
  Strain O55:H7
  modified_base (4)..(4): a, c, g or t
  modified_base (11)..(12): a, c, g or t
  modified_base (570)..(570): a, c, g or t
  modified_base (2727)..(2727): a, c, g or t
  modified_base (7140)..(7140): a, c, g or t
tggnggagganntaaaaataaagtttttgacgttagcggcgcgcatggcgctaatcaggcgcagagtaccgttgacattgttgtcgtaatattccagcggtttttgtaccgattcgccaacggctttcagcccggcgaagtggatcacggtgtcgatagcgtgatcgtgcaggatctcggtcatcaacgcttcgttacggatatcgccttcaacaaacgtcggatgtttgccgcctaaacgctcgataacaggcagtacgctgcgcttactgttacagaggttatcaagaatgatgacatcatgaccgttttgcagtaattgcacacaggtatgacttccaatgtaaccgctaccaccggtgaccagaactctcataattcgctccattaggcttatggtatgaaataaccatagcataacaaagatgcgaaaagtgtgacatggaataaattagtggaatcgtttacacaagagtttagccgttttttatgcgcgattaagtgattataaaacagagggattgtgaatgattgcgctttttatctgaaaaaaagacgcagtttcatgcntggatgcgtctgaccgtgtgccggataaagcgtttacgccgcatccggcacagtcagcattaccgacttagtttatttttgtcagcgcataatgatagaggccaccgtccggcacgaactccagacgatgggtaatacaagccggcgcatcttcagcatggtgcgaaacaaacaacaattgcgtttcaccttcgctaatcagcacatcaacaaaacggcgaataagctggcgattgagcggatcaagcccctgcaatggttcgtcgagaataagcaacgtcggatgtttcaccagtgcgcggacgatcagcgccagacgctgctgtccccaggaaagactatggaacggagcgtcagccgtgcgtttatcaatgccgagaatatccagccactgctgcaccagtttttgctggcgatccgaaacggcctgataaatgccaatcgaatcaaaatagccagaaagaatcacattacgcacagtagtactgacccggtaatccagatgcaaactactgctgacgtaaccgatatgctttttgatatcccagatggtttcgccgctgccacgacgtcgtccgaaaagcgtcaaatcgttgctgtaaccttgcggatgatcgccagtaatcaggcttaataacgtcgattttcccgcgccatttggcccgacaatttgccagtgttcacctggattcacctgccagctaaggttattaagaatggggcgatcgttataagaaaccacgccattattcagcacaatgcgcggttcgttggcgggtaaggcgtgacgtgctgaaggttcatccggctccggcagttgcacaccttcaagctgttcactatgcgccagttgcgcgacgagtgcttgttggagcagttcctctttagcgccagtttccgctaacgtgcaatccgccagcacgccagcaaactggacaaactccgggatctcatcgaagcgattgagcaccagtaccagagtaataccggactgatgtaacgaggcgagtcgctcagccagctgctgacgtgaggcaacatccaggccatcgaacggctcatcaagaatcaacaagtcaggctccgacatcagcgcctgacacagcagggtttttcgcgtctcgccagtggaaaggtatttaaagcgtcggtcgaggaggggggtaataccgaactgctgtgccagttgcatgcagcgcggtgcatcctttacttcatcctgaataatctcagccgtagtgcgtccggtgtcatcttcgccagggccgagcatatcggtgttattccgctgccattcgtcgctgacgagcttttgcaattgctcgaaggagagacgagtgatgtgggaaaactggctttgccgttcacctttcaaaagcggaagttcccccgccagcgcgcgggccagggccgatttcccgcttccattcgaaccgacaaacgcccaactatcacccgcgtttaacgttagctgaggcaattgcagcgtttttgtgtcgctaagacgaaacgtgccttgcaaaatttgcaacgatgacattttatatcccattttgtgcagcgattactgacagggatacgtgtttcataacaaattgtcaacacgcttagcacagtgtggcgataatcacgctgtcggcattaaagtaggccgtgacattctgtccttgctgaagagaagtcgcttcatttaccggcactgtggcgcacagtgtttgcccgtccggtagcgccattaatacttcgcactgctctgcgccgcgctcaatatgactaataatacccggtaattggttgtcagcgttttgcgcgaccgcttcgtcctgagtaatgcctacccacggcgcttttagcaatatcaacacttctttgccttcatccagccccagacgcgcgccgctttgtgcggtaattgcgactttcaggcgtgtttttccatcagccagtaagacatcaacatgctgttgaacgtcatcatgatcgcgggcggtgatggtaccgaaccactggttacgggcgctggtttggagtgaaaaacgtgagatcgcggccagcaggctgttcagcggcagggcgtcatcgtcacttaacacatcaaaggctttttgctggatttgcgccagtaagtcatagagctgaatcagtcgctgaccatancgggtcagtactgcgccgccgccacctttaccgcctgttgcgcgctcgaccagaatatgctcacttaactgattcatctcgttaatggcatcccaggcgcttttatagctgataccggcatctttcgctccctggctaatggaaccggaaagcgcaatgtgttttagtagcgaaatgcggcgcgggtcggcgaataatttttgttggagcttaagggtgagaaggatttcggcctgcataacaatgtcctggcaaaagtcttattgtgacggaaaacgaacgccacgcaaagctgaccgcacaaaaggggagtgcttttctgtgcttagcggttagaatagtctcatgactatatctggagttgaccatgttagagttattaaaaagtctggtattcgccgtaatcatggtacctgtcgtgatggccatcatcctgggtctgatttacggtcttggtgaagtattcaacatcttttctggtgttggtaaaaaagaccagcccggacaaaatcattgattccctgaatgcccgcttagtcgggcattttctttttctcaacttcctgcttttcctgccgatattttttcttatctacctcacaaaggttagcaataactgctgggaaaattccgagttagtcgttatattgtcgcctacataacgttacattaaggggttaccaatggctcgtaaatggttgaacttgtttgctggggcggcactctctttcgctgttgctggcaatgcactggcagatgaagggaaaatcacggtgttcgccgccgcatcactgactaacgcaatgcaggacattgctacgcagtataaaaaagagaaaggcgtggatgtggtttcttctttcgcttcgtcatctactctcgcccgtcagattgaagcgggtgcccctgcggatctgtttatttctgccgatcagaaatggatggattatgcggttgataaaaaagcgatcgatacagctacgcgtcagacactgctcggcaatagcctggtcgttgtagcaccgaaagccagcgagcagaaagattttaccatcgacagcaaaaccaactggacttcactgctgaatggcggtcgcctggcggttggcgatccggaacatgttcccgctggcatttatgcaaaagaagcactgcaaaaactgggcgcatgggatacgctctccccgaaactggctccggcggaagatgttcgtggcgcgctggcgttggtcgaacgcaatgaagcgccgttgggcattgtttacggttctgacgcagttgccagcaaaggggtaaaagtggttgccaccttcccggaagattcacataaaaaagtggaatatccggttgctgttgtggaagggcataacaatgcgacagtgaaagcattttatgattatctgaagggaccgcaggcagcggaaatctttaaacgttacggatttacaaccaagtaatgatactgaccgatccagaatggcaggcagttttattaagcctgaaagtttcttccctggctgtgctgtttagcctgccgtttgggatcttttttgcctggttactggtgcgttgcacgtttccgggcaaagctctgctcgacagcgtactgcatctaccgctggtgttaccgcccgtggtcgtcggttacttattattagtttcgatggggcggcgcggatttatcggtgaacgtctgtatgactggtttggtattaccttcgcctttagctggcgcggcgcggttctcgctgccgccgtcatgtcgtttccgctgatggtgcgggcaattcgtctggcgctggaaggggttgatgtcaaactggaacaggccgcaagaacactgggggccgggcgctggcgcgttttctttactatcacgttaccgctgaccttaccgggaattattgttggtacggtactggcttttgctcgttctctcggtgaatttggcgcaaccatcacctttgtgtcgaacattcctggtgaaacgcgaaccattccttctgccatgtataccctgattcagacccccggcggggaaagtggcgcagcgagactgtgcattatttctattgcgctggcgatgatctccctgttgatttcagaatggctggccagaatcagccgtgaacgggcggggcgctaatcatgctggaactgaatttttcccagacgttgggcaaccattgcctgactattaatgaaacgctgcccgccaatggcatcactgctatctttggcgtctccggtgccggaaaaacttcgctgattaacgccatcagtggactgacgcgcccgcaaaaagggaggattgtcctcaatggtcgggtactaaatgatgccgaaaaaggtatctgcctgacgccggaaaagcgtcgcgttggctatgtttttcaggatgcgcggctgttcccgcattacaaagtgcgtggcaatctgcgctacggcatggcgaaaagcatggtcgatcagttcgataagctggtggcgcttttaggcattgaaccgttgcttgaccgtttaccaggcagcctgtccggaggcgaaaaacagcgcgtagcgattgggcgggctttgctgacggcaccagaattgctgttgctggatgaaccgctggcgtcactggatattccgcgtaaacgcgaactgttgccttatctgcaacgtctgacgcgggaaatcaacatcccgatgttgtatgtcagccattcgctggatgagatcctccatctggcagacagagtgatggtactggaaaacggtcaggtgaaagcctttggcgcgctggaagaagtctggggtagtagcgtgatgaatccgtggctgccgaaagagcaacaaagtagcattctgaaagtgacggtacttgagcatcatccgcattacgcgatgaccgcgctggcgctgggcgatcagcatttgtgggtcaataagctggacgaaccgctgcaagctgcgctacgtatccgcattcaggcttccgatgtttctctggttttacaaccgccgcagcaaaccagcattcgtaacgtattgcgggcaaaagttgttaatagttatgacgacaacggccaggtggaagtggaactggaagtcggcggtaaaacgctgtgggcgcgtatcagcccgtgggccagggatgaactggcgatcaaacctggcctgtggctgtacgcgcaaattaaaagtgtgtcgataaccgcctgattaaatcaggtggctataaatgaactgggcaatgctgtcggtggtgttatcaccaatcacaatgttggcgcgcgcttttaccgcgtcatcggcgttgcccatcgccacgcctgtaccagcggcctccagcatactgatatcattaaagttatcgccgaacgccacgacgttttccatcgaccagccttgcgcctcaacccatttcgtcaaacgtttacctttgctgttgccgccgcgtgcaatatcaacctgatcgtgccaggaccattcacactccagtcccagttcatgttcgacatgcttaccaaaatgctgcaattgcggcaggtcatcgtgcgtgagggcgaacttccatacggcgttaacttgttgcgccgtttcagccagagaagcgacttgtgtgaaagtcggacgctgttccggcggcagggtttgcgcccagttagacgtgcgaatgacatgcccggtcgggtgctcataaaccatcgcgtcatcgacatacatcagaccgtgaatgtggtgttcattcagcatctcaatgagttgtagggctttattaacgggcattgggtccgcttccagcacggtttttgcatgataatcatacaaataggtgccattacagcaaatagcaggtgtatccagcgccagcgcctgataaaaaggatgaatagcgacgtgatggcgacctgtgacgatgattaattgataacctgcttcgcgagcgcgggccagggcttctatcgatgaaggtagcagggtctttttcggggtcaataaggtgccgtctaagtcgagagcaatcacgcgtgtggtcatggcgtattccagattaaggttaagaattttcttctgcgcgaatggtacaccgataccactatcggacaaaattctgcgttttaattcagcattcaccgccaaaagcgactaattttagctgttacagtcagttgctaaatgcaaaggagcattcatgaagcaaacagtttatatcgccagccctgagagccagcaaattcacgtctggaacctgaatcatgaaggcgcactgacgctgacacaggttgtcgatgtgccggggcaggtgcagccgatggtggtcagcccggacaaacgttatctctatgttggtgttcgccctgagtttcgcgtcctggcgtatcgtatcgccccggacgatggcgcactgacctttgccgcagagtntgcgctgccgggtagtccgacgcatatttccaccgatcaccaggggcagtttgtctttgtaggttcttacaatgcgggtaacgtgagcgtaacgcgtctggaagatggcctgccagttggcgtcgtcgatgtggtcgaggggctggacggttgccattccgccaatatctcaccggacaaccgtacgctgtgggttccggcattaaagcaggatcgcatttgcctgtttacggtcagcgatgatggtcatctggtggcgcaggaccctgcggaagtgactaccgttgaaggggccggcccgcgtcatatggtattccatccaaacgaacaatatgcatattgcgtcaatgagttaaacagctcagtggatgtctgggaactgaaagatccgcacggcaatatcgaatgtgtccagacgctggatatgatgccggaaaacttctccgacacccgttgggcggctgatattcatattaccccggatggtcgtcacttatatgcctgtgaccgtaccgccagcctgattactgtcttcagcgtttcggaagatggcagcgtgttgagtaaagagggcttccagccaactgaaacccagccgcgcggctttaatatcgatcaccgtggtaagtatctgattgccgccgggcaaaaatcgcaccacatctcggtatacgaaattgttggtgagcaggggctactgcatgaaaaaggccgctacgcggtcgggcagggaccaatgtgggtggtggttaacgcacactaaccgctgatttacccggcgcagtctctcctgcgccggtgtattaacctatctcctgtaacgcatgtctctggcgttcgacgatattggtccacaaattgtctttatcgtcagtccacaaattaatcagcaaggcaaaaaagcgttctgctgccggagaaagcacggcatctttgcggcgaataatccccaatgtccgacgtataacgggttccaccagtgggataccaataatagaagaatagggcgcatggggcattgccagaccaggaagcgccgaaattcccagtcccgcctctaccagtcctaatgacgtcgaaagatgacgcacttcgtaaaaccagtccagcttccagggcttgtcggctagctgttgttctatcaacaatcggttgccgctggaggaacgtacgccaatcattttgtaacccactaactcctgccattctacaagctgctttttagccaatggatggtcacgccgacaggccagcacgaacggctcgttgaccagtggggtaaaatcaatggatgaatttgtgacgttgttcatgtttatgccaaagtctgattcgttacacagcaccgattccatgcaattattcgtgccttgttccagaatccgcactttaatattgggatacagctcattaaatttaccgattgccagcggtaaaaaataaaatactgcggtcggaatacacgctaacgtcaccataccacgatgataagcattcatatcacgaatattaaaaagcgtttcatcgaatttctttattaattcccgcgcctctgggagcaacctttttcctgcttttgttaacgtaaccttgcgagttgtacgctcaaatagttgaatatgtaaatcttcctccatcttttttattcttcgtgttaatgcaggttgcgtaatattgagtaatttagcggcattgttaaatgaactggactctgccagtatgacaaatgccttcatacttgataattcatgcttcattattactccgggaaatggaagcgacgattttgggtggctggccgttaaaaattttaactgcatttagccaacttaaattaatgaaaaaatgttattaatcgttgagctaaagtcattagagatgctttgcccttaatgtaaccatatcgcaataagttatgtttttaaattgagggcattattatgaaaaaaataccctgcgtgatgatgcgaggtggaacctcgaggggcgcgttcctgttagcggaacatttacccgaagatcaaacgcagcgcgataaaatattgatggcaattatgggttccggtaacgatctggaaattgacggtattggcggcggtaatccactgaccagtaaagtcgccattattagccgttccagcgatccgcgtgctgatgttgattatctgtttgctcaagttatcgtccatgagaaacgtgtcgataccacgcctaactgcggcaatatgctgtctggcgttggggcattcgccattgaaaatggtttgattgcagcgacttcgccagttacccgcgtacgtatccgcaacgtcaatacgggtacgttcatcgaagctgatgtgcaaacgccaaatggtgttgtcgagtacgagggtagcgccagaattgacggcgtaccgggtactgccgcaccggttgcgctcactttcctgaatgccgctggaacgaaaaccggaaaagttttcccgactgataatcagattgattattttgacgatgtcccggtgacctgtatcgatatggcgatgccagtcgtcattattccggctgaatatctgggaaaaacaggctatgaattaccggcggaactggatgccgacaaagcattattagcccgcattgaatctatccgtctacaagcgggtaaagcaatgggcttaggcgatgtcagtaatatggttatccctaaacctgtgcttatttctccagcgcagaaaggcggggcaattaatgtgcgttattttatgccgcattcttgccatcgcgcgctggcgataaccggtgctattgctatttccagtagttgtgcattggaaggtaccgtcacccgacaaatcgtcccttctgtaggatacggcaatatcaatattgaacaccccagtggtgggctcgacgttcatttaagtaatgaaggtcaggatgccacgacgttacgcgcatctgttattcggacaaccagaaaaatattttccggtgaagtttatcttccctgaaaagattcgttgtcaggataaggacaatcaataaaggacttctgtatgagtca

SEQ ID NO: 185 - DNA, 1928 bp, Escherichia coli
  Strain O55:H7
  modified_base (622)..(622): a, c, g or t
  modified_base (1713)..(1716): a, c, g or t
aaagaacaggattttaaatgaataagaaatcgttatggaagctaattctgatattagcgatcccatgtattattggctttatgccagctccggcaggattaagcgaactggcgtgggtgctttttggtatttacctggcggccattgtggggctggttatcaagcctttcccggaacctgtcgtactgttaattgccgttgctgcctccatggtggtggtcggtaacttatccgacggtgcgtttaagaccaccgccgtattaagcggttactcttcaggtactacctggctggtgttctcggcgtttaccttaagcgccgcatttgtgaccaccggtttaggtaaacgtattgcctatctgctgattggtaaaatcggtaacaccacgctgggtctgggttacgttacggtattcctcgatctggtattggctccggcaacaccgtctaacaccgcgcgtgcgggcggcattgtgttaccgatcatcaacagcgtggcggtggctttggggtccgaaccggaaaaaagtccgcgtcgtgtcggacattacctgatgatgtccatttacatggtcaccaaaaccaccagctatatgttctttaccgcaatggcggggaacantctggcgctgaaaatgatcaacgacattctgcacctgcaaattagctggggtggatgggcgctggccgccggattgccgggcatcattatgctgctggtcaccccgctggtgatttacaccatgtatccaccagaaattaagaaggtggataacaaaaccatcgctaaagcgggccttgccgaactgggaccgatgaaaatccgcgaaaaaatgctgctcggtgtctttgtgctggcgctgctgggctggattttcagtaagtctctgggggttgatgaatcttcagtggctattgttgttatggcgaccatgctgctgctgggtatcgttacctgggaagacgtggttaaaaataaaggcggctggaataccttaatctggtacggcggtattatcggcttaagctccttattatcgaaagttaaatttttcgaatggttagctgaagtctttaaaaataacctggcatttgatggtcacggtaacgttgctttcttcgttattattttcctcagcatcatcgtgcgttatttcttcgcttccggtagtgcctatatcgttgctatgttaccggtatttgccatgctggcgaacgtctccggcgcaccgttaatgttaaccgcgctggcactgttgttctccaactcctatggcggcatggttactcactatggcggcgcggcaggtccggtcatctttggcgtgggttataacgatattaaatcctggtggttggtcggtgcggtactgacgatattaaccttcctggtgcatatcaccctcggcgtgtggtggtggaatatgctgatcggctggaacatgctgtaaatatactcgtcatacttcaagttgcatgtgctgcgtctgcgttcgctcaccccagtcacttacttatgtaagctcctggggattcactcgcttgtcgccttcctgcaactcgaattatttagagtatatccatttattttcttgctgcgcacttcacggtgcgcagatatctggagcatttgatgatcaagttatctgaaaaaggcgtgtttctcgccagtaataacgaaataattgccgaagaacatttcaccggcgaaannnnaaaagaagaagcaaaaaaaggcactattgcctggtctattctctcttctcataatacgtccggaaatatggataaacttaaaattaagtttgattcattagcctctcacgatattacctttgttggtattgtacagaccgctaaagcgtccggtatggaacgtttcccgctaccgtatgtgctgaccaactgccataactcactctgcgccg

SEQ ID NO: 186 - DNA, 5282 bp, Escherichia coli
  Strain O55:H7
  modified_base (2183)..(2183): a, c, g or t
  modified_base (3321)..(3321): a, c, g or t
  modified_base (4298)..(4301): a, c, g or t
  modified_base (4530)..(4530): a, c, g or t
  modified_base (5254)..(5255): a, c, g or t
accattaacggtgatgaccatgtttttggtttatcggcagctcagcgttatggcggtatttttgtgcctccgcatattgcggtcatccatcaatatatgcgtgagatgatggcaggtggcggcaaaatgatcctcgggtcagacagtcacacccgttacggtgcattagggacaatggcagtcggtgagggcggcggcgagttggtaaaacaattgcttaatgacacctgggatatcgactatccgggagttgttgcggtgcatctgaccggaaaaccagcgccgtatgtggggccgcaggatgtggcgttggctatcatcggtgccgtgttcaaaaacggctacgtcaaaaacaaagtgatggaattcgtaggtcccggtgttgctgcgctctctaccgatttccgtaacagcgttgacgttatgaccactgaaacgacctgtttaagttctgtctggcaaaccgatgaagaagtccataactggctggcgctgcacggtcgcggccaggattactgccagcttaaccctcaaccgatggcgtactacgatggctgcatcagcgttgatttaagcgccatcaaaccaatgattgcgctgccgttccacccgagcaacgtgtatgaaatcgacacactgaaccagaacctgaccgacattctgcgtgagattgaaattgagtccgaacgcgtggcgcacggtaaagccaaactctcgctgctggacaaagtggaaaatggtcgcctgaaagtgcagcaggggattatcgcgggctgttctggcggtaactacgaaaacgtcatcgcggcggcgaatgcactgcgcggtcaatcctgtggcaatgacaccttctcgctggcggtttacccgtcatcacagccggtgtttatggatctcgccaaaaaaggtgtggtagcagatttgattggcgcaggcgcaatcatcagaaccgcgttctgcggcccatgctttggcgcgggcgatacgccaatcagcaacggtttgagtattcgccacaccacgcgtaacttcccgaaccgcgaaggctctaagccagctaatgggcagatgtcagcggtggcgttgatggacgctcgttctatcgctgcgactgcggcaaacggtggctatttaacctctgccagcgaactcgattgctgggacaacgtgccggagtacgccttcgatgtaacgccgtataaaaatcgcgtctatcaaggctttgtgaaaggggcgacccagcaaccgctgatttacggaccgaacattaaagactggccggaattgggtgcgctgactgacaatatcgtcctcaaagtgtgctcgaagatcctcgacgaagtgaccaccaccgacgaattgattccttccggtgaaacctcttcttatcgttcaaatccgattggtctggcggagtttaccctgtcacgccgcgatccaggttatgttggcagaagtaaagcgactgctgagctggaaaatcagcgtctggcggggaatgtcagcgagctgacagaggtgtttgcgcgcattaagcagattgctggtcaggagcatattgatccgctgcaaactgaaattggcagcatggtctatgcggtgaaaccaggcgatggttctgcgcgtgaacaggcggcgagttgtcagcgtgtgattggcggtctggcgaatattgccgaggagtacgcgactaaacgctatcgttctaacgtcatcaactgggggatgttaccgctgcagatggtggaagcgccaacctttgaagtgggggattacatttacatccctggcattaaagcggcgctggataatccgggtacgacgtttaaaggttatgtgatccatgaagatgcgccggtaacggaaattacgctctatatggaaagtctgactgctgaagagcgcgagattatcaaggcgggtagtttgattaacttcaataaaaaccgtcagatgtaaaaagcgccatgtgaatgtaggtcgcattcggcacttattgtcggatgcgatgctggcgcatcttatccgacctacaaatcgcatcgaaccgtaggccggataaggcgtttacgccgcatccggcaaatagttaatagctcttacttcttcgcctctgcaaccactttgctacccacgccgcggttattgtattcccacatgcggttgtagttagtgtcattcanattgcgctgtatttcgtcgctatcgtcaacgctgccggtgttacccgcaaacggacgattagagatcaccgcatcgccccacggtttagccgtgttaaaaccttcgttgatggcgctatcacggatcaccacctgaccgttggtattggcatcaacatccagcgagcggcccagttgtgccacgccatcaccggaagcattgaaacggctgtttacggcgaggaaaccgtagtaaatgttggacagcgtagccggtgcaaacacatacgcttcttgctgagtacgtgagttcaccacgcggaattcggtgttatcgaacaccactgcgccgcgaccagaaacgatatccacatccccttcaatgtagctgttggtcaccagcgtacgcggctgacgattcgtttccagacggttctgcacaccgctgttggtgacaaagaaggtgttctgacgaccgagaatgttaacgttgttaatctgtacctggtcaccgtcagtacgcagtgccaccgccggatggttacccgcatctacgctatcacccagcgtgttttcgatggtcaggttttgcagttgcaggccattgttttgtgaccagaagaccgcagaacacagaacaccgatactgtcgctgcgtttgctctggcagctatcgtacatataccacgctggtttacctggcatatatttgccgcgcgggttgacgtcgtgacgccagtcggcagggctcatgcccccatcaagggaaagcccaatcttcacatcaatcggtttttcacctgtaccgtacagagtaattccacctggagcagcagggacatacaccgttccctgatactcaccaggcatcacggcaatatactggcgcttgttggtgcgcttgataattgccgcatctaccgccgcctgaatcgtggtatgcgttacaccttgagtacccgccgggccgacaacaaagtcaggttgcgcaggcagggttatcggggacggattccacgctgcagcacctggtgtcagggatgcaaaatagtgttgagcatcgaaattctgcgcttcttttgccgacagaatcgggcgagaagaggtaccaggcgcagtttgatcagaaggacgttgatcgggtggtgttgagctacangcggtcagcgtcacgccaaaagccaatgccagcgccagacgggaaactgaaaatgtgttcacaggttgctccgggctatgaaatagaaaaatgaatccgttgaagtctgcttttttatactaagttggcattataaaaaagcattgcttatcaatttgttgcaacgaacaggtcactatcagtcaaaataaaatcattatttgatttcaattttgtcccactccctgcctctgtcatcacgatactgtgatgccatggtgtccgacttatgcccgagaagatgttgagcaaacttatcgcttatctgcttctcatagagtcttgcagacaaactgcgcaactcgtgaaaggtaggcggatccccttcgaaggaaagacctgatgcttttcgtgcgcgcataaaataccttgatactgtgccggatgaaagcggttcacgacgagtagatgcaattatggtttctccgccaagaatctctttgcatttatcaagtgtttccttcattgatatcccgagagcatcaacatgcaatgttgtagggatggcaatttttacgcctgttttgctttgttcgacataaagatatccatctacgatatcagaccacttcatttcgcataaatcaccaactcgctgcccggtaacaacagccagttccattgcaagtctgagccaacatggtgatgattctgctgcttgataaattttcaggtattcgtcagccgtaagtcttgatctccttacctctgattttgctgcgcgagtggcagcgaccgggtttgttgttatatggccttcagctattgcctctcggaatgcatcgctcagtgttgatctgattaacttggctgacgccgccttgccctcgtctatgtatccattgagcattgccgcaatttcttttgtggtgatgtcttcaagtggagcatcaggcagccccctccttattgctttaattttgctcatgtaatttatnnnntgtcttctgcttgattcctctgctggcgaggattttttcgtagcgatcaagccatgaatgtaacgtaacagaattatcactgttgattctcgctgtcagaggcttgtgtttgtgtcctgaaaataactcaatattggcctgtattgcttcagtgattgctatcctcctgtctcggcctaaaccaaactctttacccgtccttgggtccctgtagcagtaatattgtttnttatataaaggttagggggtaaatcccggcgctcatgacttcgccttcttcccatttctgatcctcttcaaaaggctacctgttactggtcgatttaagtcaacctttaccgctgattcgtggaacagatactctcttccatccttaaccggaggagggaatatcctgcattcgcgcacccatcgacgaactgtttcaaggcttcttgggcgtcgctggcgtgcgttccactcctgaagtgtcaagtacatcgcaaagtctccgcaattacacgcaagaaaaagccgccatcaggcggcttggtgttctttcagttcttcaattcgaatattggttatgtctgcatgtgctatctgcgcccatatcatccagtggtcatagcagtcattgatgttctctgcttcgataactctgttgaatggttctccattccattcacctgtgactcggaagtgcatttatcatctccataaaacaaaacccgccgtagcgagttcagataaaagaaatcctcgtcagtgcgaggatgctgttcattgctgctatacacttttttgctctcaacgtaagcggtagctcattctgttgggttggtgcagttgcttttaggaaatgctatttaccccttaaacgtcggctgaaagagctaaaatccatgcaaaaaatttacgcaattttgtgtattattgtgcagtaagtaatgagctattttctgcgcaaaaannggatggtaaatttgtccggggcaggaa

SEQ ID NO: 187 - DNA, 2645 bp, Escherichia coli
  Strain O55:H7
  modified_base (2)..(3): a, c, g or t
  modified_base (57)..(57): a, c, g or t
  modified_base (972)..(972): a, c, g or t
  modified_base (2644)..(2644): a, c, g or t
annggcgctaaacatgaaaaaagattcgtatccttatttgatttgcatgacagtttnaggcctgatctttattttccttttcttctggtggcgggcagatatttacagggtcacgtttcttaatcagagtatatcccactattacattctgtttagcatgggaatagcttttctgttatctctgttttgggttaagaaggggatagtaaaacaaagcggctggaagagtctgtcagcataccttaaggtttatgcagggatgtgcatatttgctggattttttctgattataccccttacaacactaacttattttttgcctggagagacatcgtcttatgttgcaccgtatcggtatacttccggtagttcaaaaagttgttctggagctgaggtggatgaccccgatctacatgagaatattcgcatttgctatccgtatggcaattatgagtacgataatattatctatgttgaaaagaaaattaatacattaggtgcggtagtaacatatgcacagaccgcgcgtgatgatactgaatgagatagtatatagcgggcaagttttagttaatttatcgaggtaatataatttacctcgactcgtttattctggtattaatatttcgctttacgatcgatttttatctgatgatatcatgcggttttcatatactgacttactgtcttttctccgttagcgattttctcctgctcagcgatgattttatctttggcttctagttaatttcgctcacttcgaacctctctgtttactgataagttccagatcctcctggcaacttgcacaagtccgacaaccctgaacggccagacgtcttagttcatctatcggatcgccacactcacaacaatgagtggcagatatagcctggtggttcaggcggtgcatttttattgctgtgttgcgctgtaattcttcaatttctgatgctgaatcaatgatgtctnccatcttccattaatccctgaattgttggttaatacgcttgagagtgaatgcgaataataaaaaaggagcctgtagctccctgatgattttgcttttcatgttcaccgttccttaaagacgccgtttaacataccgattgccagacttaagtgagtcggtgtgaatcccatcagcgttaccgtttcgcggtgcttcttcagtacgctacggcaaatgtcatcgacgtttttatccggaaactgctgtctggcttttttgatttcagaattagcctgacgggcaatactgcgaagggcgttttcttgctgaggtgtcattgaacaagtcccatgtcggcaagcataagcacacagaatatgaagcccgctgccagaaaaatgcattcagtggttgtcataccaggtctctctcatctgcttctgctttcgccaccatcatttccagcttttgcgaaagggatgtggctaacgtatgaaattcttcgtctgtttctactggtattggcacaaacctgactccaatttgagcaaggctatgtgccatctcaatactcgttcttaactcaacaggagatgctttgtgcatatcgcctcccgtttattatttatctcctcagccagccgctgggctttcagcggatttcggataacagaaaggccgggaaatacccagcctcgcttcgtaacggagtagacgaaagtgatcgtgcctacgcggatattatcgtgaggatgcttcatcgccattgctccccaaatacaaaaccaatttcagccagtgcctcgtccattttttcgatgaactccggcaccatctcgtcaaaacccgccatgtacttttcatcccgctcaaccacgacataatgcaggccttcacgcttcatacgcgggtcatagttggcaaagtaccaggcatcttttcgcgtcacccacatgctgtactgcacctgggccatgtaagccgactttatggcctcgaaaccaccgagcctgaacttcatgaaatcccgggaggtaaacgggcatttcagctcaaggccgttgccgtcactgcataaaccatcgggagagcaggcggtgcgcatactttcgtcgcgatagatgatcggggattcagtaacattcacgccggaagtgaattcaaacagggttctggcgtcgttctcgtactgttttccccaggccagcgccttagcattaacttccggagccacaccggtgcaaacctcagccagcagggtgtggaagtaggacattttcatgtcaggccacttctttcctgagcggggctttgctatcacgttgtgaacttctgaagcggtgatgacgccgagccgtaatttgtgccatgcatcatccccctgttcgacagctctcacgtcgatcccggtacgctgcaggataatgtccggtgtcatgctgccaccttctgctcagtggctttctgtttcaggaatccaagagctttcactgcttcggcctgtgtcagttctgacgatgcgcgaatgtcgcggcgaaatatctgggaacagagcggcaataagtcgtcatcccatgttttatccagggcgattagcagagtgttaatctcctgcatggtttcatcgttaaccggagtgatgtcgcgttccggctggcgttctgcagtgtatgcagtattttcgacaatgcnc

SEQ ID NO: 188 - DNA, 404 bp, Escherichia coli
  Strain O55:H7
  modified_base (207)..(207): a, c, g or t
  modified_base (303)..(304): a, c, g or t
  modified_base (401)..(402): a, c, g or t
tccttgtcatagataccagcaaatccgaaggccagacgggcacactgaatcatagctttatgccgtaacatccgtttaggatgcgactgccacggccccgtgatttctctgccttcgcgggttttgaatggttcgcggcggcattcatccatccattcggtaacgcagatcggatgattacggtccttgcggtaaatccggcatgtncaggattcattgtcctgctcaaagtccatgccatcaaactgctggttttcattgatgatgcgggaccagccatcaacgcccaccaccggaacgatnncgttctgcttatcagggaaggcgtaaatttctttcgtccacggattaaggccgtactggttggcgacgatcaacaatgtgatgaactgcgcatcgcnngc

SEQ ID NO: 189 - DNA, 1138 bp, Escherichia coli
  Strain O55:H7
  modified_base (1022)..(1023): a, c, g or t
  modified_base (1044)..(1047): a, c, g or t
  modified_base (1117)..(1120): a, c, g or t
gcgcgatggggagacagggcggcatgagacgacagcgacgaagtttcaccgacatcatctgcgaaaactgcaaataccttccaacgaaacgctccagaaataaacgcaagccaatcccaaaagaatctgacgtaaaaaccttcaactacacggctcacctgtgggatatccggtggctaagacattgtgcgaggaaaacaaggtgattgaccaaaatcgaagttacgaacaagaaagcgtcgagcgagctttaacgtgcgctaactgcggtcagaagctgcatgtgctggaagttcacgtgtgtgagcactgctgcgcagagctgatgagcgattcgaatagctcgatgcacgaggaagaagatgatggctaaaccagcgcgaagacgatgtaaaaacgatgaatgtcgggaatggtttcaccctgcattcgctaatcagtggtggtgctctccagagtgtggaaccaagatagcactcgaacgacgaagcaaagaacgcgaaaaagcggaaaaggcagaaaaggcagcagagaagaaacgacgacgagaggagcagaaacagaaagataaacttaagattcaaaaactcgccttaaagccccgcagttactggattaaacaagcccaacaagccgtaaacgccttcatcagagaaagagaccgcgacttaccatgtatctcgtgcggaacgctcacgtctgctcagtgggatgccggacattaccggacaactgctgcggcacctcaactccgatttgatgaacgcaatattcacaagcaatgcgtggtgtgcaaccagcacaaaagcggaaatctcgttccgtatcgcgtcgaactgattagccgcatcgggcaggaagcagtagaggaaatcgaatcaaaccataaccgctatcgctggactgtcgaagagtgcagggccatcaaggcggagtatcaacagaaacttaaaaaactgcgaaacagcagaagtgaggttgcatgaatatctacgaaagaattgatggcagcaaataccganntatttgggtagttggcgatcnnnnggatgctacacgaacctgatgaaaaaactggagacgataggattcgacaccaaaaaagacctgcttatcnnnntggcgatttggttgatcg

SEQ ID NO: 190 - DNA, 704 bp, Escherichia coli
  Strain O55:H7
  modified_base (88)..(88): a, c, g or t
agagaacgtagaatgcctggaattaatcacattcccctggttcagagctgtacgtggaaaccatgagcaaatgatgattgatggcttntcagagcgtggaaacgtcaatcactggctgcttaatggcggtggctggttctttaatctcgattacgacaaagaaattctggctaaagctcttgcccataaagcagatgaacttccgttaatcatcgaactggtgagtaaaggaaaaaaatatgtcatctgccacgccgattatccttgtgataaatacgagtttggaaagccagttgatcatcagcaggtaatctggaaccgcgaacgaatcagcaactcacaagacgggatcgtgaaagaaatcaaaggcgcggacacgttcatctttggtcatacgccagcagtgaaaccactcaaatttgccaaccagatgtatatcgatactggcgcagtgttctgcggaaacctcacattgattcaggtacagggagaaggcgcatgagactcgaaagcgtagctaaatttcattcgccaaaaagcccgatgatgagcgactcactactggccacagtttattggttttcgtaactgagtcattttattattttattgcaacttttaatcttttatagtgcgaaataaatggagctggcattcatttcgcactttatgtttttgttggacttatgttattttgattgaat

SEQ ID NO: 191 - DNA, 23 bp, Escherichia coli
  Strain O55:H7
tcagttaaaaaaagaaggtgatt

SEQ ID NO: 192 - DNA, 1136 bp, Escherichia coli
  Strain O55:H7
  modified_base (3)..(3): a, c, g or t
  modified_base (1063)..(1066): a, c, g or t
ttntaaatgaatagtcatcccctgtcttgaattctgatgttactttattaaatgctagtgtgaaggctacaggtgcatacccaattgttgcgccaacttgatattcatcaacagttttgtttagcgatactgttgtttgtttcgtctgtattgtttttccttcgagagtatagttgcgattgacatctcgtctttccatacctgcaaaaatcttgtatttgaatccgcttgtatcggacatatgcattaaaccacggggagccagcagaccaaagccattatccgaattgaaggttttatcattaccaatggcaatggttgcgccatatgctacatattgaaataagtttccagtaacagcagaaacttcagggtataatccaacattagcacctaaaatatccatacttggtgtcatggatagcatcccttttacagtataaccgtagcgattctctatttgatcatcccatgcatgatatttttctgccccaataatctcatgagctttattttgtactttctgaccgcctgcgtcggggccaacaacacctatgtcagtacctaatcgatagcgaatccagtcattcgcaagggagttccattcaataccagtgtgagtgtatgcactaaaagctctgtctccagttacagctgtgttgtgtcttttattactgcctgatggagagtaaatatcttgcgcaatatggagagataattggctcgagtctgagatatcgtggctatatcccagaaataagccttgtgagtaatcatctctgtttttatgtttattgccataaatatcattaagtattggttgaaacttccctgcatcatcatttgctaatgataatgcaaggctgttcgcgatagctgaacacgtggtaaatgacagagcaataaagacgccagcgatgacactttttttcatatgttattgtcttccttttttttgaatggtgcgcgtattttacatacatgagtttgtaatacaaggtgcgtaatcaatatgatgttttataattgcgtgagacaattgatttattcgttttttattgcnnnntttattatcttttaatgtaacggtgtttttattaagtgtgtttgcgtggtgttttatgttttttataatt

SEQ ID NO: 193 - DNA, 18472 bp, Escherichia coli
  Strain O55:H7
  modified_base (60)..(60): a, c, g or t
  modified_base (992)..(995): a, c, g or t
  modified_base (3141)..(3141): a, c, g or t
  modified_base (3659)..(3659): a, c, g or t
  modified_base (3932)..(3932): a, c, g or t
  modified_base (4303)..(4303): a, c, g or t
  modified_base (4396)..(4396): a, c, g or t
  modified_base (9907)..(9907): a, c, g or t
  modified_base (9943)..(9943): a, c, g or t
  modified_base (11803)..(11803): a, c, g or t
  modified_base (17164)..(17164): a, c, g or t
  modified_base (17332)..(17332): a, c, g or t
  modified_base (17645)..(17645): a, c, g or t
  modified_base (17679)..(17679): a, c, g or t
  modified_base (17697)..(17697): a, c, g or t
  modified_base (17712)..(17712): a, c, g or t
  modified_base (17714)..(17714): a, c, g or t
  modified_base (17745)..(17745): a, c, g or t
  modified_base (17758)..(17758): a, c, g or t
  modified_base (17873)..(17873): a, c, g or t
  modified_base (18030)..(18030): a, c, g or t
  modified_base (18036)..(18036): a, c, g or t
  modified_base (18063)..(18063): a, c, g or t
  modified_base (18096)..(18096): a, c, g or t
  modified_base (18135)..(18135): a, c, g or t
  modified_base (18162)..(18162): a, c, g or t
  modified_base (18302)..(18302): a, c, g or t
  modified_base (18309)..(18309): a, c, g or t
  modified_base (18341)..(18341): a, c, g or t
  modified_base (18436)..(18436): a, c, g or t
atttaaatgcattagtaatggctattctatatagcaatataagaactgttacaaaaaaanggggggcaattacaggtagttatggatgatgagtgaaacagatattggagaaccggggaatgaatgatgtctgagtcttatatatcagaactccttcgctgtcgctgggggctcctgtgcttatgtcgtttccccgattcggttttgaacgattaccgaatgttgaagaattatgccaaaatatagaaaggatttactgcatgaatacccaatatttacagtatgttcgtgagcaacttatggcagctactgctgacttgaacggagcaacgaaaggccagctcgaagcctggcaggagcatgcacaatttgatactggtacatacaaacgaaagaagccgcgcattctggatgtggtaactggcaagatgattacgctggataatacgccgacttccggtaagcagtcgtacgcaaaaggttcatccattgctttggtcagcccggttgaattctcaacctcttcatggcgccgcgcggttttgtctctcgatgaacatcagaaagcatggttgctttggtgttacagcgaaagcgttcgatgggggcatcaggtcaccataacgcaatgggcatggagcgagtttaaagatttgttaagtaacagaaaaattgcaggtaagacactggatcgcctgaagacgttaatctggctggctgcacaggatgtgaagagcgaacttgcagggcgtgaggcctatgaataccagacactggcatcattggtgggagtgacaacaaaaaactggtccgagacatttactgaacgctgggttgcaatgaagcacatttttctacagcttgatagtgatgctttattgcttgtgacgagaacacgttcaaaacaaaaggcagcatttttacagcaaaatattgcaaaactggattaaaagccatatacttcatgcaaatttggtatgttgtaaaaaatnnnntaaacccgctgccgagtgggtttttttatgccctgagttgtacttgtacggtaaacatgctggctgctatgtaatagagtttttttagcctgtaacctcttgacggcattgaattgcttttgttatgagttgtaagccaatgttatcatcttgtattggggtggttatgaaggatggtgcgctgctcaggagttcttcactttttattgcctacatgggatgccttggatgggggagtgcttatttctatggatggggtacttctttttactacggcttcccatggtggattgtaggtgcaggtgttgatgatgttgccagaagtttattttttgcagttatcgtcattgctatatttcttatcggttggggtattggtgttgtattctttttcgcagtgaaaagaaaacattctatgcaagagctaaatgtatttcgcctttattttgctgtggaattattgtttgtgccggcaattattgagttttctatattgagacagaagattcaggtacctcttttgctactgtcagcagcgattgcgctggcggttacaatttcgataagatcttatgggcgatttttatcggtatcatgcttctatgataagccatttataaaaaaacatttttttgagattgtgatgattgcttttgtggcatatttctggcttttttcatttctgacaggatattacaaaccacagtttaagaaagaatatgaaatgattaattataatgatggttggtattatgttcttgctcgttatgataattgtctggttttgtctacttctttcaatgcaggtagtaaaaggtttgtcatttatcaatcagcacaagataagaatcttcaggttgatattgtaaggaccagaatttaattggctgcataaataatattttaagttgcaagttggctattcgtaggaatagaaccttaggcatgctgaatgcgtttcctgaacattgttttataaactgtgtctgcttgctgttgtgatcctgcttttagtgatggtgatgatggatttcaccagcaggataatgttggtactgactgatggcgctctggtctgcggcattgtggtattgctgtggccgatgatgaaagaacagaatgaataattcttgacttttttgtttactgtttattaaaaaatcaaccgcatggtgaatcctccttggaggggctaaatgatcgagttttaagggcacgtagcgagttctgtttgatcattgcagaacttagcgggaggcgccatgcgtacatcactaatgttatttccttctatcattttccttgtgagttctggctgcgcatggcgcggccttttttttatgacctgccactggcagatggtcatcctgtgatttgattccggttccggctttttaactctgttcctgtacacgggagaaattctatgtcgattaatcgttatgatattggttacaagaagtaccacgtattgtgttgagatagaaagcatggtgccagaggtaaatgcagcagcataataaaaaagagccagcgcagaagagaacgggtaaaagagtctgcgctggcgtggggatattccccgtggagaaatgatatgtaacacacatcgggaacctttctatataaacattatcattattgtcaatcataacagtcaggtattatgacgtttatgcatcagggccatcaggaattaactggtggctttttattgttgtcagcttccggataacgggagacggggtatgtaccagatggaaaaaataacaacaggtgtgtcatacaccacgtcagcggtggggacgggatactggctactgcagttgctggacaaagtctccccatcccagtgggtggcaataggcgtattgggtagcttggtgtttggcttgctgacgtatctgacaaacctttatttcaagattaaagaagataagcgtaaggctgcgagaggtgaataatgtcgccatcattacgcaaggctgttgctgctgctattggtggtggggctgttgccatagcgtctgtgctcatcactggtccgagtggtgacgatggcctggaaggtgtcagctacataccatacgaagatatcgttggcgtatggactgtatgtcacggacacaccggaaaagacatcatncccggtaaaacgtataccgaagcagaatgcaaagccctcctgaataaagaccttgccacggtcgccagacaaattaacccgtacatcaaagtcgatataccggaaacaacgcgcggcgctctttactcgttcgtttacaacgtgggcgctggtaatttcagaacatcgacgcttcttcgcaaaataaaccagggtgatatcaaaggcgcatgtgatcagctacggcgctggacatacgctggcggtaagcaatggaaagggctgatgactcgccgcgagattgagcgtgaagtctgtttgtgggggcaacaatgagcagagtaaccgcgattatctccgctctggttatctgcatcatcgtctgcctgtcatgggcggttaatcattaccgtgataacgccatcgcctataaagaacagcgtgataaaaaagtcagtgagctgaagcaggcgaccgccaccattactgacatgcagcagcgccagcgtgctgctgatgcactcgatgctaaatacacnaaggagttagctgatgcgaaagctaaaaatgatgctcttcggcgcaagcttgataatggtggtcgggtgttcgtcaaaggaaaatgccctgtgccatcctcagacgaaacctccagcgcctccggcatgggcaatgatgccaccgtcgaactctctccagttgctggacgaaacgttctcggtatccgggacggaattatccgcgaccaaacagcactgagaacgcttcaggaatacatcaggacgcaatgccttcgatgatagcgataattntactcatcatccttcacatctggctctgtagacagggtggtgctcacttctggagtgaatcatggttaaacatctcattgctgatgcttgatattgagcatctggcgcgcggtaaggggctgcgttgagataagagccagtcattaaaaatacctggatttagcctcgcattcgcggggcttttttattgccattacaaaagccactccctacagagtggctttgataatggcttataccctacacgggataacttaactgatatcccttttaacggataaaggtattcaagcctgacacatcatgcgctgtatcgtcgctgtattcccgcattaaccatgaccgtagcccgacggggaactccttctgcncgagtgtgcgggaataatcaaaaacgatgcacaccgggtttttaccgcgctaatgattcgcgggtttgtccctcatgctcgccagtcctgtgngggggtggaagaaacaggacactcacacagattcttgtgggtcgatgctattcctttctggattatcccgatgccattcatgcaaaggctgtatcagacgttcgtcatggctttcaggctgacggctcctcccggtggggtggcctgccacggggcgggagcgtcgcggaaaaaggctagtttttgcatttttatcggccaccatcatctttgcatcttattgattattaatggttatttgttttttgtatgtcgaattgagtgttttttgttcgacatcgaacgcgttttcttaaagttgttcgcacgatgcatgtttaaagctctccggaggaaatatggatcatgagttgaaaaacctggtgctgaatattaatcaactggcggctttatctggtctgcaccgccagactgtcgtggcaagactgaaaaacattcgtcccgctggtggacatgacaaactcaagctataccggttgaccgatattctgactgaatttatggggttaccaccgccggttgctgagggcgaaatggatccacatgaacgcaaagcctggtatcagtctgaacgtgagcgtcttaagttcgaacaggaaacggcacaactcattccggccagtgatgtcagacgggagtttgccatctgggcaaaagcggtcgtgcaggtgctggagacattaccggatattctggaacgtgactgtggtctgcagcctgccgctgtgagccgtgttcagtccattattgatgatctgcgcgatcagatagccctgcgggtgaccgaagcaggtgcggatgatgaggaggaattacagcaggaggagtaatgctgaatcaggaaaccgcaaaggcagcacgaaccgattcaggttatatccttcgcgcaccgagacgaatgcgggttgctgatgccgttgctcagtatatgcgggtgcccatgggggccgggaactcagtcccgtgggatccgctggtggcaccgtatgttattgagccgatgaactgcctggcctcgcgtgaatacgacgcagtgatatttgttggcccggcacgaaccggcaagactatcggcctgattgacggctgggtgatttacaacgtgatttgcgatcctgcggatatgctgatcattcagatgacggaggaaaaagcccgcgaacactccaaaaaacgactcgccagaacgtttcgcgtcagcccggaagtggtcagtcgcctgagtccgaacaaaaatgacaacaacgtttatgacagaacattccttgctggcaactacctgaaaatcggctggccgtcagtcaatatcatgtcctcatcagattataaatgcgtggcgctgacggattatgaccgttttccggaagatattgatggcgagggggatgccttctctcttgcctcaaaacgtaccaccacatttatgtccagtggtatgacgctggtggagagttcccccggcagggatgtgaaggatgtgaaatggcgacggacttcaccgcatgaggctccaccaaccacggggatactgtcgctctataaccgtggcgatcgccgtcgccggtactggccctgtccacactgtggtgagtattttcagccctgcggcgatgtggttgctggtttccgtgatattgccgatcccgtgctggcaagtgaggcggcttatattcagtgtccttcctgttcaggacggattatgcctgaacaaaaacgtgagctgaacggacgtggggtctggttgcgggatggtgaatccatcaatgcggatggtagtcgttatggtgatccccgacgctcacgtattgcgtcattctggatggagggtccggcagctgcttaccagacactctcgcaactcgtttacaaactgcttactgcagaacaggaatacgagacaaccggaagtgaagaaacactcaagacggttatcaataccgactggggattaccttatcttccccgcgccagcatggagcaacgaaaaagtgaactgcttgagcagcgggcagagccagttccttccagcagtgtgccggatggcgttaatttccttgtggcgacagtggatgtgcaggcgggacgtcatcgccgttttgtggttcaggtaacgggctatggcagccgtggcgaacgctggattattgatcgttacaacatcacgcagtcattgcgcggtgacagcgacggtgagagccagcgaattgatccggccagctatccggaagactgggatgtcctgctgacggatgtttttcataaaagctggccgctggcctccgatccttctcaacaaatgcgactgatggcaatggcggtggactccggcggtgaagacggggtcactgataatgcctataaattctggcgtcgttgccgtcgtgatggccttggtaaacgtatttacctgtttaagggcgacagcatccggcgcgcaaaactgatcacccgtacattccctgataacaccggacgaacgggccgacgggcgcaggccgcaggtgatgtgccgctctggcttcttcagacggatgcactgaaagaccgggtgaataacgcgttatggcgtgactctccaggtcccggctatgtgcatttccctgactggctggggagctggttttacgacgaactgacgtatgaagagcggagtagtgacgggaaatggagtaagccgggtcgcggtgccaacgaagcttttgacctgatggtgtatgccgaggctctggtcattctgcatggatacgaaaagatccgctggccggatgcaccggggtgggcgagccgggaaacctggctggagagtgtcccggacagtaccgaaccgtcaccctcaccggaaccggtatccacgcctgttaaaaaacaaaaacggaagaaaacagtaactgacgatgttaacccctggctgacttccggaggatggttatgaaccagaatgatatcgaagccatgattcagcgttatacggaagctgaaatggcggtgctggacggaaaatccgtcacctttaatggtcagcagatgaccatggaaaacttatctgagatccggcagggacggcaggagtgggagcgccgccttgcggctctgattacacgacgacgggggcatcccgggtaccggctggcgaggttctgatggcaattcttgatgatgtgattggcgttttttcaccaggatggaaagcggcaaggctgcgttcccgtgcggtgatccaggcttatgaggccgtaaaaacgacgcggacacacaaagcccggcgggaaaaccgaactgccgaccagttaagccagtacggggccgtgtcgttacgtgagcaggcccgttaccttgataacaaccacgatctggttattggtgtatttgacaagctggaagaacgggtggtggggaaaaacgggattattgtcgagccacatccggtattacgcaatggggccattgcccgtgatctggcagcggagatacgcacccgatggagtgaatggtctgtcagtccggaagtcaccgggcagtttacccgtccgatgctggaacgtctgatgctgcgtacctggctgcgcgatggtgaggtgtttgcccagatggtttccgggcgcataaacagcctgacgccttctgccggtgttcatttctggctggaggcgctcgagccagactttattcccatgaccagtgatgagagcaacaggctgaatcagggcgtgtttgttgatgactgggggcgtcccgaaaaatatctggtgtataaaagccgtcccgtatccggacggcagatggaaaccaaagaagtggatgcagagcgaatgctgcatcttaaatttgttcgccgtctgcaccagatgcgcgggacgtctttgttgtccggtgtgctgatccgcctcagtgccctgaaagagtatgaggattctgagctgactgcagcaaggatcgccgctgctctggggatgtacatccggaaaggcgatgggcagagctatgaaccggatggtaatggcagcaaggataaggaacgcgagcttaccattcagccaggcattatttacgacgatctgaaacccggcgaagaaatcggaatggtgaagtcggatcgccccaatcctaaccttgaaacttttcgtaatggtcagttgcgtggcgtggcggcgggcagtcgtctgagttttttccagtacagcgcgcaactataacggcacttacagcgcccagcgtcaggagctggttgaatccactgatggctacctgatcctgcaggactggtttattggtgccgtcacccgcccgatgtatcgtgcctggctgaaacaggctgtggcatccggtgttatcaggctaccccgcgatcttgaccgttcttcactgtataccgcggtgtattccggaccggtgatgccgtggattgaccctgttaaggaggctgaggcctggaaaattcagattcgtggtggagcagcgacagaatcagactgggtacgtgcaggtggtcgtaatccggatgatgtcaaacgtcggcgcaaggccgaaattgatgaaaaccgcaagctggatctggtatttgataccgatccggccagtgataaaggaggcagcagtgccgcaacgaaacgacaggagccgcagcacaccgacgaccagtccgaagaataattcctggttcaggatgcaggctggtcaccagagtgacgcggatatttatatttatgacgagattggtttctggggtgttacagcgaagcagtttatcagtgatctgaatgcactgggcgatatcacccacattaatctccatatcaattcaccgggtggcgatgtctttgaaggcatcgccatttttaatgcactgaaaacacatggtgcgtccattaccgtttatgtcgacggtgtggcggcgtcaatggcgtcggtcattgcgatggtgggaaaaccggtcattatgccggaaaactccttcatgatgattcataaaccatttggctttacgggcggtgatgcggaggacatgcgcacctatgccgacctgctcgataaagttgaggcggttctgttacccgcttatgcacagaaaaccgggaaaaccaccgatgaaattgctgccatgctggcggatgagacctggatgtccggtgccgaatgtctggcacatggatttgctgatcaggtgacgccagccgttaaggcaatggcatgtattcagtcaaaacgtacagaggaatttaaaaagatgccggaatccattcgaaacatgattactccgccacgcaacagtgctccacgcgtacaggatgatggacctgcagcctcccggacgccagtgcaggcagcagcacctgtggtggatgaaaacagtatccgtgcgcaggtactggcagagcaaaaagcgcgtgtaaacggtattaatgatctgtttgccatgtttggcgggcgttatcagacgctgcaggctcagtgtcttgccgatcctgaatgttcgctggagcaggcccgcgaaaagctgttgaacgagatggngcgcgagtccacgccatctaataaaaataccccggntcatatttatgccggaaacggtaattttgtgggggatgggatccgctaggcgctgatggcgcgtgccggatttgaaaaaaccgaacgtgataatgtctacaacgggatgaccctgcgtgaatatgcccgtatgtcactgactgaacggggtattggggtttccagttataacccgatgcagatggtcggtgcggcgttcacacacagtacgtctgacttcggtaatattctgctggatgttgcgaacaaagccattctgcagggctgggaagatgcccctgaaacctatgaacagtggacgcggaaaggtcagttgtctgattttaaaattgcccatcgtgtgggtatggggggcttcagtgctctgcgtcaggtgcgtgaaggggcggaatataaatacgtcaccaccggagataaacaggccactattgcactggcgacctatggcgagctgttcagtatcacccgtcaggccattatcaatgatgatctgaatatgctgaccgatgtcccgatgaaactgggccgtgcggcgaaatccactattgccgatctggtttatgccattctgacgtctaacccgaaaatctccacagataatgtaagtctgttcgataaagcgaaacatgcaaacgtactggagagcgctgcaatggacgtggcatcgctggataaagcccgccagttgatgcgcgttcagaaagagggggagcgtcatctgaatattcgtcctgcgttcgtactggtaccgacggcgatggagtctgttgctaacaaggtcattcgctcctcaagtgtcaagggggctgacattaacgccggtattattaacccggtgaaagattttgcgaccgttattgcagagcctcgtcttgatgataacagccagaccaccttctacctggctgcgtcaaaaggctccgatacgattgaagtggcttatctcaacggtgtggatacgccatatattgatcagatggagggcttcagtgtggatggcgtgacaacgaaagtgcgtattgacgccggtgtcgcgccagttgatcaccgcggtctggtgaaatgtacggcgtaaacgtcgcagacaacaactctgatggcccgtaagggctttttttgtacctgaaatcagcccctgaacggggctgtgcggagacagttatggcaaagaattttgtagaagaaggaaaaacggtggcgattgttgccagtgcagccatcagcagcggagatctggtgcaggtgggcgatgtttttgcggtggcgctgaccgatattccacagggtgaaacaggcgacggcatgaccgaaggtgtgtttatgctgcctaagctgaaaacggatgacatgaaaacgggtaagaaggtttatctgaagtcaggaaaagttcagctgactaacagcggctctgatccgctggtcggggttgtctgggcagatgccggaaccagtgcagaagaagtgccggtaaaactcaatgtctgatcccttttcccggctggcagcgcgtatggatgctatcacggtcagaaagatgggaaagacagcctcgattaatgatgtcgatatgactgtgatcccgggagaaacactggcagagctgaatgctctgtccggacctgcggtctctctggtggtgttttcttcgggataccgcccacggcgcggggatcgcgttgtttatgacggacaacaatggacggtcacacggcatgaacgctttaacggtaagccaatgatctttattgagtaaagaggtgtgggatgaaggggcttgagaatgccatccgcaatctgaacagccttgatacccgtatggtgccacaggccagcgcatgggcgataaaccgtgtggcacanaaagcggtctcggttgccacccggcaggttgccgggaataccgttgcgggagataaccaggtgaaagggatccccctgaaactggttcgtcagcgtgtccgggtgtttaaagccagtccgtcaggaaaaatgacggccaggatccgcgttaaccggggcaatctgcccgccattaagctggggacagcccgggtcagactggcccagcgtggtggaaaactgcagtaccgtggcagtgtgctgaaggtgggtaaatatcttttccgggatgcgtttattcagcaactggcgaatggtcgctggcatgtgatgcggcgtattgatggcaaaaatcgttaccccattgatgtggtgaaaatcccgctgtccggaccgctgacacaggcatttgaagatgcccgcgaccgcatcattgctgcggaaatgccgaaacagctggggtatgcactgaaacaacaactgaggttatggctgacccgatgaaccgacatacacaaatccgccaggtcgtactggcacgccttcgggaacagtgtggagacagcgccacgttttttgacgggcttccggcatttgttgatgcgcaggaactgcctgccgtggcggtgtggctgagtgatgctcagtacaccggaaaaatgacggatgaagatgactggcaggctgttctgcatattgctgtcttcatccgggcacaggcaccggattcagagctggatatgtggatggagagcaccattttcccggccctgaatgatgtatcggcactttccggactcatcgacaccctgatcccactcggttttaactatcaacgtgataatgagatggccacctgggcgatggcggaaatcacgtaccagatcacgtacacgaattaaggaggtggtaatgaccacgccaaatccactggcaaagacgaaaggtgcggggacgacgttctggatgtataccggcaacggcgatgcgtttgcgaaccctttgtcggacactgactggctgcgtcttgcgatggtgaaggatctgcaacctggcgaaatgaccgctgatgcagaagatgacacttatctcgatgatgaagatgcagactggaaaacgacaacccaggggcagaaatccgttggtgatacttcggcgacgctggcctggcgtccgggtgacagcgggcagaaaaaactggttcagttgttcgactccggtgaagtctgcgcgtttcgtatcaaatatcccaacggcactgttgatgttttccgcggctggctgagctcactgggtaaaaccattgcctcaaaagacgtgatgacccgcacagtgaaaatcagcggtgtggggcgtccatatctggcagaggagggcactgaaactgtgggcgttaccgggctgacggtggcaccggcatccgccagtgtcaatgtgggagcaaccaccacgctgacctttacagtaaaacctgacggagccagtgacaaagcgatcagtgtgcattcgacagatccacagacagccactgtgaccctgaacggacttgtggccacggtgaaaggcgtgaagcagggcagcgtcagcattgtgggcatgaccgctgacgggaattttgtggctgtggctgcggtgactgtcagcgctgcaggttaacaggacgatactcatcatttgccccggttatccggggcttttttgcaggtggagaacatgatgtttctgaaacagggcacgtttaattatgaaaagcagtccgtggtgctcagtgagctgtccgggctgcagagaattgaatatctggcgtttgttcagcagcgaacggcaaagtttgatgccgaagagggagaactgccggaggctgaacgacagattgcttttctgcggatggggatggatatcaatgcctggctggtttcccgctcactgtggaatgcggaacagtctcaggatgttgagacgctttgcgcatccgttattacaacatggtcgtatgatgccctgggagcgggggcggagatggttctgtcgctgagcggtatgggagccattgagaatgccggggatttggagcatgaggtgctgacgccggaaaagtcctgacgcgggaaatgcagtttgtcatgcggcttgcccgggagttccggcgggcagactggcggcggatgctgtcggaaatgtcggccactgagcttggtgagtggggcgattatttccggatgcagagcttcagtgatgtgtggatggatgcgcagtttgcctcgctgaaggcattgatcgtgagaatggtgtccggtagcagtgatgctgcggtggctgatttcagccttttaccggaagagaacgggataccggagcgaacggacgaagaactgatgcatcttggggaaggtatttccggaggtgtgcgttatggaccagatagccaacctggtcattgatttggggattgatgcggcagagtttaaaaatgaaattccccgtatcaaaaaccttctgaatggtgcagccagcgatgcagaacggtcttctgcccgtatgcagcgttttatggagcgtcagactcaggccgcccggcagacaatgcaggcggcttcttcggctgcaacagccgcatccgtccatgcgcagacggtggagaagagcgcacaggctcatgaacgcatggcccgcgaggtggagcaaacccgccagcgtatggaggcactgagccagaaaatgcgcgaggaacaggcgcaggccatggctctggcggaggctcaggataaagcggctgctgcgttttatcgtcagattgacagtgtgaaacaggccggtgcggggctgcaggaattacagcgtattcagcaacagatccgacaggccagaaacagtggcgggattggtcagcaggattatctggcgctgatttctgaggttacggcgaaaacccgtgttcttacacaggctgaggaagaggctacccgacagaaagtggcgtttatccgtcagcttaaagagcaggcaacccgccagaatctttcttcttctgagttgcttcgtgctaaggctgcccagctgggggtaagcagtgctgcagaagtgtatatccgcaaaatggagcaggcaggaaaagccacgcattcgctgggtctgaaaagtgcagcagcccgtcaggagataggcgttctgataggtgaactggcccgcggtaatttaggtgcgctgaggggatccggaataacgctggctaaccgtgccgggtggatagacacactgatgtcaccgaaaggcatgatgccaggagcggttattggcggtattgccgcggctgtctatggtctgggtaaagcctggtatgacggtcagaaggagggggaagaatttaaccgccagctgtcgctgacggggcattatgccggagtcactgccgggcagctgtggacgctcagtcgtgctatttccgggaatggtatcacgcaacatgctgcagccggtgcgctggctcaggtggtggggagtggtgcatttcgtggaaacgatatcggtatggtggcgagagctgccgcacagatggagcgatcggttggccagtcggtcagcgataccataaatcagtttaagcggctgaaggatgatcctgtaaatgccgcgaaggctctggacaatgagctgcattttcttactgccactcagcttgagcagatacgcgtccttggggagcaggggcggtccagtgatgctgcacggatagccatgtctgcactggcagaggaaaccggtcggcgtactgcggatattgataataacctcaatgcgcttggcagtacgctgaagtatctgtctgatttgtggagtcgtttctgggatgcggccatgaatattggtcgtgaagactcgctggatgaacagattgccgctttacaggagaaagtgtcgcgggcgaaaagactcccctggacggcatcatcttctcaggttgaatacgatcagcagcgtcttaacgatcttcaggagaaaaaacgccagaaggatttgcaggatgcaaaagagcaggcagagcggaattatcaggagcaacagaaacgccgtaatgctgaaaatgctgcactgaaccggatgaatgaaacggaagcagcacgacatcagcgtgaaatagcgcgtattaatgccatgcagtacgccgatcaggctgtcagggatgcggcgatacaacgtgaaaatgaacgttacgagaaagccctggcatccggtaagaaaaaaacacgcgaaccccgtaatgatgaggccacccggttattgctgcagtacagtcagcaacaggcacaggtggaaggacagattgctgctgccagacagtcagcaggcattgccacggaaaggatgacagaagcgcataaacagcttctggctctgcagcagcgcatcagcgacctggacgggaaaaaactgacggcagatgaaaagagtgtgctggcccgtaaagatgaactgattcaggcactgacgctgctggatgtaaaacagcaggagcttcagaaacagacggcactcaacgagctgaagaaaaaaacaattcagctgaccagtcaactggctgaagaagagcgcgctcagcgtcagcaacatgacctggatatcgccacggtgggtatgggtgatcagcagcgacagcgatatcaggtacaactgagtcttcgccagaaataccagcaacagctggagcagttgaggcgggatagtgagcagaaagggacatataacacggatgactacagaaaggccgagcaggcgctgacggagagcctgaaccgacaactgaatgagaatcgccgttactggcaacagcttgaagttgtacagggtaactggaaaaacggagtcctgcgtgcatttcaggattttaccgtggatgcagataatacggcagaaacagcagaacaggtgttctcgtcagccttcagcaacatgggaaatggcctggcaacttttgtcactaccggcaaactcaatttcaaatccttcacctcttctgtgctgtcagatatggcgaaaatcctggcgcaggcaaccatgatgaaatcgataaaagggattggcagtgtactgggatttgatctcagcagcctttccctgaatgccaatggggggatttatcagtctgctgatttgagtcgttacagtggcacggtggttaaccgtccgacgttttttgcttttgcaaaaggcgcgggtgtgatgggggaagcgggacctgaagccattctgccattgcgtcgtggtgctgacggtaagctgggggttgtggcggatattgggggttcaggtatggcgatgttttccccgcagtacaacatcgagatcaataacgatggcacgaacgggcagataggtccggctgcnctgaaggcggtttatgacctcgggaaaaaagcggcagcggactttatgcaacagcaggcccgtgatggtggtcggttaagtggagcatatcggtaatggagacgtttcactggaaagtgcgcccggatatgaatgtggtatcagagccgaaagtggtgacagtgaagntgggcgatggttatgaacagcgtcgtgcggcgggactgaataaccagttgtcgacttacagcgtgacgatacgtgttcgtaaatgtgaacacccatctttaaaagcctttctggaacggcacggtggcgtccgtgcatttcagtggacgccaccttatgactggaaaccgatcagggtggtttgtcgtaaatggtcggcaagcgtgggggcgctgtgggtaaccataacggcagattttgaacaggtcgtggcataggaggctctgatgcaggatattccacaggaaacacatcatgagacgacacgcctcantcagtcagcccaggcggtgctctgggaaatcganctgacagaggtcggtggngaacgttattttttntntaatgagcagaacgaaaaaggtgagccggtnacctggcaggggnggcagtatcaggcataccccattcaggggacgggatttgaactgaatggcaagggcagtgctgcccgtccgacactgacggtttctaacctgcacggcatggtcacggggatggnggaagacctgcagagtctggtcggcggaacggtggtcaggcgtaaggtttacgcccgttttctggatgcggtgaacttcgtcaacggaaacagcgacgccgatccggagcaggaggtgatcagccgctggcgcatcgagcagtgcagcgaactgagngcggtnagtgcctcttttgtactgtccacgccnacggaaacggatggcgctgtttttccgggacgnatcatgctggccaacacctgcacctggacctatcgcggngatgagtgcggttatcacggtccggcngtcgcggatgaatatgaccagccgacgtccgatatcacgaaggataaatgcagcaaatgcctgagtggctgtaagtttcgcaataacstcggcaactttggcggcttcctttccattaacaaactttcgcagtaaatccnatgacanagacagaatcagcgattctggcgcacgcccgncgatgtgcgccagcggagtcgtgcggcttcgtrgtgagaacgccggarggggaaagatattttccctgcgtgaatatctccggtgagccggaggngtatttccggatgtcgccggagkactggytgcgkgc

SEQ ID NO: 194 - DNA, 689 bp, Escherichia coli
  Strain O55:H7
  modified_base (128)..(128): a, c, g or t
  modified_base (245)..(245): a, c, g or t
  modified_base (404)..(404): a, c, g or t
tgcagggtgagattgtggcgctggtccacagycaycccggtggtctgccctggctgagtgaggctgaccggcggctgcaggtgcagagtgatttgccgtggtggctggtctgccgggggrcgattcanaagttccgctgtgtgccgcatcttaccgggcggcgctttgagcacggggtgacggactgttacacgctgttccgggatgcttaccatctggcggggattgagatgccggattttcancgcgaggatgactggtggcgtaacggtcagaatctctatctggataatctggaggccacagggctgtatcaggtgccgttgtcagcggcgcagccgggcgatgtrctgctgtgctgttttggttcatcggtgccgaatcaygccgcaatttactgcggngacggcgagctgctgcaccatattcctgaacaactgagyaaacgagagaggtacaccgacaaatggcagcgacgcacacactccctctggcgtcaccgggcatggcacgcatctgcctttacggggatttacaacgatttggccgccgcatcgaccttcgtgtaaaaacgggggccgaagctatccgtgcgctggccacacagatcccggcgtttcgtcagaarctgagcgacggctggtatcaggtacggattgccgggcgtgatacaggygaaaatgaattat

SEQ ID NO: 195 - DNA, 1094 bp, Escherichia coli
  Strain O55:H7
  modified_base (262)..(262): a, c, g or t
  modified_base (320)..(320): a, c, g or t
  modified_base (356)..(356): a, c, g or t
  modified_base (425)..(425): a, c, g or t
  modified_base (469)..(469): a, c, g or t
  modified_base (873)..(873): a, c, g or t
cgtcttaatgagccgctggcaaatggtgcagtgatccacatcgtgccgcgcctggcgggtgccaaaagtggcggtgtgtttcaggcagtgctgggtgcggcgctgattgcggtggcatggtggaaccctgtgggctggctgggggccgcggctgtatcgggtatgtatgcagcaggggccagtatgatcctgggtggtgtggcgcagatgctggcaccgaaagccagaactccccgtacacagacaacggataacggyaaancaraacacctatttctcctcactggataayatggttgcccagggcaatgttctgcccngttctgtacggtgaaatgcgcgtgggrtcacgtgtngtytctcaggagatcagcacggcagacgarggggacggtggtcaggttgtggtgattggtcgytgatgnaaaatgttttatgtgaaaccgcctcmgggcggttttgtcgtttntggagcrtgasgaatgggtaaaggcagcagtaaggggcataccccgcgcgaagcgaaggacaacctgaaatcatcccagatgctgagcgtgatagacgccatcagcgaaggaccgattgaaggtccggtggatggattaaaaagygtgctgctgaacagtacgccagtgctggacagtgaggggaataccaayatctccggtgtcacggtggtrttccgtgccggtgagcaggagcagacaccgccggagggrtttgaatcctctggttcagaaacggtgctggggacggaagtgaaatatgacacaccgatcaccaggaccatcacgtcggcaaacatcgatcgtctgcgctttactttcggtgtgcaggcactgcgggaaaccacctcaaagggggaccggnatccgtcggaagtccgcctgctggttcagatacagcgtaatggtggctgggtgacggaaaaagacatcaccattaagggcaaaaccacgtcgcagtatctggcctcggtggtggtggataacctgccgccgcgcccgtttaatatccggatgcgcaggatgacgccggacagcaccacagaccagctgcagaacaaaacgctctggtcgtcatacaccgaa

SEQ ID NO: 196 - DNA, 2821 bp, Escherichia coli
  Strain O55:H7
  modified_base (15)..(15): a, c, g or t
  modified_base (209)..(209): a, c, g or t
  modified_base (254)..(254): a, c, g or t
  modified_base (352)..(352): a, c, g or t
  modified_base (523)..(523): a, c, g or t
  modified_base (598)..(598): a, c, g or t
  modified_base (778)..(778): a, c, g or t
  modified_base (1492)..(1492): a, c, g or t
  modified_base (1570)..(1570): a, c, g or t
  modified_base (1726)..(1726): a, c, g or t
  modified_base (1777)..(1777): a, c, g or t
  modified_base (1810)..(1810): a, c, g or t
  modified_base (1819)..(1819): a, c, g or t
  modified_base (1838)..(1838): a, c, g or t
  modified_base (1852)..(1852): a, c, g or t
  modified_base (1885)..(1885): a, c, g or t
  modified_base (2041)..(2041): a, c, g or t
  modified_base (2140)..(2140): a, c, g or t
  modified_base (2302)..(2302): a, c, g or t
  modified_base (2350)..(2350): a, c, g or t
  modified_base (2392)..(2392): a, c, g or t
  modified_base (2428)..(2428): a, c, g or t
  modified_base (2523)..(2523): a, c, g or t
  modified_base (2560)..(2560): a, c, g or t
  modified_base (2575)..(2575): a, c, g or t
  modified_base (2641)..(2641): a, c, g or t
  modified_base (2767)..(2767): a, c, g or t
  modified_base (2785)..(2785): a, c, g or t
gaaacagtgctaccngaacacggcactggttggcgtgcaggtggactcggagcagtttggcagtcagcaggtgagccgtaattatcatcttcgcgggcgcattctgcaggtgccgtcaaactatgatccggaaaaacgcacttacagcggcatctgggacggaacgttaaaaccggcatacagcaacaacatggcctggtgtctgtggnatatgctgacccacccgcgctacggcatggggaaacgtcttggtncggcggatgtggataaatgggcgctgtatgtcatcggccagtactgcgaccagtcagtaccggacggttttggcggcacggagccgcgcatcacctgnaatgcgtacctgaccacgcagcgcaaggcgtgggatgtgctcagtgatttctgctcggcgatgcgctgtatgccggtatggaacgggcagacgctgacgttcgtgcaggaccggccgtcggataaggtgtggacctataaccgcagtaatgtggtgatgccggatgatggngcgccgttccgctacagcttcagcgccctgaaagaccgccataatgccgttgaggtgaactggactgacccgganaacggctgggagacggcaacagagcttgtggaggacacgcaggccattgcccgttacggtcgtaacgtcacgaagatggatgcctttggctgtaccagtcgggggcaggcacaccgtgccgggctgtggctgattaaaacggaactgctggaaacgcagaccgtggacttcagcgtgggngcagaagggcttcgccatgtaccgggcgatgtcattgaaatctgtgatgatgactatgcggggatcagcatcggtgggcgtgtgctggcggtgaacagccagacccggacgctgacgctcgaccgtgaaatcacgctgccatcctccggcaccacgctgataagcctggttgacggaagtggcaatccggtcagcgtggaggttcagtccgtcaccgacggcgtgaaggtaaaagtgagccgggttcctgacggtgttgctgaatacagcgtgtgggggctgaagctgccgacgctgcgccagcgcctgttccgctgcgtgagtatccgtgagaacgacgacggcacgtatgccatcactgccgtgcagcatgtgccggagaaagagggcatcgtggataacggggcgcactttgacggtgaccagagcagcacggtgaatggtgtcacgccgccagcggtgcagcacctgaccgccgaagtctccgcagacagcggggaatatcaggtgctggcgcgatgggacacgccgaaggtggtgaagggtgtgagcttcctgcttcgcctgaccgtggcagcggatgacggcagtgagcggctggtcagcacggcccggacgacggaaaccacataccgcttcacgcagctggcgctggggaactacaggctgacagtccgggcggtaaatgcgtggggacagcagggcgatccggcntcggtatcgttccggattgccgcaccggcagcgccgtcacagattgagctgacaccgggctattttcagataaccgcnacgccgcatcttgcggtttatgatccgacggtacagtttgagttctggttctcggaaacgcggattgcggatatcaggcaggttgaaaccagcgcgcgttatcttggtacggcgctgtactggatagccgccagtatcaatatcaaaccgggccangattattacttttatatccgcagtgtgaacaccgttggcaaatcggcattngtggaggccgtcggtcgggcgagcgatgatgcngaaggttanctggattttttcaaaggcnagataaccgaatcncatctcggcaaggagytgctggaaaaagtcganctgacggaggataacgccagcagactggatgagttttcgaaagagtggaaggacgctaacgataaatggaaygccatgtggggcgtcaaaattgagcagaccaaagacggcaaacattatgtcgcgggtattggcctcagcatggaggacacggangaaggcaagctgagccagtttctggttgccgccaatcgtatcgcgtttattgacccggcaaacgggaatgaaacgccgatgtttgtggcgcagggcaancagatattcatgaacgacgtgttcctgaagcgcctgacggcccccaccattaccagcggtggaaatccaccggtattttccctgacatcagacggaaagctgaccgctaaaaatgcggatatcagtggcagtgtgaatgcgaactccgggacgctcaacaangtcacggtaaatgaaaactgtacgattaagggcatgctggaggcgacncaggtcagaggtgacttcgttaaagctgtatccaaatcattnccgaaacaggctggtacgtggggtaacacggaaacnccaracgggacggttacagtcaccatcagcgatgatcataactttgaccgtcaaatcattattccgcccattatctttaacggaatagcgtatancgatccgggaagtggtaataacccgggaggtacaagntacacgggttatggntttgaagttcgcaaaaacggtgtattaatcgcatccagagaaactaaaggggccattcccggtagntacagtgcggttattgatatgccgagtggcaggggaagcgtcactctggagtttaaggttttccataaaggcaatcagcgggcaggtaatatcaccgactgtacggtgattgtgaccaaaaaagcngcttccggcatcagtatncgttgaaatatttataaccctaataacgggcgccag

SEQ ID NO: 197 - DNA, 412 bp, Escherichia coli
  Strain O55:H7
  modified_base (11)..(11): a, c, g or t
  modified_base (41)..(41): a, c, g or t
  modified_base (68)..(68): a, c, g or t
  modified_base (79)..(79): a, c, g or t
  modified_base (98)..(98): a, c, g or t
  modified_base (119)..(119): a, c, g or t
  modified_base (122)..(122): a, c, g or t
  modified_base (274)..(274): a, c, g or t
  modified_base (287)..(287): a, c, g or t
  modified_base (292)..(292): a, c, g or t
  modified_base (323)..(323): a, c, g or t
  modified_base (338)..(338): a, c, g or t
  modified_base (356)..(356): a, c, g or t
  modified_base (375)..(375): a, c, g or t
  modified_base (401)..(401): a, c, g or t
cagaaaakcgngaggtaattatgcgtaaagtttgtgcagcnattttgtccgcagccatttgtctggcngtatccggtgngcctgcatgggcgtctgancatcagtccacgctgagcgcnggntatcttcatgccagtacggacgctcccggcagcgatgatctgaacgggattaacgtgaaataccgttatgagtttacggacacactggggctgattacgtccttcagttatgccaacgccgaagatgagcaaaaaacgcattacagcgatanccgctggcatgangattncgtgcgtaaccgctggttcagcgtgatggcngggccgtctgtgcgngtgaatgaatggttcagngcgtatgcgatggcgggtntggcttacagccgtgtgtcgactttntccggggatta

SEQ ID NO: 198 - DNA, 1103 bp, Escherichia coli
  Strain O55:H7
  modified_base (35)..(35): a, c, g or t
  modified_base (86)..(86): a, c, g or t
  modified_base (141)..(141): a, c, g or t
  modified_base (155)..(155): a, c, g or t
  modified_base (195)..(198): a, c, g or t
  modified_base (200)..(200): a, c, g or t
  modified_base (216)..(216): a, c, g or t
  modified_base (256)..(256): a, c, g or t
  modified_base (360)..(360): a, c, g or t
  modified_base (385)..(385): a, c, g or t
  modified_base (403)..(403): a, c, g or t
  modified_base (424)..(424): a, c, g or t
  modified_base (430)..(430): a, c, g or t
  modified_base (472)..(472): a, c, g or t
  modified_base (491)..(491): a, c, g or t
  modified_base (514)..(514): a, c, g or t
  modified_base (571)..(571): a, c, g or t
  modified_base (577)..(577): a, c, g or t
  modified_base (646)..(646): a, c, g or t
  modified_base (655)..(655): a, c, g or t
  modified_base (700)..(700): a, c, g or t
  modified_base (727)..(727): a, c, g or t
  modified_base (769)..(769): a, c, g or t
  modified_base (776)..(776): a, c, g or t
  modified_base (787)..(787): a, c, g or t
  modified_base (837)..(837): a, c, g or t
gcgtaactgacaacaagaggaaaacgcacgacgtnctgaccggaagtgatgacgctcgctacagcaacacatctctggcgtggggngctggcgtgcagtttaacccgaccgaatcagtggccgttgatgtcgcttatgaangctccggcagcggngactggcgcactgacggtttcatcgtgggtgtcggttatnnnntntgattagtaacacagngttatgacagcccgccggttcaggcgggcttttttgtggngtgggtatggcagcagtacaaatatcaggcgtgctgaaagatggtgcgggaaaaccaatacagaactgcaccattcaactgaaagccagacgkmacagcaccanggtggtggtgaacacggtggcctcngaaaatccggatgaggcngggcgttacagcatggacgtngagtanggtcagtacagcgtcactctgttggtggarggattcccgccntcacatgccgggaccatcnccgtgtatgaagattctcaaccnggtacgctgaatgattttctcggtgccatgacggaggatgatgcccgtccggaggcnctgcgncgttttgaacwgatggtggaagaagcagcgcgtcacgcwgaggaggcgaagaagaatgccggagargcngagacgtcngcgaggaatgccggcatatcagccagtmaggcggaagcgagcgcngcaaatgctgatacttcagcagrggangcatcggagtcagcccggcaggcggcagaaagtgcagcctcngcaaagnagtcagaggangcgtcctcgtcctcagcctctgaggccgctcaaaaagccagtgagtcatnacaaagtgcaacagatgccgagttgtcaaraaagacggcagaaagtgcagccggtaatgcagccagggatgcaacgaccgcaacagaaaaagcccgggartcagcagaaagcgcacagtcagcggaacaaagcaggatagcggcggaagasgccgtaaacmgaatycccaccgtggtggggcctcccggaccaaagggggaaccgggtcccgcgggtcctcaggggccgaagggagataaaggagagcgtggagacaccggtccgg

SEQ ID NO: 199 - DNA, 3330 bp, Escherichia coli
  Strain O55:H7
  modified_base (373)..(373): a, c, g or t
  modified_base (396)..(396): a, c, g or t
  modified_base (411)..(411): a, c, g or t
  modified_base (429)..(429): a, c, g or t
  modified_base (462)..(462): a, c, g or t
  modified_base (571)..(571): a, c, g or t
  modified_base (583)..(583): a, c, g or t
  modified_base (604)..(604): a, c, g or t
  modified_base (621)..(621): a, c, g or t
  modified_base (634)..(634): a, c, g or t
  modified_base (917)..(917): a, c, g or t
  modified_base (1383)..(1383): a, c, g or t
  modified_base (1477)..(1477): a, c, g or t
  modified_base (1993)..(1996): a, c, g or t
  modified_base (3276)..(3276): a, c, g or t
gcaaccggtgaacggggaccgggaggagatacaggtccggcaggtccgcaggggccgaaaggygacaggggagagcggggagagaccggtctgacaggaagtacaggtccacagggtccaaagggagataccggkgcaacaggtccggcaggaccrcagggaccgaaaggagaaacaggtgcggctggcccggtgggggcwaccggacctcagggggcgaagggcgacccgggggagacacaaatccgttttcgtctggggccggcgagcattattgagacaaacagcaatggctggttcccgggtacagatggtgcgctcatcaccggactgacctttcttgaccccaaagatgccacacaggttcaggggntgtttcagcatttgcaggtcagntttggtgacgggccntggcaggatgttaagggnctggatgaagtgggcagtgatacaggcagaacnggagaatgacatgaatattttgagaaagcttatgcagagtctgtgcggttgcggaaagcatgatgacygtgaaaacggacggtcacttacagcacaattgcgactgggnccggcagacatnctggagtcagatgagaatggnattattccggagcaggncagggtaatcacncaggtggtgatactggatgcggataaaaagcagatacagtgtgtggtaagaccgctgcaaatcctgcgtgctgacgggacgtgggaaaatattggcgggatgaagtaacccgacagcttcacaaaaccggagtccggctccggtttttgttgtcatgtccggtggatgtttgttaggaaagcaaagatggcaaaactgctggaggttttgtggttgagtatgccaatataattaatagattaaagagttagttgtgaagaaaatatggataaacaggacgacnaatgctttcaccgataaggacaactttccataactcagtaaatatagtgcagagttcaccctgtcaaacggtttcttttgcaggaaaggaatatgagttaaaggtcattgatgaaaaaacgcctattctttttcagtggtttgaacctaatcctgaacgatataagaaagatgaggttccaatagttaatactaagcagcatccctatttagataatgtcacaaatgcggcaaggatagagagtgatcgtatgataggtatttttgttgatggcgatttttcagtcaaccaaaagactgctttttcaaaattggaacgagattttgaaaatgtaatgataatctatcgggaagatgttgacttcagtatgtatgacagaaaactatcagatatttatcatgatattatatgtgaacaaaggttacgaactgaagacaaaagagatgaatacttgttgaatctgttngagaaagagctgagggaaatttcaaaggcgcaggattctttgatttctatgtatgcaaagaaaagaaatcatgcatggtttgatttcttcaganatttagccttattaaaagcaggagagatattcaggtgcacatataatacaaagaatcacggtatttcattcggggaggggtgtatctatcttgatatggatatgatacttacaggtaagcttggtacaatatatgctcctgatggaatttcaatgcatgtggatcgtcgtaatgatagtgtaaatattgaaaatagtgcaataattgttaaccgtagtaatcatcctgctctacttgagggactttcttttatgcatagtaaagtagatgctcatccatattatgatggtttggggaaaggagttaagaaatattttaattttacaccattacataattataatcatttttgtgactttattgagtttaaccaccctaatataatcatgaacacaagtcagtatacatgcagttcatggtaaatgaatttgatatagtttattttgttgtaataaatgatttgcagggtattagatataaacatgaaaattccctcattacagtccaacttcaacnnnnccgccccggcaggatactctgctcccattgctcctaatcgtgctgaaaatgcctatgcggattacgttttggatataggtaagcgaataccactttccgcagcagatttaagcaacgtatacgaaagtgtaatacgcgccgtccatgacagccgtagcaggcttatcgatcagcatacagtcgatatgatcggcaacactgtacttgatgctttgagccgatcacagacatttcgtgatgccgtaagctatggcattcataatgagaaggtacacattggttgcattaaatacagaaacgaatacgagcttaacgaagaatcttctgtcaaaattgatgatattcaatcactaacctgtaacgaattatatgaatatgatgtcgggcaagagccaattttccccatttgcgaagcaggagaaaacgataacgaagagccttatgtcagttttagtgttgcgccagatactgactcttatgagatgccatcgtggcaggaaggactgattcacgagattattcatcatgttactggatctagcgatccatctggagatagtaatatagagttaggacccaccgagattctcgcacgtcgtgtcgctcaagaactgggatggagtgttcccgacttcaaaggatatgcagagccagaacgtgaagctcatcttaggctacgtaacctgaatgcccttcgacaggctgccatgaggcatgaagagaatgagagggctttcttcgaaaggctgggtacgatcagtgaccgatatgaggcgagtcctgatttcacagagtattccgctgtgtctaacataggatacggatttatccagcaacatgattttcctggattggctatcaacgataatttacaggatgcaaatcagatccaactgtatcatggcgccccttatatttttacatttggggatgtggacaaacacaatcagcaatgattcgtctttgcagtgacataaggttactattcatacattttaacggagttgatgatgggtaatcgtgcaacattgtatgtaaaggcaattcccctaattttactgtagtaagtgaacatggccggaacgagactatcagcatcatcggcttcggcccagtaaaaagaggctcggaaaaatgcacaataggcatcacacgtcatgcatggattcaaattgtacataattcaacagtacagctataaatcgtaaagaaactgcagtacgttgtgcacagaaaagtaccgtgattcactattgtacaggtccattgcagcaacaatnttttgtgaattttgcgtgagagaaagaaaaggaataatttgtatataaacaatt

SEQ ID NO: 200 - DNA, 8304 bp, Escherichia coli
  Strain O55:H7
  modified_base (61)..(62): a, c, g or t
  modified_base (2174)..(2174): a, c, g or t
  modified_base (2703)..(2703): a, c, g or t
  modified_base (3328)..(3330): a, c, g or t
  modified_base (3437)..(3437): a, c, g or t
  modified_base (3559)..(3559): a, c, g or t
  modified_base (5044)..(5044): a, c, g or t
  modified_base (6769)..(6769): a, c, g or t
  modified_base (7476)..(7476): a, c, g or t
  modified_base (7576)..(7576): a, c, g or t
ttgctggaaaataaataaaactgataattaaaggcttaaagcttgtattaaatcatatttnnaattttttgttttaaatgcagcgtgttattgtgttttttttaatctatcggtctggtacttgtaatcagtgagtatatcgcaccacttcaggatgctgcagatttagatattgcgacggatgagcagacatcgttactggcggcatggaagcagtatcgtatgccgctcaatcatgttgatacgtctgtatctccagatatcgagtgaccggtaatacctgcgttatagttcgtaaacgttcgtttgatgggatgctggaaggatgaattagttgccagatacaaaaagcaagagttcatttctaatttttgttgccatgttaggggggatgtttgttaaggaaatttagatgggtttattttgaaggttgaaatgtatgttatcgccatattctgtaaatttgggatgttcatggaattctttaaccagaaacctgacttcgcctgataatcgtgttttatcctctgtaagggatgctgccgttcattctgataatggggcgcaagtaaaggttggcaacagaacatatcgtgttgttgccaccgataataagttttgcgttacaagagaaagtcatagtggttgttttactaatctgttgcacaggctgggatggcctaagggggagattagcaggaaaattgaggtcatgctgaatgcatcaccagtgagcgctgctatggaaagaggcattgttcattcgaacagacctgatttacctcctgttgattatgcaccgccagagttaccgagtgtggactataacaggttgtcagtacctggtaatgttattggcaaaggggggaacgctgtagtatatgaagatgctgaggatgcaacaaaagtcctgaagatgtttactacatctcaaagcaatgaagaggtgacaagcgaagttcgttgcttcaaccaatattatggtgccgggagtgcagaaaaaatatatggcaataatggtgatattattggtattagaatggataaaataaatggagaatcgcttttaaatatttcgtccttgccagcacaggctgagcatgctatttacgatatgtttgatagactggagcaaaaaggaattctttttgtcgatacaacagagacaaatgtcttatatgaccgcgcgaagaatgagtttaatccaatagatatatcatcttataatgtttccgaccgttcatggagtgaaagtcaaataatgcaatcttatcatggcggaaagcaagatcttattagtgtggtattaagtaaaatttagtaattttatccagtgtagtggatttgttgcatggatggagttggtaacaaattgtgtggttggcaattcttggcggatcacggaaatgggcaatgtcgctgaggactggcaaatggctatgatccgctttattatcgggtttggtgaccgccttgacggtcacttttaaaaaaatcattttcacagagaggtaaacaggctgctaataagtagcattctcaggagtcctgatgcgccctacgtccctcaacttggtattacatcagtcatcaacgtcgagctcaatgtcagatacagatatcgagtctcttgtaaaagcatcgagcgttcaatggataaaaaataatccgcaacttcgtttccaggggactgatcataatatatatcagcagattgaagcagcactcgataagattggctctacagagacagggcgtgtactcctgaatgctattgaatcaatatcccgacttaaatcagaaacagtggtaatacacctcaactcttccagactaggagttatggcacatagagatatagatgctgagaaccatcgggggactggttccgattttcactgtaatctgaatgcagttgaatatccctgtggggaggggattagcgtggtggactttcatgcgactattgtttttcatgagttgctccatgttttccacaatttaaatggggagcgtttgaaagttgagagttcccgaccagaatcacaaaaatactctccacttttactcgaagaagccaggactgttgggttgggggctttttcagaagaggtgctttcagaaaataaattccgcgaagagattgggatgccccgtagaacctcctacccgcncgactcagctcttattcatgatgacaatacagtgagtctgggattccaacaggtaagactgcatccattgctttagctgtgtttcttgtgctgaatatatattggtggggcaaacggaggcacacaaaactttgcactggattgcaaggctttgtgctattccgatagtggttcaggtggagtaccccaccttttcatcaagccagcccacccaccactgcatcatttctctgcgcttatagagatactgagcatggttgtaaattcagcaaacgacgtaatgtgtttgacaaaaaattagcgcaagaagacaaaaatcaccttgcgctaatgctctgttacaggtcactaataccatctaagtagttgattcatagtgactggatatgttgtgttttgtagcattatgcagtctattttttagactaaatgcattgtaatacattgatattattgggttttgctgtttcgtgttcagcttttttatactaacttgagcgaaacgggaaggtaaaaagacaaaaagttnttttttaatacctttaagtgataccagatagcattgcgccatctggcagagtgattaactaaacatcgcggtaatcgatgcgcttgccagagagtggaaatgaacgttaaacccgaccatcgcgccgctggctccttcatcgacatcaatacgctctacatccagcgcgtgaacggtaaaaatgtagcgatgggtttcgcctttcggcggcgctgcgccatcgtatccggttttaccaaaatcggtacgcgtctgcaaaacgccgtctggcattgctaccagaccagagccaaacccttgcggtaatacgcgggtatcagcgggtaaattaacaactacccagtgccaccagccggagccggttggcgcatccgggtcgtagcaggtgacaacaaaacttttcgttcccgcaggaacatcatcccacgccagatgcggtgaaatattatcgccatcgtaacccatgccgttaaagacatgacgatgcggcaacttatcgccatcgcgcagatcgttactgatgagtttcataaaccctcctttctagtttgcagaaagtgtagccagaaactctcacgctgacttcccgttattggcaaaaaaatgtttcatcctgtaccgcgcnnntaaccgctgcggtcagacgctgcaactgttgcgggagaataatatagggcggcatcaggtaaatcagtttgccaaaaggccggatccagacaccctgttcgacaaanaatttttgcaatgccgccatattcaccggacgagttgtttcgactacgccaatggcccccagcacgcgcacatcggcaaccatttcggcatcacgggcgggggcaagttgctcgcgcagctntacttcaatagccgccacctgttgctgccagtcgccagattcgagaatcgccaggctggcgtttgcagccgcacaggccagcggattgcccataaaagttggcccgtgcataaagcagccggcttcgccgttactgatggtttctgcaacctcgcgcgtggtgagtgtggcggaaagggtcattgtgccgccggttaaggctttaccgaggcacaaaatgtccggcgcgatttctgcatgttcacaggcaaacagtttgccggtacgaccaaatccggtggcgatctcgtcggcaatcagcaagataccttcgcgatcgcacattttgcggattcgttttaaccattccggatggtacatgcgcatcccgcctgcgccctggacaatcggttcaatgatcaccgctgcgatttcatgacgatgcgccgccatcaggcgggcaaagcccaccatatcgcgctcatcccattcaccatccatgcggctttgcggggcgggagcaaacaagttttctggcagatagcctttccacaggctgtgcattgagttgtccggatcgcacaccgacatcgcgccaaaggtatcgccatgataaccattgcggaaggtcagaaaatgctggcgcgcttcgcctttggcttgccagtactgcaacgccattttcatcgccacttccaccgctacggaaccggagtccgcgagaaaaacgcattccagcggttgcggcgtcattgccaccagtttgcggcacagctcaatggctggcgcatgggtgataccgccaaacatcacatgcgacatggcatcaatttgcgacttcatcgccgcattaagctgcgggtgattgtaaccgtggatcgccgcccaccaggacgacataccgtcaaccaggcgtctgccgtcagacaaaattagctcgcaaccttcggcgctcgccaccggataaaccggtagcggggaggtcatggatgtgtatgggtgccagatatggcgttggtcaaaggcaagatcgtccgttgtcataatcgacttgtaaaccaaattgaaaagatttaggtttacaagtctacaccgaattaacaacaaaaaacacgttttggagaagccccatggctcaccgcccacgctggacattgtcgcaagtcacagaattatttgaaaaaccgttgctggatctgctgtttgaagcgcagcaggtgcatcgccagcatttcgatcctcgtcaggtgcaggtcagcaccttgctgtcgattaagaccggagcttgtccggaagattgcaaatactgcccgcaaagctcgcgctacaaaaccgggctggaagccgagcggttgatggaagttgaacaggtgctggagtcggcgcgcaaagcgaaagcggcaggatcgacgcgcttctgtatgggcgcggcgtggaagaatccccacgaacgcgatatgccatacctggaacaaatggtgcagggagtaaaagcgatggggctgnaggcgtgtatgacgctgggtacgttgagtgaatctcaggcgcagcgccttgcgaatgccgggctggattactacaaccataacctcgacacctcgccggagttttacggcaatatcatcaccacacgtacttatcaggaacgccttgatacgctggaaaaagtgcgcgatgccgggatcaaagtctgctcaggtggcattgtgggtttaggcgaaacggtaaaagatcgcgccggattattactgcaactggcaaacctgccgacgccgccggaaagcgtgccaatcaacatgctggtgaaggtgaaaggtactccactggcagataacgatgatgtcgatgcctttgattttattcgcaccattgccgtagcgcggatcatgatgccgacctcttacgtgcgcctttctgccggacgcgagcagatgaacgaacagactcaggcgatgtgctttatggcaggcgcaaactcgattttctacggttgcaaactgctaaccacgcccaatccggaagaagataaagacctgcaactgtttcgcaaactggggctaaatccgcagcaaactgccgtgctggcaggggataacgaacaacagcagcgtctggagcaggcactgatgaccccggacactgacgaatattacaacgcggcagcactatgagctggcaggagaaaatcaacgcggcgctcgatgcgcggcgtgctgccgatgccctgcgtcgccgttatccagtggcgcaaggagccggacgctggctggtggcggacgatcgccagtatctgaacttttccagtaacgattatttaggtttaagccatcatccgcaaattatccgtgcctggaagcagggtgcggagcaatttggcgtcggtagcggcggttccggtcacgtcagcggttatagcgttgcgcatcaggcgctggaagaagaactggccgagtggctgggctattcgcgggcactgctatttatctctggttttgccgctaatcaggcggtcattgccgcgatgatggcaaaagaggaccgcattgtcgctgaccggcttagccatgcctcattgctggaggctgccagtttaagcccgtcgcagcttcgccgttttgttcataacgatgtcactcatctggcgcgactgcttgcttccccctgtccggggcagcaactggtggtgacagaaggcgtgttcagcatggacggcgatagtgcgccactggcggaaatccagcaggtaacgcaacagcacaatggctggttgatggtcgatgatgcccacggcacgggcgttatcggggagcaggggcgcggcacctgctggttgcaaaaggtaaaaccagaattgctggtagtgacttttggcaaaggatttggcgtcagcggggctgcggtgctttgctccagtacggtggcggattatctgctgcaattcgcccgccatcttatctacagcaccagtatgccgcccgctcaggcgcaggcattacgtgcgtcactggcggtcattcgcagtgatgagggtgatgcacggcgcgaaaaactggcggcactcattacgcgttttcgtgccggagtacaggatttgccgtttacgcttgctgattcatgcagcgccatccagccattgatcgtcggtgataacagccgtgcgttacaactggcagaaaaactgcgccagcaaggctgctgggtcacggcgattcgcccgccaaccgtaccctntggtactgcgcgactgcgcttaacgctaaccgccgcgcatgaaatgcaggatatcgaccgtctgctggaggtgctgcatggcaacggttaataaacaagccattgcagcggcatttggtcgggcagccgcgcactatgagcaacacgcagagttacagcgccagagtgctgatgtcttactggcaatgctcccacagcgtaaatacccccacgtactggacgcggggtgtgggcctggctggatgagccgccactggcgagagcgtcacgcgcaggtgacggcgttagatctctcgccgccaatgcttgcgcaagcccgccagaaagatgctgcagaccattatctggcgggagatatcgaatccctgccgttagcgactgcgacgttcgatcttgcatggagcaatctcgcggtgcagtggtgcggtaatttatcaacggcactccgcgagctgtatcgggtggtgcgccccggaggcgtggtcgcgtttaccacgctggtgcagggatcgttacccgaactgcatcaggcgtggcaggcggtggacgagcgcccgcatgctaatcgctttttaccgccagatgaaatcgaacagtcgctgaacggcgtgcattatcaacatcgtattcagcccatcacactatggtttgatgatgcgctcagtgccatgcgttcgctgaaaggcatcggtgccacgcatcttcangaagggcgcgaccagcgaatattaacgcgttcacagttgcagcgattgcaactggcctggccgcaacaacaggggcgatatcctctgacgtatcatcttnttttgggagtgattgttcgtgagtaaacgttattttgtcaccggaacggataccgaagtggggaaaactgtcgccagttgtgcacttttacaagccgcaaaggcagcaggctatcggacggcaggttataaaccggtcgcctctggcagcgaaaagaccccggagggtttacgtaatagtgacgcgctggcgttacagcgcaacagcagcctgcagctggattacgcaacggtaaatccttacaccttcgcagaacccacctcaccgcacatcatcagcgcgcaagagggcaggtcgatagaatcatcggtaatgagctccggattacgcgcgcttgaacaacaggctgactgggtgttagtggaaggcgctggcggctggtttacgccgctttctgacactttcacttttgcggattgggtaacacaggaacaactgccggtaatactggtggttggcgtgaaacttggctgtattaatcacgcgatgttgacggcacaggcgatacaacacgccgggctgactctggcgggttgggtggcgaacgatgtcacgcctccgggaaaacgtcacgctgaatatatgaccacgctcacccgcatgattcccgcgccgctgctgggagagatcccctggcttgcagaaaatccagaaaatgcggcaaccggaaagtacataaaccttgccttgttgtagccatcctgtatttggttaaattgcgagcgaga

SEQ ID NO: 201 - DNA, 3699 bp, Escherichia coli
  Strain O55:H7
  modified_base (751)..(751): a, c, g or t
  modified_base (1580)..(1580): a, c, g or t
  modified_base (2685)..(2685): a, c, g or t
  modified_base (3057)..(3057): a, c, g or t
  modified_base (3697)..(3697): a, c, g or t
gtcttcgattgactgcaatttaaccaattaaattctaaaataatcacgaaaaaaattttacttccgcatcatgcggcgaatgtgggaattgcccaggcggcgggggataggggctgcagacagttatccactattcctgtggataaccatgtgtattagagttagaaaacacgaggcaagcgagagaatacgcggcttgcacgcgaattggcgttaaagacggctcaaagaaatatcttttattttttaactggttagataattgcaatggcagtcactgaacaggcatctcttgccataaaactgacatcactcatcttgacaaatgttaaaaaagccgttgctttggggataacccggtaaggtccgagttttatctcgccacagagtaaattttactcatgattgacagcggagtttacgctgtaacagaaatattatggtgatgaactgtttttttatccagtataatttgttggcataattaagtacgacgagtaaaattacatacctgcccgcccaactccttcaggtagcgactcatgagtaaaccgttcaaactgaattccgcttttaaaccttctggcgatcagccagaggcgattcgacgtctcgaagaggggctggaagatggcctggcgcaccagacgttacttggtgtgactggttccgggaaaaccttcaccattgccaatgtcattgctgaccttcagcgccctaccatggtacttgcgcccaacaaaacgctggnggcccagctgtatggcgaaatgaaagagttcttcccggaaaacgcggtggaatatttcgtctcctactacgactactatcagccagaagcctatgtaccgagttccgacaccttcattgagaaagatgcctcggtaaacgaacatatcgaacagatgcgtttgtccgccaccaaagcgatgctggagcggcgtgatgttgttgtggtcgcgtctgtttccgcgatttatggtctgggcgatcctgatttatatctcaagatgatgctccatctcacggtcggtatgattatcgatcagcgcgcgattctgcgccgactggcggagctgcaatacgctcgtaatgatcaagcattccagcgtggtactttccgtgttcgtggcgaggtgattgatatcttcccggcagaatcggatgacattgcacttcgcgtggaactgtttgacgaggaagtggaacgattgtcgttatttgacccgctaaccgggcagattgtttccaccattccacgttttaccatctacccgaaaacgcactacgtcacaccgcgcgagcgcatcgtacaggcgatggaggagatcaaagaagagctggccgccagacgcaaagtgctattggaaaacaacaaactgctggaagagcagcggctgacccagcgtacccagtttgatctggagatgatgaacgagctgggctactgttcggggattgaaaactactcgcgcttcctctccggtcgtggaccgggtgagccaccgccgacgctgtttgattacctgcctgccgatgggctgctggtggtcgatgaatctcacgtcaccattccacanattggcggcatgtatcgcggtgaccgggcgcgtaaagagacactggtggagtacggcttccgcctgccatcagcgctggataaccgtccgctgaaatttgaagagttcgaagcattagcgccgcaaaccatctatgtttcggcgacgccaggtaattatgagctggaaaaatccggcggcgatgtggtggatcaggtggtgcgtccaaccggattgcttgatccgattatcgaagtgcggccagtggcgacacaggttgatgatcttctttcggagattcgtcagcgagcggcaattaacgaacgcgtactggtcaccacactgaccaagcgaatggcggaagatcttaccgaatatctcgaagaacacggtgagcgcgtgcgttatcttcactcagatatcgacaccgtcgaacgtatggagattatccgcgacttgcgtctgggcgagttcgacgtgctggtggggatcaacttactgcgcgaaggtctggatatgccggaggtttcgctggtggcgatcctcgacgccgacaaagaaggcttcctgcgttctgaacgttcgttgatccagactattggtcgtgcggcgcgtaacgttaacggtaaagcgattctctacggcgataagatcaccccgtcaatggcgaaagcgattggcgaaaccgaacgtcgccgcgagaaacagcagaagtacaacgaggaacacggcattacgccgcaaggcttgaacaagaaagtggtcgatatcctggcgttggggcagaacattgctaaaaccaaagcgaagggcagaggaaaatcgcgaccgattgttgagccggataatgtgccgatggatatgtcgcctaaagcgttgcaacagaaaatccatgagctggaagggttaatgatgcaacacgcgcaaaatctggagttcgaagaagcggcacaaattcgtgaccagttgcatcagctgcgtgaattgtttatcgcggcttcgtgacaggataacgaagaagacagatgacaaaagcaaaattgcctgatgtgctacgcttatcaggcctacatgattctgcaatacattgaattagcgcggtttgtaggccggataaggcgttcangccgcatccgtcataaacaacgcgcactttgtcttcattaggaagccggaattttccttcggatttccgttaacctaaagcctgtaacgccttttccagtgcgctatgtaacaactggcggtcatgacgatacggaatatcgctggcctccagcacctcctgaatcacaatccgctctttcaccgccgagacatccacttttggcccgacgatgaccgcatcaatgacctttttaccaacatactgctccataattgccagcttgctttccagcttcaaattggccgcaggtaaactcaactcacgccccagattgccgatatagaccatcggcgctggcgtgcggcgtaatgcctgcgcgatttccttcancagcagaattggcatcaggctggtgtaaaaactgccaggcccaataatgatgagatccgcttcattgatagcgtgaaccgcctcacgcgttgcgggtacattaggcgttaacaataactcttgaatcggcgtagttaactggtcgatattgacctcgccgtaaacttcatgcccctgatcgtcaatcgccatcagatcaacaggatgctccgacatcggaatcaaatgtgcgtccactttcagcagatttcgaatcagattgatcgcttcaagaggtcgcacgctaaggtgatccagtgccttcaacatcaggtttccaaggttgtgcccggaaagttcgccattaccgccgaaacgatattcaaacattgctgaagcgacgctgggttcagttatcagctggttaaggcagttgcgcatatcgccccaggcaatgccgccttctgaacggcgaatacgccccgtcgagccaccattatccgtggtggtgacgatacccgttaaacgagaacccaaagacgaaagtgatgagagaacgcgtcccagtccatgccctccgccgagagcaacgacacgatcaagatcagccagcgtacgattgcgcatatagtttcctggagtcagattatccgcgctacanta

SEQ ID NO: 202 - DNA, 4061 bp, Escherichia coli
  Strain O55:H7
  modified_base (238)..(238): a, c, g or t
  modified_base (1472)..(1472): a, c, g or t
  modified_base (1739)..(1739): a, c, g or t
  modified_base (1952)..(1953): a, c, g or t
ttgcggggaaacagcaattaacctgccaatattgaggatacaaactattttcttctacctctaaaggacgatgcacgctatgcctccctgatgatgtatatcaaagtaaaaccgccattttcccttattctgtagcgaaatagcacgatcatgacgctatatacatgattacatagcgaaagtgtggatggtaaaaatctcatttacacgctagtatcggcttaaccactaaacactntagcctctgcacctgggtcaactgatatggtgctttggccgtgacaatgctcgtaaagattgccaccagggcgaaggaagaaatgacttcgcctcccgtatctggaaaggtgtacatggcttcacaactgactgatgcatttgcgcgtaagttttactacttgcgcctgtcgattaccgatgtgtgtaactttcgttgcacctactgcctgccggatggctacaaaccgagcggcgtcaccaataaaggctttctgaccgtcgatgaaattcgccgggttacgcgcgccttcgccagtctgggcaccgaaaaagtgcgcctgacaggcggtgagccgtctttacgccgcgactttaccgatatcatcgccgctgtgcgagaaaacgacgctattcgccagatagcggtcaccaccaatggttaccgtctggaacgcgatgtggcgaactggcgcgatgcgggacttactggcattaacgtcagcgtcgacagtctggacgcccgccagtttcatgccattaccggccaggataaattcaatcaggtgatggcagggatcgatgctgcatttgaggccggttttgagaaggtcaaagtcaataccgtgctgatgcgtgatgtgaatcatcaccagctcgacacctttctgaactggatccagcatcgccctatccagctgcgtttcatcgaactgatggaaacgggcgagggcagcgagcttttccgtaagcatcacatctctggtcaggttctgcgtgacgagctactgcgtcgcggctggatccaccaattacgtcaacgcagcgacggtcccgcgcaagtcttttgtcatccggattacgccggagagattggccttatcatgccgtatgaaaaagacttctgcgccacttgcaaccgtctgcgcgtttcctccattggtaaactccatctctgcctgtttggtgaaggcggcgttaacctgcgcgatctgctggaagacgatacccagcaacaggcgctggaagcgcgtatttcagcggcgctgcgggagaagaaacagacccatttcctgcatcaaaacaacaccggtattacgcaaaacttatcgtacattggcggctaaaacgtcaaaaggagagatcagatgagtcaggtaagcactgaatttatcccgacccgtattgctattcttacggtttctaatcgtcgcggtgaagaagacgatacctccggtcactatttgcgcgattcngcgcaagaagcgggccatcacgttgtcgataaagccattgtgaaagaaaaccgctacgctattcgcgctcaggtatctgcgtggatcgccagcgacgatgtacaagtggtgttgattacgggggggactggcctgacggaaggtgatcaggctcccgaagcattgctgccgttgttcgaccgtgaagttgaaggttttggtgaagtgttccgtatgttgtcgtttgaagagattggcacttccacgttgcaatctcgtgcggtagcnggcgtcgctaacaaaacgctgattttcgccatgccgggttcgaccaaagcgtgccgtaccgcatgggaaaatatcatcgcgccgcagctggatgcccgtacgcgtccgtgtaatttccatccacatttgaagaaataagtatgtcgcaactgacccatatcaacgccgctggcgaagcgcacatggtggatgtctccgccaaagcggaaaccnngcgtgaagcgcgggcggaagcctttgtcaccatgcgcagcgagacgctggcgatgattattgatggtcgccaccacaaaggcgacgtatttgccactgcgcgtattgccggtattcaggcggcaaaacgcacctgggatctgatcccgctgtgtcatccgctgatgctcagcaaagttgaagtcaatttacaggccgagccggagcacaatcgggtgcgtatagaaaccttatgccgcctgaccgggaaaaccggtgtcgaaatggaagcgttaaccgcggcctccgtggcggcgctgaccatttatgacatgtgcaaagcggtgcaaaaagatatggtgattggtccggtacgtttgctggcgaagagcggcggcaagtcgggtgactttaaggtggaagcggatgattaaagttctttttttcgcccaggtgcgcgagttggtaggaacagatgcaaccgaagtggctgcggatttcccaaccgttgaagcgttacaccagcacctggctgcgcagagcgatcgctgggcgctggcgctggaagatggcaaattactggctgccgtcaaccagacgctggtgagttttgaccatccgctgactgacggcgacgaagtagctttcttcccgccggtaaccggaggttaagatggcagaaaccaaaattgttgttggtccgcagccgttcagcgtaggagaagagtacccgtggctggcggagcgtgacgaagacggtgcggtagtcacctttaccggtaaggtgcgcaaccataacctgggcgacagcgtcaaagcattaaccctcgaacactatccggggatgactgaaaaagcactggcagaaattgtcgatgaagcgcgtaaccgctggccgctggggcgcgtcacggtgattcaccgcatcggggaattatggccgggcgatgaaatcgtttttgtcggtgtcaccagtgcgcatcgcagcagtgcgtttgaagccgggcagtttattatggattatctcaaaacccgcgcaccgttctggaagcgcgaagccacgccggagggcgaccgctgggtcgaagctcgggagagcgatcagcaggcggcaaaacgctggtagtttttgttagccggataaggcaccgctgcgtccggcaatttcaccgctcagtacatgcgtttacgctgcgtcgatgcacagcctcatcattttgcagtatccttaagatattccttatatcttcaggagatcgtcatggacagattcccacgttctgattcaattgtacaaccccgggctggcttgcagacttatatggcgcaagtctatggctggatgaccgttggcttattgctgaccgcatttgttgcctggtatgcggctaattccgcggccgtgatggagctgttgttcactaaccgtgtctttttaatcggtctgatcatcgcgcaattagcattggttattgtgttatcagcgatgattcaaaagctgagcgcaggtgtaacgacgatgctctttatgctttattcggcgctgacgggtcttacgctttccagtattttcattgtttataccgctgcttctatcgccagtaccttcgtcgttactgccgggatgttcggcgcaatgagcctgtacggttacaccacgaagcgcgatttaagtggctttggcaatatgctgtttatggcgttaatcggcattgtgttggcatcgctggtcaacttctggctgaaaagcgaagcgttgatgtgggcagtcacctacatcggcgtgattgtctttgtcggattgacggcgtatgacacccagaaactgaaaaatatgggtgagcagatagatacccgcgacgcgtcgaacctgcgcaaatattccattctttgcgcattaaccttgtatctggacttcatcaacctgttcctgatgttgctgcgaatttttggcaatcgtcgttaattcttttttcaccatcaatatcccggccatgtgtcgggattttttttcttactaaaaacgacacttaacaagtaccaggtataaaatacgccttatggccgagcggaagagttttccgtatccataaatacaaaagtattttgtatgcgtgggtttaaatttat

SEQ ID NO: 203 - DNA, 16602 bp, Escherichia coli
  Strain O55:H7
  modified_base (633)..(633): a, c, g or t
  modified_base (952)..(952): a, c, g or t
  modified_base (3134)..(3134): a, c, g or t
  modified_base (4585)..(4585): a, c, g or t
  modified_base (5960)..(5960): a, c, g or t
  modified_base (7642)..(7642): a, c, g or t
  modified_base (8882)..(8882): a, c, g or t
  modified_base (9143)..(9143): a, c, g or t
  modified_base (12861)..(12861): a, c, g or t
  modified_base (13812)..(13812): a, c, g or t
  modified_base (14399)..(14399): a, c, g or t
  modified_base (14782)..(14785): a, c, g or t
  modified_base (15346)..(15346): a, c, g or t
atttttctataaggacaactaaaagaatggaatcatacttgcaaaacagcaataaattagattttcagcacgagaccaggatattaaacggtatatggctcattaccgctttaggtttggtggcaaccgcagggctggcctggggggctaagtatctcgaaattacggcaaccaaatatgattcaccaccaatgtatgtcgccatagggttattattactttgtatgtatggcttaattaaggatatcaacaagataaatgccgccatcgcaggcgtaatatatctgtttttactctctttggtggcgattgtcgttgcaagtttagttcctgtatatgccattatcgtcgtgttcagcactgcgggcgcgatgtttttaatcagtatgctggccggtttattatttaatattgatcctggttctcaccgttttatgattatgatgacgttgacagggttggccctggtaatcatcgtgaatgccgcattaatgagtgaacggcccatttgggtaataagttgcttaatgattgtgttatggtcaggcattatcttgcatggacgaaataagctccttgaattggcggggaaatgccatagtgaagagttgtggagtccggttcgttgcgctnttacaggtgcattaacactctattactattttatcggcttctttgggatacttgccgcgatagctataacgcttgtctggcaaaggcatacgcgtttttttcattagtcgtaaatgcacatactaaagaacttaactaaacttcacatcgccgcttcatttttcgcccgtagcttcttcgcctggctttccagcaacaggtaacagatcagcgccagcagcagcgggataaagtaatacagcacacggtaagcgagtagggcggcgataattgtgcctttggatgtatgctccccagccagtagcgcgataaacaccgnttccagcacaccaatccccgccggaacatgcacgatgacgccggcaatactgctaaccagcaacacgcccagtacaaagaaatagttcacgctttgaccaagtaacagccagataatcgcccccatgaccatccagttaacgctggaaatcagcatctgggcgagggcgaatttccacgaaggcagcaccagcttttgccctttgatggtcatatggcggtgcttcgcgaaagcgcaaaaccacaaataaaccgcgataatcatcagtaagccaatgccgagaatacgcagcgtagtttgatcgacataccagtggtccggcaactccaccacgcctgcggtaaagataatccctgccagtaaaatatagcccagccagttggtggtaatactgagcgagaaaatccgcgtaatagtgctgcccggcaatcccagacgggagtacaaacgatagcgcataccaatgccgccgacccaggtactgagcgtcaggttgaaggcgtagcagataaacgacaccagcatcacctggcgcttcgccagtttgtgaccgcagtaaaagcgggcgagcaggtcatagcagccgtaaatcagatagctgacgaccaccagcccgaccgcactaagcagcgcaacgcgattgtagtcgcggatgaccttccagacctcttcccagtccacttttttggcgtagaccaccagcaacacaatcaccgcgataaaaaacagccaggtgaggatcttctttgctaagcgccagcgcgggtgtgatttactcatcagggttttacccccgtgttttcagtttctacccgatcctgcgtttccattgtcggttgtgcgggaggatcaacctgcgccagacgtggcgtgtgtgccggaagccagccaaccagcgccgggaagtggcgtaaaaagtggaacgccagcacgcttttggttaggttccaccaggtgcgtttcggcagcatggtctcatcgacctgctgacaatctgcggcaataatgccgttcagattatcgcgcagcgtctggttaaaatgacgatcgtggatgatgacatttgcttcgagattcagtgacaaactgagcggatcgagattactggaccctactgtcgcccagtgatcgtccatcaatgccactttgccgtggagcgggcggcggcggtactcaaacacctgaacgccgcctttaaccagatagttatacagcaagcgcgcaccgactctgacaatcggcatatccggttcgccctgaatgatcagtttgatccgcaccccgcgccgtgccgctttacgcaaggcgtgtaaaaatcgatagccggggaagaagtaggcgttggcgataatgacttctcgccgcgcctgagtgagcattttcagatagtgacgttcaatatcatcgcgatgttcttcgttatcgcgccagaccagcaatacctgcgcttctcccggctggcggttctcttccgctttgtgatgacgtcgccaccagcgtcgtgccgcgctctgtccaggcaggttttccagctcaaactggagaatatcttcgacaatcggcccttcaaggcgtaccgcgtaatcctgtttagcctctggaccgtagctggacatatgctcggcggagtaattcagcccgccaataaaggcgatacgcgcgtcgattaccacaattttgcgatgcatccggcgaaacacattggtgcgcataccaaaaaggcgagggcggggatcgtagtagcggaacactacgccagctgccgtcagttcattgacaaactcatcgctgagatccggcgaaccgtagccatccagcaagacttccgctttaaccccgcgttgcgctgctgccagtagtgccgcatgcagttgtttgccgacgtcatcctcaaaccagataaacgtttcaagaatgatgcgttcttgtgcctcgccaatcgccttaaacaccgcgggataatattgctcgccgttttccagcaactggatcttattgccttcgcgccagctacatttcataaatgaatctccgcacttaaaggggcatgatcagaaaggtgtcgccatgtccgcagcggcaacgcggttggcgcgctggcgctggcatttttgacgtagatcctgtccagtcgtagtagaggaaattgcaccggaaacgtgcgcgccgggcgtccgtgggngcgggtaaaaatctcatccagtccggcctgcacttttaacggatgattagctttttgccgccagtcattgaaatcacccgccaccaataccggttcgccgtccggtagctcattcacccattcggcgagcatcgcaagctgcgcctgacggtgcgcctcacgcaggcccagatgtacgcacatcacatgaatcgcttttccggtcatcggcggcacaatgcggcagtagagcacgccgcgcttttccgcaccatcgaccgaaacatcgcgattctcataatgttcaatgggataacgcgacagtacggcgttgccgtgatgcccttccgggtatacggcattgcgaccgtaggcaaaatcgctccacatagtgtcggcgagaaactcgtagtgcgaggtatcgggccagttttccacatgcagcggatgaacttcgtgcgcgcccatcacttcctgcaggcaaacaatatcggcgctgacggtacgcacggcatcgcgaagttccggcaaaatgaagcgtcggttaaacgcggtaaagcctttgtgaatattgatggtgagcaccttgaacgaaaattgttgtgtttgatcgggcataattttcctgtctttgcctcttatctcattgaaatagtgtagtcggcgtcacaaaaaggtgcggtcttacggaattttccgtaaagttcggtactctgagtaagtagagataaattcttcaggagagaagccatgaagtggcaacaacgtgttcgtgtcgcaacgggtctaagttgctggcagattatgttgcatttactggtagtggcgctgctggtggtgggctggatgagtaagactctggttcacgtcggcgtgggattatgcgcactgtattgtgtcacggtagtgatgatgctggtgtttcagcgccaccccgagcaacgctggcgtgaggtggcagacgtgctggaagagctgaccacgacctggtattttggcgcagcgctgattgtgctgtggctgttgtcccgcgtactggaaaacaactttttgctggcaattgcagggctggcaatccttgccggcccggcggtagtgtctttgctggcgaaagataagaagttacatcaccttacgtctaaacatcgcgtacgccgctgaccctgtcgtggccgttatcaccagtagcggccacaaactattccacacaatatccagactcgcatccttcaaataaatctgcttggtaatgtccgtaaagtggcgaataggattaatccacgtcaggttttgcagccatactggcatgttttccaccggcgaaacgtaaccggaaaggagaatggcgggcatcataaagacaaacacgccgataaacgcctgctgttgtgttgaacagagtgatgaaatcaacagaccgaatcccaccagcgataaaccataaatcaccatcgtaaagtagaacagcgccngcgatccggcgaaggggatttgatacgcccagataccaatcgccagcacaatggtggcctggaaggtggcgacaattaacgccggtacggctttgccgatgaagatctgccaggtggtgagcggcgaaaccagtagctgatcgagcgtaccttgttcacgttcgcgggcgacggaaagtgaagtgacgatcattacgccaatagtggtgatcatggcgatcagcgacggcaccacaaaccatttgtagtcgagattcgggttataccagttgcgtaccaccagctcgctgttgttaggtttcggttttccttccagcagctcctgctgataatttttgacgatctgttgcaggtagttggcggcaatttgcgcactgttggagttacgcccgtcgaggatcaactgcaacggcgcggtctggaaggtatccagtttgcgcgagaagtcagccgggaaacgcaccagtagtaacgccttttgtgtgtcgatggtcgggcggatctcctgtgggcttttcagcagcagcacatgtgtaaaggcgctggcgcgggcaaaacgttgggtcagctccaccgaatgctcgccgttatcttcatcgtagatggcgatggtggcgttggtcacttccagcgtggcggcgaacgggaacagaatcacctgaatcagcaccggtaaaatcagaatcgcgcgggtttgtggttcgcgcagcaacgactgcaactctttgcggattaacgtccataagcgatgaaacatgctcttctccctaatccagccgacgtttggttttcagccacgtcaggccgataaacatcaccgccgaagcgatcaaaaacagtacgttcaccaccagcaccactggaatattcccggcgaggaacaggctttgcagggtgctgacgaaataacgtgcgggaataatgtacgtcaccgcgcggatcaccgcgggcatactgtcgatctgaaaaataaagccggaaagcataatcgacggcaggaacgcggcgttcagggcgacctgagcggcattgaactggttgcgggtaatcgtggaaatcagcagccccatccccagggtactgagtaaaaacaggctggagataaaaaacagaatcagcagcgaaccgcgatacggcacgccgagaataaacactgacaccagcatacacagcaacatcgccagcatcccgagaaagtaataagggatcagcttacacagcagcagttccgtgcgggtaatctccgtagagagcagagcctccatagtgccgcgttcccattctcgcgccaccaccagcgaggtgagaatcgcgccgatgaccgtcatgatgatggtcaccgcaccggggataataaagtgctggctaatcgccnccgggttaaaccagtagcgggtttgtacatcaataagcggctcaaaggtctgcccgttatcctccgcccgctgcatttgccagatctgccagatcccttcgacatatccctgcacaaagttagcggtattcggctcactgccgtcggtgatcacctgaatcggtgcggtagcgttggcgcgctccatctgttcggcgaaatccacgggaataaccaccagaccgcgaattttccccgcctgcattttggcgatcagttcctgacggttatcgctgatggtggcgtcgatgtagggcgaaccggtcatggtgtgggtgaaatccagcgccgcttcgctacgctgttccagtaaaatcccgacccgcagcttgctggagtcgaggttaatgccataaccaaaaataaacagcagcaacagcgggatcactaccgcaatcagccagctactcggatcgcgaacgatctgccgcgtctctttgacgcacagcgcccgcacgcgacgccaggaaaggatcgggttactcattgctatgctccttatcccagtcgtggatcaactgaataaaggcttgctccatggtgggatcgggttgctcatcgttagccgactgtgctttcaaatcgtccggcgtgccgctggcgattaatttcccgcggtacaccaggccgatgcggtcgcaatattccgcttcatccataaagtgggtggtgaccatcaccgtgacgcctttctctaccatgctgttgatgtgcagccagaattcacggcgggtgagggggtcaacgccggaagtcggttcgtcgagaaacagaatatccggttcatgcatcagcgaacaggccagcgccagccgctgtttaaaacctaatggcagttcatcggtggcgtgtgaggcaatacttttcaggccaaatgcctcgctcatacgggagattttttcgttctgcgcccgaccgcgtaagccatacacaccagagaaaaagcgtaaattctgttcgaccgtcaggttgccgtagagcgaaaatttttgcgccatatagccgagatgctggcgcgctttaccggaactctctttcagatccatccccagcaccagcgcctggccggaagtcggcaccagcaaaccgcacatcatcttaaaggtggtcgatttgcccgcgccgtttggccccagcaaaccaaaaatctccccgcgtttaacggcaaagttgacgtgatcggtggcggcaaaatcaccaaatttcttggtcagttctttcgcttcgatcaccgtctcgccgggtgtgccttctaccgtatgcaatattgcacccagcggcgattctgaggttccggcaccgcccagcaaatcaataaacgcatcttcaaaacgcggcgtagtttcgttgatgttgatttccggcatcccgtcggcatggcgaatatcgtctggtgtggcctcttttttgaggatcagacgtaccgatttcccctgaatcatgccgtcgctgacctgcggcagtttcaaggcgcgttgcaacagtttgcggttgccctcgtgtggactggtcatcagaaagctgcgtccggccatggtttgtgtcagggcttttggttctccctgatacagcaactcgccttcgttcatcagtaacacgtcacggcactgctcggcttcgtcgagatacgaggtactccagangattaacatcccttcgcccgccagctcatgcaccatctgccacagttcgcgccgtgagatagggtcaacgccgacgccgggttcatcgagcagcaacactttcggttcgcccaccagggtacaggccaggccgagtttttgtttcatcccaccggagagcttgcccgccaggcgtccggtaaacgggccaagagacgtaaactccagcaggcgagcaaaagtctgcttccgtgcctcgccggtgacgctgcgcaaatccgcgtacagattgaggttctccatcaccgtcagatcttcatacaggccgaatttctgcggcatatagccgagcacggcgtgcagcgcgccgtcgtttttgatcggatcaaagccaatcaccgtggcattgccgctgtcgggtttcagtaatcccgccagcatccgcatcagcgtggttttacccgcaccgtctggccctaccagccccgtcacataaccggcatgaatggtgcaatcgagcggcgcgacggcgggcttgtccatgcccggaaagcgtttttccaggccgttcagcgtgataacggcatcattcatgtcctgcctcgtcaccgaattgtaccgtcactggcattccctggcgtaacgcatcatcggcgtcggtcaccacaatacgcaggcgatagacgaggtcggtacgcagatccggtgtttcgacggttttcggggtaaattcagcagtcggcgaaacgaaaccaatctgcccgtgatagggcttgtccgggcgaccatcggtataaagcagcactttgcgccccggctgggcctggtcaagattccgttcatcaacataagcacgcacccacaccggacgcgttagtgaaacggtaaacaccgtgccaccttcattgagaaccgtgcctggctccaccgcgcgcgttaacagcgtgccatcagacggtgctatcaacgttgagtcctgtaaattcagctccgcctgcgccagttgcgcctgcgcctgttcgaggctggctttcgcctgagcgatgtcctgttcacggttaccggaacggtactgacgcaatttatcctgtgctgatttcagcgttgcctgtgcctggtcgcgcgaggagcgggcattttccaggtcatttgccgaaatggtgcggcttttccacagtccttgctggcggttatagaagttctgcgcatagtcataggcggcttgcgcctgtttcaccgctgcggcggcctgagcgatttnttcatcgcgatacccggcaagcatcaggtcatactgcgcctgtgccaccgagacgcccgctttcgcctgcatcagggcaatctcatacggcttgtgatccagttcgcccagcacctggcccgctttgatagcatcaccttcgtccaccgccagcgattcaacgcgccccccaacacggaaactaagattcaccgtacgaatatccacgttgccatacagcgtcaggccgttatcctggcggctttgataccaccagtagcntccggcaaccacggcggcaagtaccactaccgccagtccgatcacgacaggttttttcatcactacaaactcctttgcgataatccttgcaaaatcaggtcgatatgacaggtcaccgtctggttgatcagttcggtcttttcttcatcgaacgcggtccagccggtacgtaacagaattgtttctttgccaagacggaacgccagaatctcaccaatcaacgcatgggtatgaaggatcatgcgggtgtcattggcgtcgcagccggtccaggcggcaatcaggcgtgtcaggtggctgtgtagcggactaatcacctgttcgtgcaccaggtggtaggctgccgtgggagagagctgctcacgggagataaacttgctgaggttgacggtgtcatcctgggtgagcagcttaatcatgttcctgcaggcgcgaaggatcagttcacggatggcagcccgatcaggctgtggttgggcgaacaagcgttcggcttcctcggcatgcggacggaactgctcgccaataaaatcggcaatccactgggcgcaggcgaggtacaaatcttctttcgaaccgaagtagtaggtgatggcagcgatattctgcccggcctgggcggctatctcgcgggtggtggcgttcattccatattcaccaaactgcgccagtgcggcagcaatcagctgttttttcgcctgttcacccttgattgtcatggcaggattattcatcgcacagtccattcttaatcaaatgattgattaagattatgactccatatgggagttgtccagtatggctaagaattttagctacgccagtcacagggataatttatgcgctgcgtcacaaaaactgctacactccgctccctcatgacattgtggtttttgtcattttccttttcagtatctccctgaaaactacaccggtaacggtcggggcggttcggagtagttatgtctttcgattctttgggtttaagccctgatatcctgcgcgccgttgccgagcagggttaccgtgaacccacccctattcagcagcaggcgatccctgcggtgctggaaggccgcgacctgatggctagcgcccagaccggcaccggcaaaacagcgggctttacgctgccgctgttgcaacacctgatcactcgccagccgcacgccaaagggcgtcgtccggtacgtgcgctcattcttaccccgacccgtgaactggcggcgcagattggcgaaaacgtccgtgattacagcaaatacctgaacattcgttcgctggtggtgtttggcggtgtcagcattaacccacaaatgatgaagttgcgcggcggcgttgatgtgctggtggcaacgccgggacgtttgctggacctggaacatcagaatgcagtgaagctggatcaggttgaaatcctcgtcctcgatgaagctgaccgcatgctcgacatgggctttatccacgatatccgtcgcgtgttaacaaaactacctgcgaagcgccagaacctgttgttctccgcgaccttctctgacgatattaaagccctggcggaaaaactgttgcacaacccgctggaaatagaagtggcacgccgcaataccgcgtctgatcaggtgacccagcatgttcactttgttgataagaaacgcaagcgcgaattgctgtcgcacatgattgggaaagggaactggcagcaggtgctggtgtttacccgtaccaaacatggcgctaaccatctcgctgaacagcttaataaagatggcatccgtagtgcggcgatccacggtaataaatcgcaaggtgcgcgtacccgtgcgctggccgattttaaatcgggcgatattcgtgtactggtggcaactgacatcgctgcgcgcggtctggatatcgaagagttgccgcacgtcgtcaactatgaactgccaaacgtaccggaagattatgtccaccgtatcgggcgtactggccgtgcggcggcaactggcgaagcattgtcgctggtgtgtgttgatgaacacaaactgctgcgtgatatcgaaaaactgctgaaaaaagagatcccgcgcattgcgattccgggttatgagccggacccgtcaatcaaagccgaaccgatccagaacggtcgccagcaacgtggcggcggcggtcgtgggcaaggtggtggtggtcgcggtcaacagcaaccacgccgtggagaaggtggtgcgaaatcagctagcgcgaagcctgcagaaaaaccatctcgtcgtcttggcgatgccaaaccggcaggcgaacaacaacgccgtcgccgtccgcgtaaacctgccgctgcgcagtaataccatgtaagggcaaaagagtatcacaggcttttgcccattattcaggtaacacggtcagacatgcatgacatgtctgattttattgttttaataaatttgctttatgatctatctagtgtatctaaaatgacaatgaaattatttcttcttgcaatttgaattattgttaataacattggttgatattcataaacaaattctgggaaaatctggaataaacatgctattgcataaagagtttgttcatcatctggtaaattattatgagatatgtgattcagtattagcttgattctgtccctgattttattattttcattgtctatagtgtatccgactatctccctaagcaaaataaagtgtgcagtcgtttcattaccgtatatctttagtagttctaataaactatcaaaaatcgctcatttcagcttattgatagaaagattgattgccagtctgtttagagccgtacagcagcaaactttcataaccaggttgatcctgaatttgcagtacgaaaagttaaaaatgagcgatttctgtaagactccccattttgccaggcttatgattcgcagatcattcaagtgcaaaggagcgatgtatggattgttcaaaatgcaatggttatgcgacgatgttattaaatatggtgcagggttctgacccggttaatttactggaattacatggtttccttgaacatttcgcatattatgtttcatttggcaaatttaatgctggccaccagcgctataatgcatttaaaaaattcgtcagtgagatttcggagatcagcgcaaatgatatcaatatgacgattaaaaccgggcaatccagacatgaaaatgtgatctctataaatatgaatgatgcaattcctcgtgatgagaaagggatcaccgttagaatagataatattaatggaaagaaaaacaactctaattcatcagatgtttttattccttatgtaaatacatttcccgacctcaaaaataaaatactcaggatgaaaattgaactgactgaaggtagtggtttttctaaaagtctttctgacagtcagattgagatgcatattctgaggactgttaattcgctaaatgttggcgagaaattgaatgatgataatcttgcagatcattctatattcactaacgaattctctgttattattccgccatcctattatgatgcaacttctgcagtaaacgctaataatattgtgagagaaaaactatttgaaagtgatagtaaagttaaagatatcgtcgatgatatgtctaatcatgacgtggagagcgaaaaagatatatttgtaatcggggggatgatagaaaaactgaattctctggcagacgaatctttcaatgatagtactgatnacatacaaacagtaaaagatctgttaacgcaattaactgatggcatggagctcttcgcgctgcgggacatagtggcattcccatcaaccataatagcaaaattaataaaatccccacttaatagcgatcatgaacttgttatgcgcgcactggatacgtatctgtgctacttcagaaataaaaatctgaataacaatgcggaaataattaactttttccatgtcctctttttaaagagaccagagttgatggttgctgaaaattatagatttattcaatttattgatttgctttttgaaaacggaaatgttgaagagaaaaacttagcatttgacctttatcacaattatctttcattatctgaaataaaacaattcgttactgaagaaattaaattgaatttcaatgagcagcaaggattgttagataaagataataaatgttatatcctgttatcatccgataactctgggcgagtaatgcgcttatcgcaccaggcgttaatctcaatgcttgagccagaggttaagaaaaagactatctggaataattactctatttatccatctttgcaggatacccatgaagttgtcagagatgatccagaaacgatttgtatgcgtgcatttcctttatttgcaaaaggatgggaatatgcgcagaaaaataagaaacatcaattgatcctcaatgctcttggattcaaaggttatattcgtgatatatttatgtcagcaataatgcgaaaaacagattttgtgctcgaatgcaataatcaaccgacagaacttaattcatcattttcctctttgatgaacgattcagatcaatggcaacagcatactctgaaagataaacattacgctaatctattaacgatgctggatctcaatgatgccagtgaaagtgataagtctaaaatatttttctgcctgtctgccgtatttgcanatatttctcacagtaatgtctttaacggtattcctgatgcgtcaaaaactttaaaacgttatgcatttgctttattggcgaaagctcattctttagatgaaagtatgataagcaatcaaacttttaatacatacaaaacggtattgcttgatttcaataatctgtctaatgaagaggccaaccagttgcgcataagttcgttatatcgtgatatagtccgctatgcacaatatcgtttttctaaagttttatccgagtggacgccagacgcatggctgtaaagatcgcagcagaataatggcattgatggccctggctcaggccagggtcggcaataccggttcctgagaagcgatgacggcggcaattgtaaccacgaaatgcggtatcacttgctgttttctgccctgaagactggcgctcactgtgccgtcgaattttcaatcaaatatattgcgagagggcgtgtttgcgagccgctttccagaaacagaaaaaccattacccctgaaaaccgaaaaatgccacaatattggctgtttatacagtatttcaggttttctcatggcattaaccgccgcgcttanagcgcaaattgccgcctggtataaggcgcttcaggaacagatccccgactttattccccgtgcgccgcagcggcagatgattgcggacgtcgccaaaacgctggccggagaagaagggcggcatctggcgattgaagcccccactggcgttgggaaaacgctctcctatttgattcccggcatcgccattgcccgcgaagagcaaaaaacgctggtggtgagtaccgccaacgtggcattgcaggatcagatctacagcaaagatttgccactgctgaaaaagatcattcccgatcttaaattcactgccgcttttgggcgtgggcgctacgtttgcccgcgtaatctgacggcgcttgccagcactgagcccacgcaacagnnnntgctggcgtttcttgacgacgaactgacgccaaataatcaggaagagcaaaaacgttgtgcgaagctgaagggcgatctcgacacttataaatgggatggtctgcgcgatcatacggatatcgctatagatgacgatctctggcgtcgtttaagtaccgacaaagccagctgcctcaaccgcaactgttactactatcgcgaatgcccgttttttgtcgctcgtcgggaaattcaggaagcggaagtggtggtggcaaaccatgcgctggtgatggcggcgatggaaagcgaagccgtattgcctgacccgaaaaatttactgctggtgctggacgaaggccatcacctgccagatgtggcgcgggatgcgctggagatgagtgccgaaatcaccgcgccatggtatcggctacagctggacttgttcacgaaactggtcgctacctgcatggagcagtttcgcccgaagaccatcccgccgttggcgatccctgaacgtttgaatgcgcattgtgaagagctgtatgagcttatcgcctcattaaacaacattctcaatntctacatgcctgccgggcaggaagcagaacaccgttttgcgatgggcgaactgcctgatgaagtgctggagatctgccagcggctggcaaaactcaccgagatgctgcgtggtctggcggagttatttcttaacgatttaagtgagaaaaccggcagccatgacattgtacgtctgcatcggttgattttgcagatgaaccgcgcgttggggatgttcgaggcgcaaagcaaactctggcggctggcttcgctggcgcaatcttccggtgcaccggtgaccaaatgggcgacgcgggaagagcgcgaagggcagctacacctctggtttcactgcgtgggaatacgtgtcagcgatcagctggaaaggctgctgtggcgcagtattccgcacattattgtcacctccgcaaccttgcgttcgctgaacagtttttcgcgtttgcaggagatgagcgggctgaaagagaaagcgggcgaccgttttgtggcgctggattccccctttaaccactgcgaacagggcaaaattgttattccccggatgcgcgttgagccttccatcgacaacgaagaacagcatattgctgaaatggcggcctttttccgtgagcaggtggagagcaaaaaacatctcggtatgttggtgctgtttgccagcgggcgtgcgatgcagcgctttctcgactatgtgacggatttacgtctgatgttgctggtgcagggcgatcagccgcgttaccgtttagttgaactgcaccgcaaacgcgtcgccaacggtgagcgtagtgtgctggtgggcttacagtcatttgccgaagggcttgatttgaaaggtgatatgctcagccaggtgcatatccacaaaatcgcttttccgcctatcgacagcccggtggtgatcactgaaggggaatggctgaaaagcctcaaccgctatccatttgaggtgcaaagcctgccgagcgcctcgtttaacctgattcagcaggttgggcgactgattcgaagtcacggttgctggggcgaagtggtgatttacgataaacgcttgctgaccaaaaattatggcaagcgactactggatgcattaccggtatttccgatagagcaaccggaagtccctgaaggtatagttaaaaagaaagaaaaaacgaaatccccacgccgtcggcggcgttaatgatgtgagtcaggtaaggagtcgtaaatggactatcgcaaaatcattaaagagatcgggcgcgggaaaaaccac

SEQ ID NO: 204 - DNA, 1903 bp, Escherichia coli
  Strain O55:H7
  modified_base (961)..(964): a, c, g or t
cgatttagaccgggatactgcgcgcggtctgtatgcccatatgctcaatggtgaagtccctgaccttgagttgggcggtgtattgattgcgctgcgtatcaaaggggaaggggaagcagagatgctcggcttttacgaagccatgcaaaatcacaccatcaagctgacgccgcctgcaggcaagccgatgccgattgtcatccccagttacaacggcgcgcgtaaacaggccaacctgacgccgttgttggcgattctcctgcacaaactcggttttcctgtggtggttcacggggttagcgaagatccaactcgcgtgctgaccgaaaccattttcgaactgatgggtattacgccaacgttgcacggcgggcaggcgcaggcgaagctcgacgaacatcaaccggtgtttatgcctgtcggcgcgttttgcccgccgctggaaaaacaactggcgatgcgctggcggatgggcgtgcgtaacagtgcacataccctggcgaaactggcgacgccatttgccgaaggtgaggcactgcgtctttccagcgtttcgcatccggaatacatcgggcgagtcgcgaagttctttagcgatatcggcgggcgggcgttactaatgcatggtactgaaggcgaagtgtatgctaatccgcagcgctgcccacagatcaatctcattgatcgtgaagagatgcgggtgctgtatgaaaaacaggaccctgctggaagcgagttactgccacaagcaaaagatccggaaaccacggtgcagtggattcagcgttgccttgctggccgcgaaccgattcccgaatcgctgaaaatccagatggcttgctgcctggtggctacgggtgaagcggcaactatcagcgatggcctggcgcgcgttaatcaggcattttaattcttttctcagccggatgagccatgtcatccggcttttaccccaccgcannnntgaaattcctgcatctttattgaccttcccgcgcccggcgtgcagcataaaaaaacaacaaacacataacataaacaggagttaaccatggaaagtggtcatcgctttgatgctcagacgctgcacagctttattcaggctgtatttcgtcagatgggtagcgaggaacaagaagcgaaattagttgccgatcatttaatcgcggcaaacctggcagggcatgattcacatggtattggcatgatcccaagctatgtacgctcctggagtcaggggcacctgcaaattaaccatcatgccaaaatcgttaaagaggcgggggcggcggtcacgctcgatggcgatcgcgcatttggtcaggtcgcggcacatgaagcgatggcgctggggattgagaaagcgcatcagcacggtattgccgccgtggcgctacataactcgcatcatatcggccgtatcggttactgggcggagcagtgtgcagcggcggggtttgtctctatccactttgttagcgtggtcggtattccaatggtcgcaccgttccacggtcgcgacagccgctttggcaccaatccgttctgtgtggttttcccacgtaaagatgattttccgctgttgcttgattacgccaccagcgccattgcatttggcaaaacccgcgtcgcctggcataaaggcgtccccgtgccgccaggttgcctgattgacgttaacggcgtgccgacgaccaatccggcggtaatgcaggagtcgccgttgggttcgctgttgacctttgccgaacataaaggctacgccctggcggcaatgtgtgaaattcttggcggggcgctttctggcggtaaaacgacgcatcaggaaacgttacaaaccagtcccgatgccattcttaactgcatgaccactatcatcatcaacccggaactgttcggcgcg

SEQ ID NO: 205 - DNA, 9912 bp, Escherichia coli
  Strain O55:H7
  modified_base (19)..(19): a, c, g or t
  modified_base (297)..(300): a, c, g or t
  modified_base (544)..(547): a, c, g or t
  modified_base (1507)..(1507): a, c, g or t
  modified_base (1793)..(1796): a, c, g or t
  modified_base (2890)..(2890): a, c, g or t
  modified_base (4749)..(4750): a, c, g or t
  modified_base (4972)..(4972): a, c, g or t
  modified_base (6124)..(6124): a, c, g or t
  modified_base (8788)..(8788): a, c, g or t
  modified_base (9039)..(9039): a, c, g or t
tgtagcgcgcagaccgaancctttgccgagtgggtgaaagcctcgccgcatgatgacgataagccgattttgctcccgggcgagtgggaagtgaacacgcgtcgcgaacggcaggagcaggggattccattggatgcgggaagctggcaggccatttgtgatgcggcgcggcagattggtatgccggaagagacgttgcaggctttctgtcagcagttagccagctaaaaaaaagcccgtccagtggcggacgggcaaacaagggtaacataggatcaatgagggttagagcatatnnnntctgtcggcaaacagacagggaaatacttgtgctggacgtagcgtaaacgcctgatccgtccaacggttcggattttgtaggcctgataagacgcggtagcgtcgcatcaggcatctgttgccggatgcggcgtaaacgccttatccgtcctacgaattacttataaattaccgcagtaccgcttaatttattgttgttggtggcggaagtgatgctatatccactggcaccggctgccgccgnnnnctcagccagtttcgcttccagggcatcgagggtggatgcgccatcggcagaaaccacgccgattttattcatgttctgtgcctgggatgccgttaccggttccgcggcaaacacgccaaatgacagagctgaaagagccatagcagcaacaacagtattgatagttttcataattaatctctcgcaggtgatttttgtataagtgacgttgtttcgtcgatgtgatgagtatcacgtttttttacgagagataaaatcgaagagaattgaccgccttgttcaaataaattgattgatatctaacatactgataaaccatttatttgttgtacttatggacttgttttatgcagcgtggcagtcacgacagcgttaaaggcacggaatgccacgcaaaatacaaattatactcgctatacatctcgccagttgtagttaacgtaactggctttctttcgaacctctgcgattatatcctgtataagctggtttttgtaaatctttctcctgctgacaatgaatacataagcgcacgccaggaatggcttcccgacgggcttgcgggatgggggcaccgcactcttcacattcatacaggctttcgccacgcggaatttcaccccgagcgcgggcaatcgcatcttcaattgtactgttgatctgttcgttgacggcgtcatcgttagcccaaccggatgccatatcgtcctccccatatatcaatgcttgtacagttaagtgtagctaatatagggacgaacctgggcagttcaagcgtcagatctccgaccattcccgcagcagattatgataaagattgagcagcgacaggatctcttcattttcaccatagcggcttttcagcgactgaatattctgaatatttttgtccagttcaaacagcatggcgcgctttttatcatcgcggatcatcgactggatccatataaatgatgccantcgtacgccgcgggttacgggtgtcacgcaatgcaggctgctggagggatacaacaccagatcacctgccgggagttttacccgatgttgtccgaaggtgtcattaacgaccagttcgccgccgtcgtagctttgtggatcgcttaaaaacagcgtggcagaaaggtcagtgcgcatccagccgttttgtggatggctgcgtactgcgccatccacatgaaaaccataggtttcattgttctgatagcgattaaacagcggcgtggaaagggtacgcggcaaggcnnnngcaaagaacaaagcatgttggttaaccgcgttcagcacctcattttgcagggcggcgtataacgtgctgcgggtgtctacctgttgattgttcttaacttgcgcaccttgtgcgccggtggtgacgcgtccatccacccattcggcttgttccagttgttcgcgaaaacgggcgacgtcctgtggcgataacacgccgggaatgtggtacatcatacaagttctccaaaaagtggggcctgcgccccacatctgaatcagaaatgcatattggctgtgagcaagaaggttcttggctcgcccgggtgataacggtagccgctcttattgattgaggcgacgtaatcggtatcaaacaggttgtagacgtttagctggaagtcgagattgcgattaacccgataccccagtttggcatcggcgacccagtaaccttcggtaaacgctggcgttcccaccgcgccgtctgaacctttatgcatactgccgatatagcgtgcgcccgcgccaacagagatatcatcggttgcctgatattggctccataaggtgaaggcgtgctccggggtatacggcagcgatgaggaaccatcctgggcaacatctttgccgtttttgatggttgctttttgctgggtatagccgccaatcacctgccacgcgggagtgatattccctgccacggatatctcatagccttcgacgcgtttcttaccgtattgcgagtaagtcccgtcatcattttgctcaacttcattttcgatatcagtacggaacagcgcggcggtgagcaacaggcgtttatccagaacctgccatttggtgccaatctcgctggtgttggctttttgcggtttaaaatcggtgcggttggcactgttaccgctgccagactgcgcaagggcgaagttgttgccgcccggaggctgctgggaaacggcatagttaatatagacattgccgttttccgtcaggtgatacagcgccccggctttccagttcaccagattgcccgacttggcggtgtcgacggtggtgaccggagaaccttttgccacaccagctgggcaggtgatggcaccgcgtccgctgccnccgcaggcggtggcactgtcatattcagtatgataattatccagacggatcccgccgttcagctcaaaatcacgggtgatttgcagcgtatcgaatgcgtaaattgcgaaggtatccgtctgaccattggcgtttgcgccgttgcgcgtcaggccgccgggatgaatgctgctgtcaggatgataaatatttaccgcaggtaacgtcaccggattaacgccgtagttagtctgcgtttcacgggtaaattccacgccggtactgacatcatgaccgatagaagcggtatagaacgtcgaggtcaggttggtctggttggtgagaattttattactcacatctttggtattcgccgtgcgtgaccacgtccagctattcacatcgctggtgggctgggtaatattcgacgccccacccataatcgccgtcatcaggtaatcctgcttcacgcgcgaccaacgggtagtgttgcgaatggtggtgttatcgttgatgtcgtgctcaaaacgcatggtggcggtgtcggtggtcgaatcgtcgtaatcggaatccgtgccgtaaaagttatgcgtatcaacttttccggaatgattcagggtcgccgttcctgcagatggggcagaatagcccggcaaaccgatggttggaatgccgccgtctggcgtgttgtgctgggtgacatgcagataattaagatacaaacgattcgctgtaccaaggccaaaagcgatagaaggggcgacgccgtaacgctcatttttgactttgtcgcgtccggcatcgtgcgttttttcgcccatcacattcaggcgcaccgcagtggtatcaccaatgacctgattgacgtccagcgtgccgcggcggaaccaggcgctgccaatactggcggaggcgtcaatgccggaatcattgcgcggctgcttgctgatcatattgatcgagcccgtcggcgcgctgcgcccgtagtcggtgccggaaggccctttaatcacttcgacctgctcagtattgaaggtgtcgcgcgagacgctgccgatatcgcgaatgccatcaatataaatactgttagaggtatcagcaccgcgcatataaatggcgtcgccagtggtggagttaccgttctcacccgcaaaaaacgcacccacgccggggacgtttttgagcgcatcggtaaggttggttgcgccctgatctttaatcacttgttcagaaatcaccgtcatcgtgcgggtagtatccgctaccggacgcgagaatttcggatcggcagattgttgtggcgcataaagcgaaggcgttgatgcttcgacaaccagcgtgtcatccgcgttagtttgcccttcggcggcgagtgcctgagccacaggcgtgatgccaatacaaagaccggcaaagaacgtgagcgaatgaaattgtctggcagggaaattgcgattgttttccattttgcaggtgactttttcttatatgttgaaattttcactgccacgagaaagcctctctgcggatgcgatgccactgttaatctcgtgatagtgttcgtgcaagtgataataattttgataagcattatcacttggcgcgattttctatcacccattgcgcgaaaaagaaatacatttatttacattgcgttcatatttgatgttttttgattacaaaacaggcgaaaactgcatccagaggcgaatgcagttacgttggtggggttatttgtagatggttgcagtaccgaacatctggtcatttccgcctgcggaattaatgacataacctttcgcgccttgctcgcgcgctttttctgccagtttatcctccagatcgcttaggtttgatgcgccagttgccgaaacggtacnngcgggccgtagctgaccgctgtccaggttactcatcggttgcgcggcataagccgtgagagagattccgctcaggacggtggcaatcagtagtgtgaggcactttttcataatgacatcctcataaatacaacgggtagtgcctgataagtgtaggtcgcctgcgcgatgcaaatgacgcaaaaaattgacagagatgtgcttattttttgaacgatatatntttacaaaataagacaaatcaatgacatgcataatgctgatttttatgatgaattgccataaaccatagccatgttaaggttttggggaatgataaacgcagccagatatttaccctgtcgcgttatgcgggtatcttacgccgctgcttaaaggagaatgctatgtccgcccagaaaccggggttgcatccgcgcaaccgtcatcacagccgctacgatctcgccacgctttgtcaggtcaatcctgaactcaagcaattcctcacgcttacacccgccggggagcaaagcgtagactttgccaatccgctggcggtgaaggcgctcaataaggcgttgctggcccatttttacgccgtagcgaactgggatatcccggacggttttctctgcccgccagtaccgggccgggcggattatattcatcaccttgccgatttactggctgaagcaagcggaacaattccagctaatgccagcattcttgatatcggcgttggtgcgaactgtatttatccgctgattggcgtacatgaatatggctggcgttttaccggtagtgaaaccagcagccaggcgttaagcagcgcgcaggcgatcatcagtgctaatccggggcttaatcgcgccattcgtctgcgtcggcaaaaagagagtggggcgatttttaacggcatcatccataaaaacgagcaatacgacgcgaccttgtgtaacccgccattccacgattccgccgctgcggcgcgggcaggtagtgagcgtaaacgccgtaacctggggctgaacaaagacgatgcactgaactttggcggccagcaacaggagttgtggtgtgaaggcggtgaagtcacctttatcaaaaagatgattgaagagagcaaaggcttcgcgaagcaggtgatgtggtttacttcactggtatctcgtggtgaaaacttaccgccgttgtatcgtgccctgacggacgtgggcgcggtgaaggtggttaaaaaagagatggcccaggggcaaaagcagagtcgctttattgcctggacctttatgaacgacgagcagcgccgccgttttgtcaatcgccagcgttaaagcgttggctcccccggcggtaacggttcagccggggtcgcgcccggagcaggcagcacctnataagtctgcaccggcgcgcgaacgcccgccaggtcgaaatgttttttcacctggctgtcgagggcaaagcgtaccgtccactgtttgagtggcagcgtggtgaacgaaacacgcagtgtaaacgcggtattgcttaagccaacaatcccggcaaagttcggttcaccaataatcagcccacgaatttcttcgttttccattaattccgctaccgcatctttcagtgcctgattggctttatcagcatcttcatggcgatcaacatcgtagtttgccactaccgaaccaatgccgcggacaaagttggcaaaggtggtaatcgaagaccacggaatgatgtggtacgccccggtatcctggcgtacgcccacggagcgaatcgacatccgttccacagtgccggtcaacggcccaatagtcaccaaatctccagtgttcatgccgttttcaaactgaataaataccccggtgataatatctttcaccagcgtttgcgaaccaaacgagatagccagacctaatgccccggcacctgccagcaatggcgcgatattgacgccgatttccgacaacacaatcatgatggtgatggtactgataatcaccgccagcgcgttacgaaacagcgtaagcagggtacgcgtgcgggcgctgggtagcgggcggccatgaatatccgaagccagccggttttcgatcaaactggcgagcaccgtccagccaaccgccgagaagaaaagaatgagtgcgatacggatcaggatatctacggttttctgccccgcgccgttttgcagccagttccagaaatcgaacaatccccatgcgctcaacagcagcattaccgccacgcagacggtcagaatacgcgccgttttcagcgccgccgaaagccagccattcagccgtttttgcaactccggatagttacgctgagtatgtggcgagagagtgatggtttttgccagccagcgggaaaacataccggaaacaaatgctgcgataccaataatcgccaggctgcgcactgttgcacccatcataaatttcaggctgttgcccggatcgaacaacgaaaagaaaaacagcacgataaaataggcgcttgccagccagtgccacaccagcgcaaaggcgcggataaacaggctgaaaaaggccagcgaatgctccgcaaagttgagcaaatgctgggtaatctcttttttattacgaaagatcaggtacaacgcccagacggtcatgcacagcataatgatgacgttcgccagcgcacctatctgtacattcacctgattagagataatcggcacggccacaatcaggccataacctatcaaactgcttaaccagctcaggcgacgactccagtaacgggcgctctcgtcctgaatcgtgaacgggcgcagttccgccacgtttgggcaaaaaatcaggcgtagtacggctttgaaaaattcaatcagggcaaaggcgttgagaaacaaactttgttggaaagcgatggtgcgactgcctgcattcaggttgtcgcttaatatctggccgacaaataatgtcagtgccagtaacagcaggtcgataataaacgccccgataatcatcgccggaagctgcagccagttactgcgctcacgatttttttgccgcgcccactgacccattttgcgatacagcggcagtgcgcacaggcgaatcagccagtaaaaaccaaacactaaaaccgctaacattgaaaaatgggtcagcgcattgctgaaggtttgtggattaaacggcttatgcggggagccggtgatattgcgataaagctgcccgaagcgggcggaaagggcttcaccataatggcggctgaattcggtgaccttttgcagcacggtttgctcttcaaccagcgtcggcggcacgatcttcgggaccggttcagcaggtggcgtcgcggcgacggtgcgcaactggtcgatcaactctttacgcgaggtgtcattatccagcacatccgccagtgcgccataagccgcttttttttgttcgatatccggttccggggccggttcagtcgttgagtccgttgtcgttgtggttgtaacgccgggtatggataccgcgtgggcaggtgcgcccagcaggcagaagaggatgaacaggatccaccgcatgactcctccagtgagaaaacagagcaaaaagataagtatagatgctgggggaggggtgattttaaatgagaggaatctggtgtacctccctttcgggtgaaagggaggcagagaagttaagagacgtgctgtaaaaattcctgcaagcgctggctcggcggatttttaatcaacacttgtggatcgccatcttccgcaatccggcctttgtcgataaagatcaggcgcgaagctactttctcggcaaaaccgatttcgtgggtcacgatcaccatcgtcatcccttcttcagccagatcttgcataaccttcagcacttcatggcgcagttccgggtcaagagcggaagtcggttcatcaaacagcatcattttcggcttcaccgccagcgcgcgggcaatcgccacacgctgctgttgaccaccagaaagttcggaagggtagtgatgtgcacgttctgccagaccgactttcgccagcagctcacgtgccagtttttccgcntcttctttgttcgcgccacgcacgcgtagcgggccaaacatgacgttttccagcgccgtcagatgcgggaagaggtaaaactgctggaacaccatacctgcttcctggcgaatcaggcgctcgtcaactttcggatcgttaaccttcaggccatcgacaatcagatcgccggaggtgatttcttccagtttgttgatgcagcgcagcagggtcgatttaccggaaccggacggcccgataatcaccacganttcgccctgggcaatgttcaaatcgatattgtgcagcacctgggttgggccaaagtgcttggagacgtttttaaattcaatcacaggattttcatccttctttccagacgacgcagaataaagctcagcaccagggtaataatcagatagaacaccgccacggcgctccagatctcaagggcgcggaagttaccggcaataatttcttgcccctgacgggtcagttccgccacgccgatcacaataaacagcgaggtgtctttaatgctgatgatccactggttacccagcggcggcagcatacgacgcagtgccagcggtaaaatgacgtagcgaatggtttcccaacgtgaaagaccgagcgccagtcctgcttcacgaaaacctttgtggatagacagcaccgcaccacgcgtgatttccgcaatgtacgcgccggagttgatcatgatggtgaccaccgccgcagtaaatgggtcgatgcgtaagtcattaaacgccatcggcagggcaaaatagataaacatcacctggacgacgataggtgtgccgcggatcacttcaataaaaaccagcgcgacgtggttggctatccaaccaccgaaggtgcgtgcaaaacctgccagcaatccgatcaccaggccgccagccagaccgaggaccgatatccacagggtcattttggcaccttcaatcagaagcggaatggcaggccagatagcactccagtcaaactgcatatgttgttcctgttaccgtggtgtaaataatcaaattcagggtaattaatggccccggagcgggtttgcgccctcaccctaatcctctccccagaggggagagggaactgccagtgcgctttacaggtgtagc

SEQ ID NO: 206 - DNA, 18141 bp, Escherichia coli
  Strain O55:H7
  modified_base (3029)..(3029): a, c, g or t
  modified_base (3788)..(3788): a, c, g or t
  modified_base (5237)..(5237): a, c, g or t
  modified_base (5808)..(5808): a, c, g or t
  modified_base (6763)..(6763): a, c, g or t
  modified_base (8581)..(8581): a, c, g or t
  modified_base (8590)..(8590): a, c, g or t
  modified_base (9564)..(9565): a, c, g or t
  modified_base (11829)..(11832): a, c, g or t
  modified_base (13260)..(13263): a, c, g or t
  modified_base (15750)..(15750): a, c, g or t
  modified_base (16555)..(16555): a, c, g or t
  modified_base (16936)..(16936): a, c, g or t
  modified_base (18139)..(18140): a, c, g or t
tatttcggttcagtaccgaaccattttttgtagatttcgttgtaagttccgttctcgcgcagggttttcaacgcgccgttgactttgtcacgcagctcgtcgctacctttcgggaacgcaataccgtattgctgcgcttccagagagtcgcctaccgctttgaactgaccgttaccggcggttttgatgaagtacagaatgtttggcgtatcgtgcagaacggcgtctgcgcggttggtgcccagttccatataggcgttatcgatgttcgggaactgacgcagatctttagttttgatgtttgctttcgcgtaatcaacggagccagtgccgctcttcaccgcaaccactttcccgtcgagatctttcacgcttttcacatcgttattgttagctttcaccatcactaacaggccgcttttgtagtagccgtcagagaaatcgatcgcttttttacgctcgtcggtgatggtaatgcccgccagcgccagatcgacgtttttggtttgcagtgccggaatgatcccactgaaatccatcggcttcagttcgtaatccagcttcagctctttagcgatggcagcccacagatcaacgtcaaagcccacatatttatcgccctgtttaaattcaaacggaacgaaggcggtatccgtcgcgacaactaattttttatccgcggcatgagaagaaaccgcaaaagccagggtcagtgcagccagtgaaacttttaatacagacttcatagcatttccttttttctatccacgggacgatcccctgcgtgacattcacatatatgaaaaaatcgtgccagttttgcaactcattgatttttcgagatgcggtaaaaacgtgatgcacgatttatagggcaacaccctgaagatgcaccattctggggcaccaaactggtgcgctaaaattgtgcactcaacacagtgattatttagcgtaaaacctgatgaaaaaacaatctttatgtaacgattgtgtgatgatgtggatacaaaaaatttacttaatcagctggggatagcagatggatgcactaaataagtgcgttgaggcgggctgcaaaacaaaacggcctcctgtcaggaagccgcttttatcgggtactaaaattctgcaccatcagcgatggatttattcgatgttagactcgataaaccacaggaatttatccaggtcgcgagacgcggcggtcaggatatctgcggtgtcgtcatctttcgcttcgccaatcgctttgcgtacgtcattagcgacgattgcgtaacggtcagccagttctttcaggtgatcctgaacgttgtggatgtccagcgggtaacttttcagcggggttttgctgttgataacttgagtggtccccagagctacaccgcccagctgcactgcacgttctgccatggtatccagatgatcgatcagtgcagtgcggaagccatccagcatttcatgtacggcaatgaagttagcgccgcgcatgttccagtgcgcttgtttggtaatcaaagaaagatcaataaactggataacctggcgattcagcaactctactgttgcttttttctcgctgtcagagacatcgttgcgggtataaagcagattggtcgcttttgatttaactaatttagcggtactcataatttcatatcctcttgatgttatgtcccagtaattaacgagactaagtatagcaccggctatgtgttccgctattctggctgttcctatcacactaatagtggtaacaagcgtgaaaaacaaaactaataaagattcaatgagttagatatattgataagaacaattcttatttatttgctcgccaggaattttcggaataaatatgcttttgcataattcgatatataaagacggtgtagaggaaaagtagcgagaaattctgcatggttatgcataaccatgcagaaatgtaaatttaattaatgtctaattcttttattttgctctctttgcgtactgtcagcgtagaacccattgaagcggcgataattgcgccgagcgccagcagctgtatgggtgtcagtgtttctccgaggaaaatcatcccggaaacggcagccagcgccggttccatgctcatcagcgtaccaaatgtccgtgttggcaaacgggtgagggcaatcatttccagcgaataaggcagagcggtcgagagaatagcgaccgccagacccaatggaataaccgaccagtgccagagtgcttcaccagcctgaagcgctccaattggcacgaaaattaacgctgcaatcaacgaaccaattgccaccgtcgcagggccatgttccgctcctgcgcgttgcccacttaaaatgtaaatagcccaacaagccccggcccccagtgccagcgcacagccggttaaatcgacatgggaaacgtcttgccccagcggtagcaggaaccacagaccaagaaccgccagcacaacccagacgaaatctaccgggcgacgagaagagaacagcgccaccgccagtggtccggtgaactccagcgccaccgcaatacccagcggtaccgtctgaatagagagataaaaaagataattcatcccacccagcgaaacgccgtaaaacaacagcggtaaccgttgctctttggcaaagcgcagtcgccatggcttaaagaacgcgatgaggatcagcgttcctaatgccaggcgcagcgcagtgacacccggtgcgcccaccagaggaaaaagtgacttagctaacgaagctccaccttgaatagacgccatggcaacgagcaatatgactattggtaaccagaccggcattttacgtaatgaaccaggcatcctttctcccacaaatatctagacttaagtaaagcgtggagtgtactggatatacccaatgctggttgagcatttgttgaaaaaattttcccccgttttgactaaaatgcgccaggattgatggaatcattagtctggtgattaggaataatctggatgaatgacagggaaaacatgcgtaatacttacncagttctctgaaaaagtgatttaaatttagatggatagcggtgtatggaaacgttctgttacatgaaatggcccgttagacatcacaaatcgcgaagagtttcccattaatttttgatatatttaaaacttaggacttatttgaatcacatttgaggtggttatgaaaaaaattgcatgtctttcagcactggccgcagttctggctttcaccgcaggtacttccgtagctgcgacttctaccgtaacaggcggttacgcacagagcgacgctcagggccaaatgaacaaaatgggcggtttcaacctgaaataccgctatgaagaagacaacagcccgctgggtgtgatcggttcattcacttacaccgagaaaagccgtactgcaagctctggtgactacaacaaaaaccagtactacggcatcactgctggtccggcttaccgcattaacgactgggcaagcatctacggtgtagtgggtgtgggttatggtaaattccagaccactgaatacccgacctacaaacacgacaccagcgactacggtttctcctacggtgctggtctgcagttcaacccgatggaaaacgttgctctggacttctcttacgagcagagccgtattcgtagcgttgacgtaggcacctggattgccggtgttggttaccgcttctaatcactttggtgatataaaaaatccgcctctcggggcggatttttgtttttaaggcttcgggtcgaaaatatcggttccganatggttgtaatccaccttctgtaactggaagttggtgatgtatatcggcccggctttcttctcagatataaacgggtatttgatgttaatttccttcgctttaattcccgtccactgcgagaaaaagcctaagaagtcattggctgagcggcgggctttaatcacccgatgcgctttatcgtcgctggaaatgaccataaaaggcacctggaaattttgctgatacttatcatcatgggcaaggtattgcacgtctttgccgcgctctttaaaggccagaccgtggtcagaaaagtaaaccagcgagaagctgctgccgctgttgcgtaactgatcgtacagcttgcgcagtaaatcgtccgtttgcgtcatagtatagagatagcacgacgtttctttcgattgcacaaaggtttcgtatttgccttttgtccggtcgcaggcctgcggatgcgagcccatcagatgcagaacaatcagctgcggttgcgagtgctcttgcgccagcacttgagcggtcatatccagtaacgcttcgtctttcgtgtttttatctgcttcaaaattaccttctttcaggaagtacacttcatctgcacgtttggcgatgctggcgatagcagtatcgtattcgccgatttggccctggttggaaaaccaccaggtctggaagcccgcgcgatttgccagggtgacaaagttatcctgaaactgtggtttgccatcgactacgcgattgagcgttaagccaagcgatttctgcgtggagccactggcggcaatgtagtcagcaaatatcaaaccgttaacgctgctggcaaacggggtattgtcccagtgaccgccaaaggcaccgagggcatcgcgacgcgcgctttcaccgatcaccaccacataggtctgatacttcggcttaacggcagtgaccgtccaggtatctttcattccggaaagttttgccatccgttcttgctcttcaatcacctcgttattattgacgatgacatccttagcaaaacgaaataccggatagccagtatctttcagtttaaatacgccaccccaggccaggttttgcacgggagcaacaaaaaatgtcgccacactgaataccagacacaggctgtcgaaggtattccagcgcgctttttcattctctttttttcgcctgattgctattacgccgagcgcaaaaataaataagccgaccaggtagctgtaccacggaaaaatcgtcaggatttcggtcgactcttccatattggtggagtgcaatgccagcaatgtattgaaattaggcgcgccgtaggcctgagcaaaagggaaataacaagccgccaccagcgaactgacaccgaccagaactttttgtacgcgaggcaatgttcgccatagcaaaagcaaaatagccgtaaacgcagcggtgtagagcaaactgaaggggtaacntaagccgaggttaattaatagcgactgtaaaaagtagaacgcagtccacgggctaaatacccggctacgggtaacaagcgattctttgagggttaaattcatatgccactatcgtaacaaacgccatgtgcttaccctggcgtcaagggtcaatacctgcaagagtgcgtgaagaggggaaaggggtccgcatccgcgagccgcaatatacgcagggctgcaagaagatagagcgagccgcagttcaggtcaactactgacgaacaaatcttttgcgaaggggattgcaaatccgacaaaaagtggggtttttcagaccaaaacgcgtcgtgcctgcatgaaagcaggagtgaagcggcgtaccgcgacgccgctatttatcggaaggtttatcttgctgcggtttgttgttgaccatatcgcacaacatagagagcagcattaaccgtactttaaagggagaatgactaaacacgcgcatacacctcttgaactcattcataagacctcctgacttgctaatcccgtcgatccttgagggatgattgcattacatacagatatagcacangctatattatatagctattgctaaaacgttaattttttgtaccttcgcaactctggtttacaatgtgcgcacgaaatgagaacgctatgtatgcgtcaccataatgaggaagcacaatgagtcgtcgcgcaggtacgccaacagcaaaaaaagtgacgcagttagtgaacgaggaagagcacgttgaagggttccgccaggtcagagaggcgcatcggcgcgagcttattgatgattacgttgagctgatttctgacttgatcagggaagtgggggaagctcgtcaggtagacatggctgctcgtttgggagtttcgcaaccgacggtggctaaaatgcttaagcgactggcaactatggggctgattgaaatgatcccctggcgtggcgtgtttttaacggcagaaggagagaagctggcgcaggaaagccgcgagcgacatcagatagtcgaaaatttcttgttggtgttgggcgtcagtccgaaaatcgcccgtcgcgacgcggaaggcatggagcaccatgttagtgaagagacgctggatgcctttcgtttgtttacccagaaacacggtgccaaatgagcctgccttttttacgcacgctgcaaggcgatcgtttttttcagttattaattcttgttggtatcggattaagttttttcgtgccctttgcaccgaaatcctggcctgctgctatcgactggcacaccatcatcaccttaagcggcctgatgctgctgaccaaaggtgtggagttaagcggttattttgatgtgctggggcgcaaaatggtgcgccgctttgctacggagcgtcggctggcgatgtttatggtgctggcggcggcgctgctttctacctttctgaccaacgatgtcgcgctgtttattgttgttccgctgactatcacgctaaaaaggctgtgtgagatcccggttaatcggctgattatntttgaggcgctggcagtcaacgctggttcgctactgacgccaattggcaacccgcaaaatattcttatctggggacgttctggtctttcgtttgccggatttattgcccaaatggcaccgctggctggcgcaatgatgctgacgctcctgctgttgtgctggtgttgtttccctggaaaggcactccaataccatacgggggtgcaaacaccggagtggaaaccgcggctggtgtggagttgtctggggctgtatatcgtctttctgacggcgctggagttcaaacaagagctgtggggactggtgattgtggcggcgggctttgcgctgctggcgcgtcgcgtggtgttgagtgtggactggacgctgctgctggtgtttatggcgatgtttatcgacgtccatttactgacccagcttccagcgttgcaaggcgtgttgggtaacgtgagtcatttatctgaacccggattatggttaacggcaatcggtttatcgcaggtgatcagtaacgtgccgagtactatattgttgctgaactatgtgccgccgtctttattactggcatgggcggtaaacgtaggtggctttgggttattacccggatcgctggcaaatttgattgcgctacgtatggcgaacgatcgccgcatctggtggcgtttccatctctattcaataccgatgctgttgtgggcggcgctggtgggatatgttttgttggttatgatcccggcctggtaaggtctggcaaataaaaaaggcggattatgagtccgcctttgttttacgttttgaagattaattcagacgaaccggcatcccggagcggtttttaatcgcttcatcaagaacaacctggtcaacatctggctggccggtcactgtctgcacgctcttcgtcagggtaattggcacaatttcctgaccttcaaattgggcttcggtggtagacagcgggttatggacttcaatgtaacggctgccgtctggctcggtggtcgcttttaccggctcatcaataaactgtacgcgggtaccgaccggtactttctcgaacaggaatttgatgtcttcgttacgcagacgcacacaaccatgacttacacgcagaccgataccgaagttagcgttggtgccatggatagcgtacaggcgaccgatgtagagtgcatacagccccatcgggttatccggacctgccggaacgacagccggaagcggttcgcccgcagcgcggtactctgcgtgcattttggcggtcggcgtccaggttgggcctgctttcttacgctcaactttggtggtccagttgataggcgtatctttgcctaactgaccaatgccgatcggcagcacgataacggtgttggtccctttcggatagtaatacagacgcatctctgcactgttaatgacgatgccttcatgaacggtatccggcaggatcagctgctgcggaatgttcagtacagtaccgcctttcggcaggaaggtatccacacccgggttcgcttccatcatattggaaagccccatctggtactccgcggcaaaatactccagcggctgagtgttaccttcaggaatggtgatcacctgattctgaccaaccaggcgactcccgtcggttggcagaggataagttaccgcagaggcggtactgcaaaagccgacaacagcgaaggccgctgcgaataatgttttcaatttcatattcatgttaagcgagattttgtgcctggcaggccattgggttgagaatattagagtattggaagcgcattataagttcattccagctcacagtgaaatcanatgtgtacnaaatcacattttttgcctttggcttgagtgtagaccttaagcgaggagcaggatcttctttcagacttatggcataatgcgcggtttgtcatatctcttttcaggatacgcctgtgttagtttccagtaacgtcaccatgcagttcggcagtaagccgttgtttgaaaacatttccgtcaaatttggcggcggcaaccgttacggcctgattggcgcgaacggtagtggtaaatccacctttatgaagatcctcggcggcgaccttgagccgacgctgggtaacgtttccctcgatcccaacgagcgcattggtaaactgcgtcaggatcagtttgcctttgaagagttcactgtgctggatacggtgatcatggggcataaagagttgtgggaagtgaagcaggagcgcgaccgcatctatgctttgccggaaatgagtgaagaagacggctataaagtggccgatctggaagttaaatacggcgaaatggacggttactctgcggaagctcgtgccggtgaattgttgcttggcgtgggaattccagtggaacagcactacggcccgatgagtgaagttgctcctggctggaagctgcgtgtgttgctggcgcaggcgctgtttgctgatccggatattctcctgctcgacgaaccgaccaacaacctcgacatcgacaccattcgctggctggaacaggtgctgaacgagcgtgacagcaccatgatcatcatctcgcacgaccgtcacttccttaacatggtctgtacccacatggcggatctggattacggcgagctgcgcgtttatccgggtaactacgatgagtacatgacggcggcgacccaggcgcgtgaacgtctgctggccgataacgccaagaagaaagcgcagattgctgagctgcaatctttcgttagccgctttagcgccaacgcctcgaaatctcgccaggcaacttcgcgcgcgcgnnagattgataaaatcaaactggaagaggtgaaagcctccagccgtcagaacccgttcatccgttttgaacaggataagaagctgttccgtaacgcgctggaagtggaaggtctgaccaaagggtttgataacggtccgctgtttaaaaatctcaacctgctgctggaagtcggtgaaaaactggcggtactgggtaccaacggcgtcggtaaatcaacgctgttgaaaacgctggtgggcgatctgcaaccggacagcggcaccgtaaaatggtctgaaaacgcgcgcattggttactatgctcaggaccacgaatatgagtttgaaaatgatctgaccgtgttcgaatggatgaggcagtggaagcaggaaggcgatgacgagcaggcggtgcgcagtattctcggtcgtttgctgttcagccaggacgacatcaaaaagcctgctaaagtgctttccggtggagaaaaagggcggatgctttttggtaagttaatgatgcagaagccgaacattctgatcatggacgaaccgaccaaccacctggatatggaatccatcgagtcactgaacatggcgctggaactgtatcagggcacgctgatctttgtttcacacgaccgtgagttcgtaagctctctggcgacccgcattctggaaatcaccccggaacgcgtgatcgactttagcggtaattacgaagattacctgcgtagtaaagggatcgagtaagttattatccgtcaccccgatactgtcggggtgacggcggctgatgacaaacgcaagattgcctgatgcgctatgcttatcaggcattaagaaagcgcacttgtcagcaatctgagtaacgtcgaatcgattttcttaatcccacatcaattcacttcaattaactctcaaacatccatgcccaacgctcgcttaccgtgaatgttgaggtcggcaagcgtaaagcgtccttcccagtttgtttcatagtcctcgcgcgggaagtcgcccggcgatgcgcctttttccagtgcggccttcaccttgtgcgcgtaggcaagatttttctcgcacatcggtgccgcaggaatgtacatcacgttgccccaaccctgttgattttcaacgggggcaacggaatggatgacgtcgcagtgccaccagacggagtctccggcctcgagttttggaatgctggttaacgcctcaattaacagtggatgccattgctctgataccggcaacactcttccgggcgctacgccgcacagttcatcctccggcacatcatcaagcagcggacgtaacagtacgtacgccatggcttcaggaatgggcacgacgtgcagcaacccctgaccaggcagcatatcagagagcgctgtccagccctggaatgtccgaaacacggaacatttggtggtgttgtccaccgtgtactcttcaacttccgtacgatgtgccgcatgccagggatcgtatttcgccagattgccattaaagacgttagcgaaaacgtgctgatacgctggaagcagccagcgttccagcgccccggagtcggtatgcgctccaagacctttggaggtcgttccgggcggacggcggcggatacggtcagggtagatgacgctcacatccgggttaaaccattgctttccatcactttcaaatgtccacagacgattgagaaacgactgcgcattcgccatttcttcactctggcgggcctgcatttgcgcctgcgaccagtagatggggtaaatctcgggacgtgaagcgctgagcgtcccgaagaaattatcgccggggcctttgtagacctcgtcaaagcggttgcggtccagatagtccagcatcgactgatcccagcctagcgcttgttcgcgggggaaatggccttttatcaccgcacaaccgcgacgtttaatctgttcgcgctgctctgcagtaacatgacctgctttgatatcggcataagacagcaccggccagacggcatcgccctgtgctttgagtgcgttgatttcagccactcgcgtggcaatgtcatcgcttagctgattaaagatctgctggacgtcgccaagctgcgcccgcagcgcgtgcttcatctgacggatagctgctttgtgatcggcaggcaatgtgtcgctggtaaaagtagaagccataaccacctcgcattaactttcattcgaaactatgctgatttgcatgtgacaatataagttataaataagttaatgcaagtttaatgatttgatgtgatgnnnnaggatgtaaaaagaagggataaccggagcgcatggctccggtagagaggtcagctgttaaaaggggatgtgttatccagtacagcctgaatcacattcagcgcgccttcatgattattatcatcggtagcgtaacgggcgatttgtttaatgttttccgcagcattgcccatcgcaaaggaataacgcgccattttcagcatctccgcatcgttaccgctgtcgccaatcgctaccacattttgcggtgacagatcccagcgtttcagtaaccgcgaaataccgtttgctttatgtagaccgggaataatcaggtcgataaagccaaaaccactggtgacgggtttcataatgccatcgagcgctatgtgcagtttgtcgatcactaacgggatttgttcatccggcaggttgagtgaaaacttgaacagtacgtcgtcaatctcctgataatcttttacaggtttcaggcgatggtagtgttttgccatcagtgcgacaaatgcttcgggggcattttcgctgacatatgcactttgcagaccgcaggcgacaaaattgagttgcttatcttttagcaactcgccaataacaatccgcgattcatgtcgggtcagttcgccgtggaacagttgcttgccatgttcgtaaaccagtgcgccgttttccgcgacaaaagagatctcatcctttagctcaggaaagaatgaaataagctggtaatactgattaccgctggcgacaacgaactcaatgccgcgctttttcagttcctgatattgcgccataaaacgtggttggttgtacgttttgacgtcgttaagaaaagtaccgtccatatctgtgacgataacttttacgctcataggtgtgctcccggctcgaaaatgaaaccgtaacagtgtaataacaatgtgacgcagagcacaaattatatttcgaatgaaagtaaggatgaaattgatgatgtgaatgatttagcccggcgacgtctccgccgggctgaggggattacagcatatgttcggtacgggcgatgatatcgtcctgagcgtctggagagagcgcggtgaagaaggcggaataacccgcgacacgcactaccagatcgcgatactgatcgggatgttttttcgcctccagcagcgtttcgcgggaaacgatgttgtactgaatatgccagcctttatgcacttcaaagaaggtgcgcagcaggatcatcagtttctgcttgtcagattcgttctccagtgttgctggattcagtttctggttgagcaacaccccgccgagaatcgctgccgtaggcagtttacccaccgagccaatgaccgcagtagggccaagatgatcagtaccggaagccgggcttgcgccttctgccagcggggtgtgggctttacgtccgtctggcgttgccatagtttgnnnnccaaacggtacgttagcggagatagacgacgtacccgcgtaatagttgccgccaaccggaccacgaccgtagcgcgggttatggtactgtttcagttcgtcgatataggtctgataagcgcgagccagcagcgtatcgacagtatcatcgtcgttgccgtacttcggcgcaccgttaatcagccgctgacgcagctgctcgtgagtcaggccgtcgaagtcattcgccagtgcggcagccagctgttgctgactaatcgcgccctgttcaaataccagtttcttcacggccgccaggctgttgccgaggttggcaatgccaacctgcaggccagaaacccagtcatatttcgcgccgccttgcttgatacttttcgctcgctcaatacagtcatccaccagcgccgagcagagaatatcgtgcacgttctcttccagcatggtgtcgacgacatattcgatttcgattgatttacgcgtgtagtaacggatttgcgtatcccacgcgtccatcacttcatcgaagttgttgaagttacctgccgacaacgctttttcttgtggcaggaacactttgccgctggtggcatcacgcccgccttccagcgccgccagcatcacgcgggcgaagttgataaagctcatgccggtacagcgatagccccatttgccaccgacggcggtttcgatacaaccaatcgctgcatagtcgtaagcatcctgcggttcaataccgagtttaataaattccgggatgacgatttcgtcgttgttgaacgccggcatcccgaagccgcaacggatcacctgtacgcaggcgtcgaggaaatcgttgctcattcccgcgtggtaacgcacgctgaggttaggctgagtggaacgcaggcgaccgcaggattcgaggatcgcgtaagagagtggattcaccgcgtccattggttgaccatcaaccagattttgtccgccaatggtgacgttctgatacagaggacttcccgcagaggcttttgagtgtgagcctgagcggattttgttcacttccagcagtttcagccagcagctatgcagcaattcgatggcgtgttcgcgatccagtgtctggttgagttcaacgtcgcggcgatagtacgggtagagatactggtccatacgaccaaacgatactgagtgaccgttagattcgatctgcaaaatcaactggatgaagtaacacagttgcagcgcctgccagaaagtctgcggcggctggtgggcgataagatcgcagttttctgccatcgccagcagttcatcgcgacggctttcgcgggtttcggtcgcggccattgcacgcgccagggcagcgaaacgttcaatgtgttcactgactgccaccagcacgatatcaatcgctttcaggaactgttcgccgtgcagatcttccagtaccgtcagattgatgcgcgagcgacgttccgctactttctcgcgcagaccatcaagcctttttccagcagcagcgggaaattcaccgccaggtgcgcatcgccggaggtcatattgccttccgctttaatgattccggtcgccagcagacctttttgctcatcggtaaacatgccgtagcagcgatcctgtaccgtctgaccgcgccaccacgggcacacttcatgcagaacgcgtttgttctcttcgctcaccgcaaagccagcaccgggacgatctgccagatcatcaatctctttttcgatccacgagacagtatattccgggaagatcggcgcggcgcgaacttcgcttgcctggttgccgatgatcaactcatcgtgcttgatccagatagtgcgattcgccaggtgatgtgccagcgccagcgcgcgacgtacagggatcggcttatcgagatgttgttgatacatctcggtatagtgctgcgcgcgctcggtacaaaccggcggtttcacaatatgcaccagcgcatttttgtgcgctttaatgcggtcgctgagcgtgtccagtttcagtgtggtcatggttgttatcctcgtaaggtcgcggttaaccctttctggcaggcatactgctgggcaaagtcgagcagttctggcgcatcaagcggtttttccggggcgtcatagggcagattaagtaagtgatatttgttgatgcccagcgtgtggtagggcaggaaatgaatttcgccaacgtgcagctcgtcggcggcaaaatcggtaatggctttcacagaggtttcgtcggcattaaagccttgaatcagcggcacgcggataatgatttttttgcccgctgcggcgagttttttcaggttatccagcaccctggcggcgttaccgtcggtccactgtttaaacggcgcgttggcaacgtgttttaaatcggcaagaaacagatcgatatagggcagagaaggggcgatatatttccacggcacatgcaggcaggtttctaccgcagtatgaatgccggcctcgtggctggcttgcagtancgccgtcgccatttccggctgcatgaatggttcaccgccagaaagtgttaagccgccgccgctgcgatcgtaaaacggtttatcgcgcagaacggtcaccatgatctcctcaacgcttttcacttccccacacacggttaacgcctgtgtcgggcagcagtcggttaacgccgtcagatgctccggggttaacttttcccgatgaataagcaaaccattcagcgcgcgctcaatcacttccggcgcggtcttagcgcacagctcacagccttccaggcacagacgtgggtcatacagcagatcctgcgtgcgggcgcggctttccgggttctgacaccagcggcagcccagcgaacagcctttaagaaatacgaccgtgcggataccggggccatcatgggtcgagtagcgctgaatattgaaaatcatagttgcctctctgtttcgttcaaatattaaaatactttcgaatgaaagttggattgatgtgcgtcaactgttcagagagttttcccgtgatagtctacattcagacaaaaagtacattttgaggatggttatggaactgtatctggatacttcagacgttgttgcggtgaaggcgctgtcacgtatttttccgctggcgggtgtgaccactaacccaagcattatcgccgcgggtaaaaaaccgctggaggttgtgcttccggaacttcatgaagcgatgggcggtcaggggcgtctgtttgcccaggtaatggctaccactgctgaagggatggtgaatgacgcacgtaaattgcgttctattattgcggatatngtggtgaaagttccggtgaccaccgaggggctggcagctattaagatgttaaaagcggaagggattccgacgctgggaaccgcggtatatggcgcagcacaagggctgctgtcggcgctggcaggtgcggaatatgttgcgccttacgttaatcgtattgatgctcagggcggtagcggtattcagactgtgaccgacttacaccagttattgaaaatgcatgcgccgcgggcgaaagtgttagccgcgagtttcaaaaccccgcgtcaggcgctggactgcttactggcaggatgtgaatcaattactctgccactggatgtggcacaacagatgattagctatccggcggttgatgccgctgtggcgaagtttgagcangactggcagggagcgtttggcagaacgtcgatttaaccggacgttctgcatcctcataaattgctgatgacgtggcggagtgcaccgatgcctgccgcgcttggaaatctgtgcccgaaccgtaggccagataaggcgttcacgccgcatctggcgtctggagcaaatgcctgatgcgacgcttgtcgcgtcttatcaggcctggaggtggcaattactgcccgcacacctcacaccccggattgcgcatcagtttcatttcgcgaaactgacaggtcatcgcatcgtacatgacgattttcccgctggccggtttgccataacctgccagcagtttgatcgcttccattgcctgcaacgaaccaatcacgccgatcaacggtgccatcacgcctgcttctacgcaggttaacgcgttctcgctaaacaaacggctaaggcagcgatagcacggttcgccgtcctgataagtgaagaccgtgatttgcccttccatacgaattgccgcgccggaaaccagcggcaccttcgtggcaaaacagcctgcgttcagttgattacgtaccgcaacgttatccgtacagtcgagcacaagattgtgttcagcaatcaatgctgcaagttctgcgtcatccagcagtgcattgactggcgtaatcgcgatatgtgggttgatccgcgtcagagcgtcacgggcggattccaccttcggttgcccgaccgtagcatcactgtgcagcgtctggcgttgcagattcgagagcgaaaccgagtcgaagtcgagcagcgtcaggttgcctacaccggcgcttgccagatactgcgaagctgcgcagccgagtccaccgaggccgacgaccagcacacgagaatctttcagcgcctcctgaccgtcaaaatcaaaaccgcgcagaatgatttgccggttgtagcgcagcatctcttgatcgctgagttccgccattacaggcctccgaacaacgcgttaaacggttctacttccacccattcgcccacttccacattgccgcgatcgcgttccagcacgataaagcagttgccgaggctaaaggagctgaatatatgtgaaccctgatgtccggtggtcgtcacttccagttcgccatcggcgttgcggtgcagcacgccgcgctggaaatcaagacgtcctggcgtttttttcaggcgggacgctgtgcgtannc

SEQ ID NO: 207 - DNA, 14920 bp, Escherichia coli
  Strain O55:H7
  modified_base (4)..(4): a, c, g or t
  modified_base (506)..(506): a, c, g or t
  modified_base (2665)..(2665): a, c, g or t
  modified_base (7459)..(7459): a, c, g or t
  modified_base (7510)..(7510): a, c, g or t
  modified_base (7938)..(7941): a, c, g or t
  modified_base (10803)..(10803): a, c, g or t
cggncaggccgctggcggtgttgccgcttagttttgccagcaaaggctgtaccagttgatagaaggtcagcgtcgctgaaaccgggttgcccggcaggccgcagaaccagctattgctgagtttaccgaacgcgaacggtttacctggtttaatcgccagcttccagaaggcgatctcccccagctcttcaagaatcgttttggtgtaatccgcttcacccactgaaacaccgccggaactgatcaccacatccgcctggctgtcggcttcaataaatgcggcgcgcagggcatgtggatcgtcgcggataatccctaagttgattacctcgcaacccagctgttctaacatcaggtgtacggcgagacggttggtatcgtagatttggccgtcgcccagcggctggcctggcaactggagttcatcaccggtagaaaaaagcgctacacgcactttacgaatcaccggaacttcggcaatccccagtgaagcaattactggcagntctgcggtagtcaggcgagtccccgctgggaaaacaaccgcacctgcagagatatcttcaccgcgacggcgaatattttgcccgctacgcacttcagcagtaaaacgcacgccattgtccgtttgttcagtctgctcctgcatcaccaccgcttcgcagccttccggcaccggcgcaccggtcataatacgaatgcaggtacccgcaggccattcaccatggtacggctgaccggcaaaggatttaccggcaacgggcagcggttgtccggaggtgatatcggccaaacgtaccgcgtaaccatccattgcggagttatcaaaccctgggacatccagcggcgaaacgacatcgctcgccagaatacgaccaaaacactgaaccagtggcagcgtttcctgggcggtcagtggggtgacgcgagaaagcatctcattaagcgcggtgtcgagcgacatcaatccggtggtaaattccatgaaaacactcctgcggaggcaaaatcgaatttgcctattatgtcagaaaaacgccacagactgtatgccacctcgggcgtagcgctgggtcctgcctttacatgccatatccatctttctatattcaaaaattgaatgagtaattcataaaaattctgatatttatagcaaaagtggcgagccacccttaatggacgaatactatgggcaaagcagtcattgcaattcatggtggcgcaggtgcaattagccgcgcgcagatgagtctgcaacaggaattacgctacatcgaggcgttgtctgccattgttgaaaccgggcagaaaatgctggaagcgggcgaaagtgcgctggatgtggtgacggaagcggtgcgtctgctggaagagtgtccactgtttaacgccggaattggcgccgtctttacgcgtgatgaaacgcatgaactggacgcctgtgtgatggatggtaacaccctgaaagccggtgcggtggcgggcgttagtcatctgcgtaatccggttcttgccgcccggctggtgatggagcaaagcccgcatgtgatgatgattggcgaaggggcagaaaattttgcgtttgctcatggcatggagcgcgtctcaccggagattttctccacgcctttgcgttatgaacaactaatggcagcgcgcgaggaaggggcaacagtcctcgaccatagcggtgcgccactggatgaaaaacagaaaatgggcaccgtgggggccgtggcgttggatttagacggcaatctggcggcagccacgtccacgggcggaatgaccaataaattacccggacgagttggcgatagccccttagtgggtgccggatgctacgccaataacgccagtgtggcggtttcttgtaccggcacgggcgaagtcttcatccgcgcgctggcggcatatgacatcgccgcgttaatggattacggcggattaagtctcacggaagcctgcgagcgggtagtaatggaaaaactccctgcgcttggcggtagcggtggcttaatcgctatcgaccatgaagggaatgtcgcgctaccgtttaacaccgaaggaatgtatcgcgcctggggctacgcaggcgatacgccaaccaccggtatctaccgtgaaaaaggggacaccgttgccacacagtgatgaacttgatgccggtaatgtgctggcggttgaaaatcttaatattgcctttatgcaggaccagcagaaaatagctgcggtccgcaatctctcttttagtctgcaacgcggtgagacgctggcaattgttggcgaatccggctccggtaagtcagtgactgcgctggcattgatgcgtctgttggaacaggcgggcggtttagtgcagtgcgataaaatgctgttgcggcggcgcagtcgtgatgtgattgaacttagcgagcagagcgctgcacaaatgcgccatgtgcgcggtgcggatatggcgatgatatttcaggagccgatgacatcgctgaacccagtatttactgtgggtgaacagattgccgaatcaattcgtctgcatcagaacgccagtcgtgaagaagcgatggtcgaggcgaagcggatgctggatcaggtacgcattccggaggcacaaaccattctttcacgttatccgcatcaactctctggcgggatgcgccancgagtgatgattgcgatggcgctgtcatgccgcccggcagtgctgatagccgatgagccaaccatcgcgctggatgtcactattcaggcgcagatcctgcaattaatcaaagtattgcaaaaagagatgtcgatgggcgttatctttatcactcacgatatgggcgtggtggcagagattgccgatcgggtactggtgatgtatcagggcgaggcggtggaaacgggtaccgtcgaacagatttttcatgcaccgcaacatccctacacccgtgcgctgttagctgctgttccgcaacttggtgcgatgaaagggttagattatccccgacgtttcccattgatatcgcttgaacatccagcgaaacaggccccccccatcgagcagaaaacggtggtggatggcgaacctgttttacgggtgcgtaatctggtcacccgtttccctttgcgcagcggtttgttgaatcgcgtaacgcgggaagtgcatgccgttgagaaagtcagttttgatctctggcctggcgaaacgctatcgctggtgggcgagtctggcagcggtaaatccactaccgggcgggcgttgctgcgcctggtcgaatcgcagggcggcgaaattatctttaacggtcagcgaatcgataccttgtcacccggcaaacttcaggcattgcgccgcgatattcagtttatttttcaggacccttacgcttcgctggacccacgtcagaccatcggtgattcgattatcgaaccgctgcgcgtacacggtttattgccaggtaaagaagcggttgcacgcgttgcgtggttgctggagcgcgtgggcctgttacctgaacatgcctggcgttacccgcatgagttttccggcggtcagcgccagcgcatctgcattgctcgcgcgttggcattgaatccaaaagtgatcattgccgacgaagccgtttcggcgctggatgtttcaattcgcgggcagattatcaacttgttgctcgatctccagcgtgatttcggcattgcgtatctgtttatctcccacgatatggctgtggtagagcggattagtcatcgtgtggcggtgatgtatctcgggcaaattgttgaaattggtccacggcgcgcggtcttcgaaaacccgcagcatccttatacgcgtaaattactggcggcagttccggtcgctgaaccgtcccgacaacgaccgcagcgtgtactgctgtcggacgatcttcccagcaatattcatctgcgtggcgaagaggtggcagccgtctcgttgcaatgcgtcgggccggggcattacgtcgcacaaccacaatcagaatacgcattcatgcgtagataacattcaggcggagaataaaatggcaagagctgtacaccgtagtgggttagtggcgctgggcattgcgacagcgttgatggcatcttgtgcattcgctgccaaagatgtggtggtggcggtaggatcgaatttcaccacgctcgatccgtatgacgcgaatgacacgttatctcaggccgtagcgaaatcgttttaccaggggctgttcggtctggataaagagatgaaactgaaaaacgtgctggcggagagttataccgtttccgatgacggcattacttacaccgtgaaattgcgggaaggaattaaattccaggatggcaccgatttcaacgcagcggcggtaaaagcgaatctggaccgggccagcgatccggcgaatcatcttaaacgctataacctgtataagaatattgctaaaacggaagcgatcgatccgacaacggtaaagattaccctcaaacagccgttctcagcgtttattaatattcttgcccatccggcgaccgcgatgatttcaccggcagcgctggaaaaatatggcaaggagattggttttcatccggtgggaaccggaccgtatgaactggatacctggaatcagaccgattttgtgaaggtgaaaaaattcgcgggttactggcagccaggattgcccaaactggacagcataacctggcgtccggtggcggataacaacacccgcgcggcaatgctgcaaaccggtgaagcgcagtttgctttccccattccttacgagcaggccgcactgctggagaaaaacaaaaatatcgagttgatggccagtccgtcaattatgcagcgttatatcagtatgaacgtgacgcaaaagccattcgataacccgaaggtccgtgaggcgctgaattacgccattaaccgtccggcgctggtgaaagtggccttcgcgggctatgcaacgccagctactggtgtggtaccgccgagtatcgcctacgcgcaaagttataaaccgtggccttacgatccagtgaaagcgcgcgaattactgaaagaggcgggatatcccaacggtttcagtaccacgctgtggtcgtcacataaccacagcaccgcgcagaaagtgctgcaatttacccagcagcagttagcgcaggtcgggattaaagcccaggtgactgcgatggatgccggacagcgggcggcagaagttgaaggtaaagggcaaaaagagagcggcgtgcggatgttctacactggctggtcggcttcaaccggcgaagcggactgggcactatcgccgttgtttgcctcgcaaaactggccaccgacgctgtttaataccgcgttttacagcaataaacaggtggatgacttcctggctcaggcactgaaaactaatgatccggcggaaaagacccgcttatataaggcggcgcaggatatcatctggcaagagtcgccgtggatcccgctggtggtagaaaaactggtgtcggcacacagtaaaaacctgaccggtttttggatcatgccagataccggcttcagctttgaagacgcggatttgcaataagcaacgcagggagtggaatgcttaattacgttatcaaacgattactggggttgattccgacgctgtttatcgtctcggtgctggtgtttttatttgtgcatatgctgcccggcgatccggcgcgattgattgccgggcccgaagctgatgcgcaggttatagaactggtgcgtcagcagctggggttggatcagccgctgtatcaccagttctggcactatatcagcaatgctgtgcagggggattttggcctgtcgatggtgtcacgtcgtccggttgccgatgagattgccagccgctttatgccaacgctgtggctgaccataaccagtatggtctgggcggtgatatttggtatggcggcgggaattatcgccgccgtctggcgtaaccgttggccggatcgattgagtatgaccattgcggtgtcggggatctcgtttccggcatttgcgctggggatgcttttaattcaggtattctccgttgaactgggctggctgcctaccgtgggagcagacagttggcagcactacattttaccctccctgacgctcggcgcggcagtggccgccgtgatggcgcgctttacccgcgcgtcgtttgtcgacgttttaagcgaagattatatgcgtaccgcgagggcgaaaggggggagcgaaacctgggttgtcctcaaacacgggctacgcaacgcgatgatcccggtagtgaccatgatgggcttacagtttggctttttgctcggtggttccatcgtggtggagaaagttttcaactggcccggacttggacgcttactcgttgactccgtagaaatgcgcgattacccggtgattcaggcggaaattctgcttttctcgctggaatttattcttatcaacttagtggtggatgtgctttacgccgccattaacccggctatcaggtacaagtaaggatgcgactatttaactggcgacgtcaggcggtgttaaacgccatgccactggtcaaacctgaccaggtacgtacaccgtggcatgaattctggcgacgatttcgccgtcagcatatggcgatgaccgccgcattattcgttattttattgattgtggtggccatttttgcacgctggatcgctccctatgacgccgaaaattattttgattatgacaatctgaataacggaccttctttgcagcactggtttggcgtcgattcactggggcgcgacattttcagccgtgtcctggttggtgcgcaaatctcgctggcggcgggcgtgtttgccgtgtttatcggtgcggcgatagggacgttgctgggcttgttggctggatattatgaaggctggtgggatcggctgatcatgcgcatttgcgatgtgctgtttgccttcccgggtattttactggcgatcgctgttgttgcggtgttgggaagcggcattgctaacgtgattattgcagtcgccattttttccatccctgcgtttgcccgcctggtgcgcggcaacacgctggtgttgaaacagcaaacctttattgagtcagcacgcagtattggtgccagcgatatgaccattttgttgcgtcatatcctgcctgggaccgtctcttctatcgtggtgtttttcaccatgcgcattggtacctcgattatctctgccgccagcctgtcatttctcggcctcggtgcgcagccgccgacaccagagtggggagcaatgctcaatgaggctcgagcggatatggttatcgcgccgcatgtcgctgtttttccggccctggctatttttctgactgtactggcgttcaatttgttgggcgatggtttacgcgatgcgctggatccgaaaattaaaggatagttacgtttgaatattgcttgaaagagtaatcacctcncaggaaattattgccctaagcaagtgttgtaactttctgctgattttgtanaatcgggtaatttggttaaatagccgcagcaagggactgtttttgcagcggcacagcgttcagacagttattttgttaaatgtattaacatgctgagtttatacgaaaagataaagataaggctgataattttatttttattggcagcactgtcatttattggcctttttttcatcattaactatcaactggtatcggaacgcgcggtaaaacgtgccgatagccgctttgaacttattcagaaaaacgttggctatttctttaaagatattgaacgttcggccctgacattaaaggactcactgtatttattaaaaaatacagaggagattcaacgcgctgtgatcctgaaaatggaaatgatgccatttttagactcggtgggactggtacttgatgataataaatattatctcttttcgcggagnnnnaacgataaaatcgttgtttatcatcaggaacaagtaaatggaccgcttgtcgacgagtcagggcgggttatttttgccgattttaacccatcgaaacgaccgtggtcggtggcttcagatgactctaacaacagctggaatccggcctacaattgctttgatcgtccgggtaaaaaatgtatctcttttacgctacgcatcaacggcaaagatcacgatttgttagcggtggataaaattcatgtcgatttaaactggcgatatctgaacgagtatcttgatcaaatcagcgctaatgatgaagttctatttttgaaacaaggccatgagatcattgccaagaatcaactcgctcgtgaaaaactgattatttataatagcgaaggtgattataatattattgattctgtcgatactgaatatatcgaaaaaacatcagcggtgccaaataacgcattattcgaaatctatttttattatccgggcggtaatttattgaacgcatcagataaacttttttatctgccgtttgcgttcattattatcgtattgctggtggtttatttaatgaccactcgtgtgttccgtcggcaattttctgaaatgacagagctggttaatacgctggcgtttttgcctgactcaacggatcagatcgaggctctgaaaattcgcgaaggcgatgcgaaagagattatcagcatcaaaaattcgatcgcggaaatgaaagatgccgaaattgaacggtcaaataaattgctctcactgatctcttacgatcaggaaagtggttttattaaaaatatggcgattattgagtccaacaataatcagtatctggctgtggggatcatcaaactgtgtggtctggaagccgtggaagctgtgtttggtgttgatgaacgcaataaaatcgtcaggaaattgtgtcagcgaattgctgagaaatatgcacaatgctgcgatatcgtgacattcaatgccgatctctatttacttctgtgtcgggaaaatgtacagacatttacccgtaaaatagcgatggtaaacgattttgacagcagctttggctaccgcaatctgcgcatccataagtctgccatttgtgaacctttgcagggggaaaacgcctggagttacgcagaaaaactgaaactggcgatttccagtatccgtgaccatatgttctccgagtttattttctgtgatgacgcgaaactcaacgaaatagaagagaatatctggattgcgcgtaatattcgccatgcaatggaaattggcgaactattcctcgtctatcaaccgatcgttgatattaacacccgcgccattctgggcgcggaggcgttgtgccgttgggtgtctgcggagcgggggatcatttcaccgctgaagttcattaccattgctgaagatatcgggtttatcaatgagctgggttatcagattattaaaacggcaatgggtgaattcagacattttagtcagcgtgcatcgctgaaggatgatttcttactgcatattaatgtttcgccctggcagttaaacgaaccgcactttcatgagcgttttaccaccatcatgaaagaaaatggcctgaaggcgaacagcctctgtgttgagatcactgaaaccgtgatcgagcgaattaatgaacatttttatctcaatattgaacaactgcgtaaacaaggggtacggatatcgattgatgactttggcaccggtttgtcaaacctgaaacgtttttatgaaattaatccagacagcataaaggtggactcgcaatttaccggcgatattttcggtactgcgggaaaaattgtgcgcattattttcgacctggcacgctataaccggatcccggtgattgcggaaggcgtagagagcgaagacgttgcgcgcgaattaatcaaattaggatgtgttcaggctcaggggtatctgtatcagaaacccatgccattctccgcctgggataaaagtggaaaattagtaaaagagtagtttacgtatgtccagaatcaataagttcgtacttacagtcagtctgctgatttttatcatgatttcagcagttgcctgcgggatctacactcaaatggtaaaggaacgggtgtatagcctgaaacagtccgttattgatactgcttttgcggtggcaaatattgctgaatatcggcgtagcgtggcaattgatcttatcaacacgctaaatcccacggaggaacagctgttggttggcttacgcacagcttacgccgactcggtttcaccctcttatttgtacgatgtcggtccttatctgatttccagtgacgaatgtattcaggtaaaggagttcgagaaaaattattgtgcagatattatgcaggttgtgaagtatcgacatgtcaaaaatacagggtttatctcttttgacggtaaaaccttcgtctattacctctatccggtaactcacaatcgtagtctgatatttttgcttggtctggagcgtttttctttactgtcaaaatcgctggcgatggacagcgagaacctgatgttctctctgtttaagaacggtaaaccggtgaccggtgatgaatataatgctaaaaacgccatcttcaccgtttcggaagcgatggagcacttcgcctatttgccgaccggattgtacgtatttgcgtataaaaaagatgtttatttgcgggtctgtacattgattattttctttgccgcattggtggcagtgatatcgggtgccagttgcctctatctggtacgcagagtgattaatcgtggtattgtggagaaagaagccattattaataaccattttgaacgcgtactggatggcgggcttttcttttcggctgncgatgtcaaaaaactctacagtatgtataactcggcgttcctggacgacctgaccaaagcaatgggtagaaaatcctttgacgaagatttaaaagcgctgccggaaaaaggcggttatttgtgcctgtttgacgtcgataaattcaaaaatattaacgacaccttcggtcatttgctgggcgatgaagtgttgatgaaagtggtgaaaatccttaaatcacagatcccggtagataaaggtaaagtctaccgcttcggcggtgacgaatttgcggtgatttatactggcggcacgctggaagagttactatcgattctaaaagaaatcgttcatttccaggtgggaagcattaatttaagcaccagtatcggtgtagcgcattcaaatgaatgtactaccgtcgaacgcttgaaaatgctggcggatgagcggctgtataagagtaagaaaaacggcagggctcagattagctggcagtagaattagaatagtgttagtacccctgaatcaaggggtactaatgaatgtggtaaatcatttgcaaacattttactttgcaaaaacttccggcccttttattgccaatgtattcaaaatacgtagtgccgggccgctcggttttatttcattacgttcccatttcgagacactttcttttgacattcccattgtatgtgccagcacggattgtgacatgccgtatcgggtgcggatggctttgatctcttcacccgtcattgatttgactttggctatacgggcgctgacttcacgggctttgaccatgacggcaatggcatcaacctcactatcagacatcaggcccagtgcattcagttcctttgcatcttccagcatcatttgtaatttatcgctcatttttcacctcaatcaagaagccagtttcgatcaaatcctctatttgcttattgctaaaggccagaaatgcatttgccatttttttgtaggctgccagttcatcatcttcgatttctttgcttcctttactgcttagaccactcttggaccaaccatcataaaaaaacacatgatttgctgatttaaaaaagataattgttctggctccaccactctttccttgttggaggggtaaccgttttttgatgacaccgctacctaaatcagcctcccatatgccttgcatcacttcttcagcggcagccatgagaactttatcgtgaataccaagttttttcgtgctttggctgaatcgccttgccttatacacacccatacatccatccttgtggtaatgtttactatagtaaccattacgcttatttcaagtaattgcgatcaaaactttaatttggtgtgaaaaagtgagagttgcctcgagtacgattcatttttctcgatttatgcgtcaggggattttgtgcgtaagggtaggacatcgggaagggtagtagaggcagatcgaagaacaatatccttgttagatctgcctttagattaattaaacccggctaccccacaaatcgtactcatcggcgtgctcgactttcacacgcaggatatcacccggcttaacgttggtttcaccattgagataaaccgcaccgtcgatttccggtgcatctgccatgctgcgaccaatcgcgccttcttcgtccacttcgtcgataatcaccagaatttcacggcccactttctcttgcaggcgctcggcggaaatctgctgctgcaactgcatgaaacggttccagcgttcttctttcacttcttccggaaccgggtcaggcagggcattggcgtctgcaccttcaaccgggctgtatttaaagcagccaacgcgatccagacgcgcttctttcaggaagtcgagtagcatctggaaatcttcttccgtctcgccagggaagccgacaataaaggttgagcgtagggtcagttccgggcagatttcgcgccactgtttgatgcgcgccagttggcgatctacagaacccggacgcttcatcagtttgagaatgcgcgggctggcgtgctgcaacggaatgtccagatacggcaggattttgccttctgccatcagtgggatgacgtcgtccacatgcggataagggtaaacgtagtgcagacgtgtccagatccccagtttcgataactgttcgcacaggctgaccatgctggtttttaccggctcgccgttgtggaagccagtacgatgtttaacatcaacgccataggcggaagtatcctgcgagatcaccagaatctctttaacgcccgcatctaccagacgtttcgcttcacttaatacttcgccaatcggacggctcaccaggtcgccgcgcatagacggaataatgcagaaggtgcagcggtgattacagccttcagaaattttcagataggcataatgacgcggcgtcagtttgacaccttgttctggcaccaggctcaggaatgggttgtgtttcggttttggcacgtagtgatgaacgtgctccagaacctgctcatagctatgaggcccggtgatttccagcactttcgggtggacttcgcggatctgatcttcttttgcccccagacaaccggtcacaattaccttgccgttttcattcaacgcttcaccaatggcttccagtgattcttgtaccgcgctgtcaataaagccgcaggtgttgacgatcaccatgtccgcatcgtcatagctcggtaccacgtcataaccttcagtgcggagttcggtgagaatacgctctgaatcgacaaggtttttcggacagccaagggaaacaaagccgattttcggctggggagttactttgctcatagcttaaaaaatattcagttacaggaaaggtcagggcagggattctacagagttctggataaaatttgtatcgcaatctcattcgctggcggaggcgaaggaaatgtaaattttgttaattcggcgtgaagaattgatcctggacagcattatgctcaaaaaatagccatactatttaattgcaacaaggctggaaagaggaggatcgaagtatgttcgttgacagacagcgaatcgatctgctgaaccggttgatcgacgcacgcgttgacctcgccgcatacgtgcaactgaggaaggcaaaaggatacatgtccgtcagcgaaagcaatcatctacgagataacttttttaaactgaatcgcgaactgcacgataaatcgctgcggttgaatcttcatctggatcaggaagagtggagtgctcttcatcatgctgaagaagcattagcgacagccgcagtatgtttgatgagtgggcaccatgattgcccgactgttattaccgtcaacgccgataagcttgaaaattgtctgatgagcttaacgctgagtatccagagcctgcagaagcacgccatgcttgagaaggcctgaaaactaagggggagaaagcgtctcccccttcatgtttaagtttttgtaaaaatgaatttgttatctcctccactgactacgctttaagccagagtcaatccggaggcgttatgcatcgacaattctttttccttgtgccccttatttgtctttcttccgctctctgggcggctcctgcaacggtaaatgtcgaagtactgcaagacaaactcgaccatccctgggcactggcctttttacccgataaccacggtatgttaatcactctgcgcggcggcgagttgcgtcactggcaagcaggaaaaggattatctgcgccgctttccggagttccggacgtttgggcgcacgggcagggcggcctgctggacgtggttttagcgcctgattttgctcagtctcgccgcatctggttaagttattccgaagttggcgatgatggcaaagccggaactgctgtggggtatggccgcttaagtgatgatctctcaaaagtgaccgactttcgcaccgtctttcgccagatgccaaaactgtctaccggcaaccattttggcgggcggctggtattcgacggtaaaggttatctttttattgctctgggcgaaaacaatcagcgcccgacggcgcaggatctggataaattacagggcaaactggtgcgtctgaccgaccagggcgaaatcccggatgataatccttttataaaggaat

SEQ ID NO: 208 - DNA, 5906 bp, Escherichia coli
  Strain O55:H7
  modified_base (310)..(310): a, c, g or t
  modified_base (3348)..(3348): a, c, g or t
cgccgagatctggtcttatggcattcgtaatccgcaaggaatggcgatgaatccgtggagtaatgcactgtggctgaatgaacatggcccgcgcggtggtgatgaaattaatatcccgcaaaaaggcaaaaactacggctggccgctggcaacctggggaatcaactattcaggctttaagataccggaagcgaaaggggagatcgtcgccgggaccgagcaacctgttttttactggaaagattcgcccgccgtgagcggcatggccttctataacagcgataaattcccccagtggcagcaaaaattntttattggcgcgctgaaagataaagatgtcattgtgatgagcgtcaacggcgacaaagtaacagaagatggccgtattttaacggacagagggcagcgaattcgtgatgttcgcactggacccgacggttatttatacgttctcaccgacgagtccagtggggaattacttaaagttagcccacgcaattagctaacgggaatcatcaccactttgcgcactgcggggcgttcagtgagttgctgataccagcgttgcagatttggacgcggtgtccaggtcaggccaacattaaacaaattgtagatgaacggtgcgatagcgatatcgcccacaccaaactcgtcgccagagaaccattttacttttgccagttccgcatcgagcagggcaaacagggcgtcgcactctttgcaactggcatcaatggcggcctgatcgcgctcttccggtggtgttctgactaatcccatcaggatcccgcgatgagcattactgagtgtctggtttgcccagtccatccatttttctgcttccgcacgacgtgccggtgagtcgatccacaggcgtttttgcccgtactgtgccgccagatagcggacaatggcgtttgattcccaaagaatgagatcactttcgtcgtcacgcaacaacggcaccagcccgttagggttcatcgccagaaaatcagcatcgtgatttatcccaaactcacggcccgcgagaatttgctcataaggtagttccagttcttcgagcgtcagcaatactttttttacgttggttgaattattccgaccccacagcgtaatcatactcaccccttttccgacaggcagccacaggctgaacaggactccgatggtgaagtaaagttaacttttaagcaacagctggcaaaaaaatgacaccagaagcagcgaagcggcaggatattgcataaactttaaaaactttaccaacttacggtttctttaagtttgtgtgtgcgttattaatcaccgaacttatcatacggcgatataacgtatttttttgaatggatactcgggtggcatttatgacgcaatactcctctctccttcgtggtcttgcagcgggttctgcatttttattcctttttgccccaacggcattcgcggccgaacaaaccgttgaagcgccgagcgtggatgcgcgtgcatggattttaatggattacgccagcggtaaagtgctggcagaaggcaatgcggatgagaaactggatcccgcgagcctgactaaaatcatgaccagctatgtggttgggcaggcgcttaaggccgataagattaaactcaccgatatggtgacggtcggtaaagatgcctgggcgacgggaaatccggcactgcgtggttcatcggtaatgttcctcaaaccgggcgatcaggtttcggtggcagacttgaacaaaggtgtgattatccagtccggtaatgacgcctgtattgcgctggccgattacgttgccgggagccaggagtcatttattggtttgatgaatggttatgccaaaaaactggggctgaccaacactaccttccagacggtgcacggtctggatgcgccggggcagttcagtaccgcgcgcgatatggcattgctgggtaaagcattgatccacgatgtgccggaagagtacgccattcataaagagaaagagttcaccttcaacaaaattcgtcagcctaaccgtaaccgtctgctgtggagcagcaatctgaatgttgatggcatgaagacaggaaccacggcaggcgcgggatataatctggttgcttcggctacccagggcgatatgcgtttaatctccgtagtgctgggggcgaaaaccgaccgtatccgttttaatgagtctgagaaattattgacctggggtttccgcttctttgaaaccgtgacgccaattaaacctgatgccacctttgtgactcagcgcgtctggtttggtgataagagcgaagtgaatctcggggcaggcgaagcgggctcagtgaccataccgcgtgggcagctgaaaaacctgaaggcgagctacacgttaacggaaccgcagcttaccgcaccgctgaaaaaaggtcaggttgtcgggaccattgatttccagcttaacggtaaatccattgagcagcgtccgctgatcgtgatggaaaatgtggaagagggcggattctttggtcggatgtgggatttcgtgatgatgaaattccatcagtggttcggcagctggttctcttaatcttctgataaccggatggcgcgaaacgtcatccggttatacgtcattaatacatcaacttaatacgctgcgtctgcgcgtacttcacatactcatcttccgggcaacaatcgctcaccacaatatcaaagcgtttcaggtcacccatgcgcgccggacgcaccttgccaaatttactgtggtcaacaaccagcacatgcttttgcgccatcgacatggcccagtgttttaccggcaactcttcaagattaaaacaggtagcgcctttactgacatgcacgcccgccgcagaataaaaagcgatatccgggcaaaaattattcagcgtttgctgaaaatcgatgggtttgaaaatggcgttgctggcgtgaaattcaccaccgcacagaaatgcgcggcaatggggtttttctttcagcgccagaaaggtatttagcgaataacaaacggcggtaaaagggatttcattatcaatcgcttcaataatccacggcgtggtggtgccacagtcaaaaaagagggtctgatcgggttctaccagtgtcgcagccagttttgccgcccggcgtttttcttccaccaggcgggatttttgatcgcttaacaggtaatggctggcgctgcgcggttccagaacaatatagccgccgagcaaaacgacgggcgcactgtggttgttcagatcgcgacgaatcgtcatctccgaaaccccaagcagggcggcggcgtctttaagatgtaacttatcgctgcgttttaattcttgcagcagctncccgatacgctcttcgcgacgtgtttccataatccctctgaatagttattgaagcgagccgctcaatactacactttttagcagagatcagtcacgcacccagcctttgcggatcggtaatgcaaaacagaagcgataccacgattgcagacgttgatagagtttatgccccatcgcttgccagataatctgggcactaaggcagccaatcatacctgccagcaatccaccgagcatatccagcggccagtggacgccaagataaacgcgcgaccaggcaatgacgacggccagcaccattaaaagtgagccggaccacaggcgatgccagcataaaaatgccagtgcaaaggtgaaaatcaccgtaccgtgatcgctcgggaatgagtcatccgccgcatgatgcaggaagttatagccgatattttcgacaaacggtcggtcgtgcggaaaaagatgtcccatcgtccaggacaccaacaggctgaccgccagcgcgatagcgatttttatcaccagttgccgttgtgctgtaagcccccacaaccaaagtaccgcggccagcagcggcaccacggtaatcaaatctttagcaataaaaatcgccaacgagatcatccacggagccgagtctggcgtcgcgttaataagagagaatagagagagattcaaattttccagcataacttcccgacgcaaagtgattaaaagggagccaatacaggcaagtcgttgagaataaagtgcaggttaaactgggtaaagcggcatcgtcttatttccctcaagcggcctgtttacggtgggtgattgtaacgggcataggttaaataaaacttaaagaaagcgtagctatactcgcaataatgtaagaatgtgcttaaccgtggtttcagctacaaaattcgctttctcgttagctgcgcttttattaaactctgcgcgattattattggcgaagaaattgcatgcaaaataaattagcttccggtgccaggcttggacgtcaggcgttacttttccctctctgtctggtgctttacgaattttcaacctatatcggcaacgatatgattcaacccggtatgttggccgtggtggaacaatatcaggcgggcattgattgggttcctacttcgatgaccgcgtatctggcgggcgggatgtttttacaatggctcctggggccgttgtcggatcgtattggtcgccgtccggtgatgctggcgggtgtggtgtggtttattgtcacctgtctggcaatattactggcgcaaaacattgaacaattcaccctgttgcgcttcttgcagggcataagcctctgtttcattggcgctgtgggatacgccgcaattcaggaatccttcgaagaggcggtttgtatcaagatcaccgcgctgatggcgaacgtggcgctgattgctccgctacttggtccactggtgggcgcggcgtggatccatgtgctgccctgggaagggatgtttgtcttgtttgccgcattggcagcgatctcctttttcggtctgcaacgagccatgcctgaaaccgccacgcgtataggcgagaaactgtcgctgaaagaactcggtcgtgactataagctggtgctgaagaacggtcgctttgtggcgggggcgctggcgctgggattcgttagcctgccgttgctggcgtggatcgctcagtcgccgattatcatcattaccggcgagcagttgagcagctatgaatatggtttgctgcaagtgcctattttcggggcgttaattgcgggtaacttgctgttagcgcgtctgacctcgcgccgcaccgtacgttcgctgattattatgggcggctggccgattatgattggtctgttggtcgctgctgcggcaacggttatctcatcgcacgcgtatttatggatgaccgccgggttaagtatttatgctttcggtattggtctggcgaatgcgggactggtgcgattaaccctgtttgccagcgatatgagtaaaggtacggtttctgcggcgatgggaatgctgcaaatgctgatctttaccgtcggtattgaaatcagcaaacatgcctggctgaacgggggcaacggactgtttaatctcttcaaccttgtcaacggaattttgtggctgtcgctgatggttatctttttaaaagataaacagatgggaaattctcacgaagggtaaaaaaatgcctgattgctttgtgcgatcaggcattctcgaattaatggtgatggtcgtcaatctggtgttcgataaccatcccttcacctacgctggcaagatggcgaacataaggatgcgggtggtaagccggagctggcgcaggagccacatagacggtttgcggcacagtcgcgacgctgaccgcttgtggaacgctgactgaatcaggaaccacaaccactttgtatccactcggcacatcgacggtgacactttgcgccatcgccacaccagtaaagcccattaaaagcgcgcccaacagtagacaatttttcataatcatttcgcctgaaataatgcagcgggttaatttcc

SEQ ID NO: 209 - DNA, 1208 bp, Escherichia coli
  Strain O55:H7
atgcagccttcattcaggtattgtgttgccgggcgtgctgccgtttttattggtcaaatggcgcttcgtgtttaagaactttatcgatcacatccagtacgccttcacggttattggagcctgcccggtattttgccgctgcgacgaccgcgttgccggcattttccattgcaaaactaaagcctgcctgacgcagcatctcaatatcgttaccgccatcgccaaagaccaccacttcgctgtcgtctattccccataatttctgcagttggcgaaggccattggctttatgtacgccggggataatcagatcgatgctgccgttgccggtgtggaccggcaccataatatcgccgatggcctcatgtaatgttttttgtacttgtggaatcagttcatcggaaagattcaggccaaacttaaagaagatatcttctaagttgtcaaagttatcgacgtattccagacggtgataatacatttccgccaccattttcatggcatcgtcatattttttgagcgtataggcgctattttttccgcaggcaataatttccacttccgggcgcgtcagcaaatgttccacgacagtagtaaacgcatccttcgacagctcgccattaaaaacatctttgccttcactcactacccagccgccgttttcagccacaaaggcaatttcattagcaatttcagggaagaaagagatcaactgataatattgattcccgctggcgaccacaaagctaatgccttgtgctttcatttgctgatactgagccataaaccgctcacggttataggttttttgatcgcttaagaaagtaccatccatgtctaccgcaattaatttaatgctcatcaactattctccatcgccgtctgcgttttggtatcgggtttggcgacggctttcgcgacaatagccgcgagaataaccagcgccagtacaaccagcattgcactacgtaatccataatgttcgccgagatagcccagcagcggcggcccgacgaggaaagccagataaccggtcgttgctaccacactgacgcgggttggtgcatcggggccggtatcgctggcggcagaaatggtcagcgggaagcccagcgaggcacccagtccccagagtacaacagacaccccagcgacccaggcgctatcgacaaaaataatcagcccaatacccaacgcccccattagcg

SEQ ID NO: 210 - DNA, 15446 bp, Escherichia coli
  Strain O55:H7
  modified_base (267)..(267): a, c, g or t
  modified_base (1461)..(1461): a, c, g or t
  modified_base (5917)..(5917): a, c, g or t
  modified_base (5983)..(5983): a, c, g or t
  modified_base (6181)..(6181): a, c, g or t
  modified_base (6412)..(6412): a, c, g or t
  modified_base (6520)..(6520): a, c, g or t
  modified_base (6566)..(6566): a, c, g or t
  modified_base (6568)..(6568): a, c, g or t
  modified_base (6574)..(6574): a, c, g or t
  modified_base (11588)..(11591): a, c, g or t
  modified_base (14888)..(14888): a, c, g or t
cccgaaccacggcaacgcgactgtaacggtcgatgaaccaaccgccagtgaagcgtccaacggtcatccccagggtaaaaccggcataaatcagcgagccggaagtggggctaaaaccgtgaccgtcaaccattaataagggtaaccagtcgttggcagaaccttcggcaaaggccatcgccagcaccacaacaccaatcagcagcaactggatatcgcgataaaaaggtacgcctttttcgccatgctgggtgccatcggcagcanttttgcccgtaccgtcagggattgcctgaatggcgatatatataggcgcgatgcctaccagcgccgccaataaaatgtgcaccgttgccggaacgccaaaggccgtcagtgccatcccgacaccagcgcctgccagcgtgcccaggctataaaaaccgtgcatcatcggcaaaaccgttttattcatttctcgctcaacggcggcaccttcaacgtttatcgccacttccgcagaaccaaaacttgccccaaagacgccgagaccaacggcaaagagcaggggcgatgtcagccagagtgccagacttaatatcatcatcccgaccaatgcgcaggacatggtgaccaggatgacattacgtgtcccaaagcgtttcactaaccacgccgagcagagaataccgctcatcgaaccgatcgacagaccaaagagaacaccgcccatttcagcgatcgagacagagagaatatcgcggatagcaggcgtacgggttgcccaggacgccattaacaggcccggcaaaaagaagaacataaacagcgcccaggttcggcgtttcaatgcattacgtgaagaatttacggtcatagatcacgtcaaaataagaagagggaagacaacattagcaaggttgtgtacatttgtacacaattgcagacagaggaaatgacatgcgtcgcgctaacgatccgcaacggcgagaaaaaattatccaggccacgctggaggcggtgaaactttacggaatacatgctgttacgcaccgcaaaattgctacccttgccggggtaccgttgggatcgatgacctactatttttcaggaattgatgagttgttgctggaggcgttcagcagttttactgagatcatgtcccggcaatatcaggcattttttagcgatgttagtgatgctcaaggcgcatgccaggctatcaccgatatgatctacagctcacaggttgcaacgccggataacatggagctgatgtaccagctctacgcgctggctagccgaaaaccgctattaaaaacggtaatgcaaaactggatgcagcgcagtcagcaaacgctcgaacaatggtttgaacccggaaccgcccgcgcgcttgatgcgtttattgaggggatgacgctgcattttgtcaccgaccgtaagccgctatcgcgcgaggagattttgaggatggttganagggttgcagggtagtagataaatttcaggcaacaaaaaacccatcaaccttgaaccgaaatggcggggttgatgggctccacaaaatggggacatcaaagaaaagcagtggcactaattaagactgatgccctgcggaaaagttctgcggttgtgcaaaaaaatttcattttcagggcaacttcagttttatcctaatcctggccataccatgacgatgattgtccctgccagcgtcagcaggacgttggcgattgcgtaggtgcccgcatagcccagcgccgggatgttactacgagctgtatcactgatgatctccattgccggcgcgcaggtgcgtgcgcccatcattgcgccgaacaacagtgcgcggttcattcgcaatacataagcaccgaacaagaaacagataaccacgggcacaagactgacaatcaatccggcaatcaacatctgaccgccaatcgcgcccagaccgttattaataccgctaccggcgctcagaccaacgcctgccataaacaccatcaagccgaactctttcaccatgcttaatgccccttgcggaatgtaaccgaaggtcgggtggttagcacgcataaagcccagcataattccggcgaataacaacccggcagcgttccccatgccgaaactgaatgtgctgaactggaaggtgatcatcccgatcatcagcccaataacaaagaaggcgcagaatgccagcaggtcagtgacctggctgtgaatcgagataaagccgatgcgatcggcgatggtttttacgcggcgggcatcgccgctgacttgtaaaacgtcacctttgttaagcacgacgttgtcatcaatcggcatctcaatctggctacgaatgacgcggttaaggaagcaaccgtgatcggtcaacttcagttgtgcgagacgtttacctacagcgttatggtttttaacgaccacttcttcagtgacgatacgcatgtcgagaaggtcacgatcgaaaacttctttaccgttacggaagctgggatcgagtcgggcatgggcgtcgggatagcctaccaacgctatttcatcgcccatttgtagcacggcatcaccgtctggatttgccagaatcccgttacgtcgaatacgttcaatgtagcagccggtttgtcgataaatacccagttcacgcagatttttgccgtcggtccaggccaccagctccgggccgacgcgataggcgcggatcaccggtaaataaaccttacggttggcatcagtgtccaggccacgttcgcgggcgatttgctgggcgctggtctgtaagtcctgatgctgcaatttcggcaagtaacgcgcaccaacaatcaaactcaccagaccgattaaataggttaaggcatacccgaggctcagattatccagtgccagtgagagctgcctgctttccataccggaatgacgcagtgtatcgccagcaccgaccagaaccggtgtcgacgtcatagagcctgctaacataccggccgtcaggccaatatcccagccaaacagcttacctaaccctaaggcgatcaccagcgcactgccaaccatcaccagtgctaacattaggtaatttttcccatcgcgaaaaaaaatggaaaaaaagttcggtccggcttcgaccccgacgcagaaaataaacagcataaagccaagattaagcgcatcggtgttaatgctgaaatgttgttggcctaataacagcgatacgactaaaacgccaatggaattacccagttggatcgaaccaagtcgtaactttccgagacatagcccaagcgcgaggaccacaaataataacagaatgtaattcccatttaacaattcggcgacgtttatattcacggaggctaacttcttgtttactagtaagctgttgaaagaaatggtaatttacgataatgttttttaccagaattcagggcgcagattcattcagcgcacctaaacgatagtaaagtaacaatatattttactagtgtaatcacattaggtatcaacggctatatgaattgcgttggcctatattagcatggaatgcgaagcggctttatcttactgaacgccacactggcgaaaaatgtgttcgatagacgcagtgtcaggaggaaccgagtgaaacataaacaacgttgggcgggggcaatctgctgttttgtcctcttcattgtggtgtgcctttttctggcgacgcacatgaaaggcgcttttcgggctgccgggcatcctgaaatcggcttgctgtttttcattcttcctggagcagttgccagtttcttttcacagcgtagagaagtcctgaaacctctatttggcgcaatgctggcggcaccctgttcaatgcttattatgcggctgtttttttcaccgacccgctcattctggcaagagctggcatggttactaagcgcggtgttctggtgtgcgctgggggcactgtgtttcttatttatcagtagcttgtttaaaccacagcacagaaaaaatcagtaaagccctcaacgcgagggcttgtcagacgatcaggcgtccagattctctttcacccatgcagcaaaatcggtatagccgccgatatgttgctgatcgacaaaaatctgcggcacggtttctacgggtttacctgccttttgttgtagatcttctttagtgatcccttccgcacgaatatctacatactgatactgaaaatcatcgcgttcattgctcaatttctcagccagatcttttgcacgcacacagtaagggcaacccggacgaccaaaaataacggtttgcattatttctctcctcatagatttatgcctgtaatgatcacgctaaaatgtattcgctgaaagtaggtttaacctgttgcattaattgctaaaagctataactgttaaacacaatacagtgaaaagttttagactgaaggttcactttgcagagggaagcgtatgcgcgcgatcggtaaattgcctaaaagcgtgttgatactggaatttatcggaatgatgttgctggcggtggcgctgctgtcggtaagcgactccctgtcgctgcctgagccattttctcggccagaagtgcagattctgatgatttttctcggtgttttgctcatgcttcccgctgcggtggtggttattcttcaggtggcaaaacgtcttgccccacagctgatgaaccgtccaccgcagtattcacgttcagaaagagaaaaagataatgacgccaaccattgaacttacttgtggccatcgctccattcgccatttcactgatgaacccatttccgaggcgcagcgtgaggcgattattaacagcgctcgtgcgacgtccagttccagttttttgcagtgcagtagcattattcgcattaccgacaaagcgttacgtgaagaactggtgacgctgaccggcgggcaaaaacacgtagcgcaagcggcggagttctgggtgttctgtgccgactttaaccgccatttacagatctgtccggatgctcagcttggcctggcggaacaattgctgctcggtgtcgttgatacggcaatgatggcgcagaatgcattaaccgcagcggaatcgctgggattgggcggggtatatatcggcggcctgcgcaataatattgaagcggtgacgaaactgctgaaattaccgcagcatgttctgccgctgtttgggctgtgccttggctggcctgcggataatccggatcttaagccgcgtttaccgtcctccattttggtgcatgaaaacagctatcaaccgctggataaagacgcactggcgcagtatgacgaacaactggctgaatattacctcacccgtggcagcaataatcgccgggatacctggagcgatcatatccgccgaacaatcattaaagaaagccgcccatttattctggattatttgcacaaacagggttgggcgacgcgctaaaaccgccacgccgatgtatgatacgcgggcttttgaccaggtctgacagaaaggtgcagggtgaaaattgccatattgtcccgggatggaacgctctattcgtgtaagcggctgcgtgaagccgctatacagcgcggtcacctggttgaaattcttgatccgctttcttgctacatgaacataaatcctgcggcgtcttctattcactacaaaggccgcaagttaccccattttgacgcagtgatcccgcgtattggcaccgccattaccttttatgggacggcggcactgcgccagttcgagatgctggggagctatccgctcaatgagtcggtcgccattgcccgggcgcgtgacaaattgcgttccatgcaactgctggcgcgtcagggcatcgacctgcctgtcacgggcattgcgcattcgccggatgataccagcgatttaatcgacatggtcggtggtgcgccgctggtggtcaagttggttgaangcacgcagggaattggcgtcgtgctggcggagacgcgtcaggcggcggaaagcgtgattgacgctntccgcggtctgaacgcgcatattctggtgcaggaatatatcaaagaggcgcaagggtgcgatatccgctgtctggttgttggcgatgaagtggtcgctgcgattgaacggcgggcgaaagagggcgattttcgttccaatttgcatcgtggcggcgcggcaagcgtcgccagtatcacaccacaggagcgtgaaatcncgataaaagccgcgcgaacgatggcgctggacgttgctggtgtggatattctgcgtgctaatcgcgggccgttggtgatggaagtgaatgcgtcgccggggctggaaggaatagaaaaaaccaccggtatcgacatcgcgggtaaaatgatccgctggatcgaacgccacgctacgacagaatattgcctgaaaacgggtggttagtcgcaatcacattactgatcatggntttgcctgcgctttttgcgtaagctgtgccggtctttttatcgaaagaggttgtacaaaattatgacatcgctggtcgttcctggtctggatacgctgcgtcaatggntcgatgacctggggatgagtttttttgaatgtgataactgtcaggntntgcatntgccccatatgcagaatttcgacggtgtctttgatgccaaaatcgatctgatcgataacacgatcctgttttctgccatggcggaagtccgaccttcagccgtattgccgctggcggcggatttatctgccatcaatgccagttcgctgaccgtgaaagcatttcttgatatgcaggatgataatctgccaaagctggtggtttgccagtctttatccgttatgcagggcgtaacctatgagcagtttgcatggttcgtgcgtcagagcgaagagcagatttcgatggtcattcttgaagctaatgcccatcaactgctgttaccgactgacgatgaagggcaaaacaacgttaccgaaaactatttcctccactgataactcctttcgagcacgcagtcgctggtgcagtggctgcgcgctgcaaaattatctgctgtttttaaccttttcttaaagattattttacttctcttgtgtcgatttggctttatcacatagagcaaatacgcataaaaatttgttaaataccgttttttaatccgagctatagtctcaaaccctggctaaagttattcttgcgatgcttttatatagcgagcagtgctggccgggagagagttctcttttcttacaccgcgccgataaaaaatatgcacgtttattgcatatctttcagtgtgacaacttttgttcgtttgttaacgaactttcagaaggaaagagatatgaccgccttaaataaaaaatggctttcgggtctggttgcgggtgctctgatggccgtctctgtcggcacgctcgcggctgaacaaaaaacactccacatttataactggtctgattatatcgcccccgacacggtggctaactttgaaaaagaaaccggtattaaagtcgtctacgatgttttcgactctaacgaagtactggaaggcaaattaatggccgggagcaccggctttgacctggtggtgccgtcagcaagctttcttgaacgccagctgacagcgggagttttccagccgctggataaaagcaaattgccggagtggaagaatctcgacccggaactgctgaagttggtcgccaaacacgatcccgacaataaatttgctatgccctatatgtgggcgacgaccgggattggctataacgtcgataaagtcaaagcggtgctgggcgaaaacgcgcccgtcgatagctgggacttgatcctcaagcctgaaaatctggaaaaactgaaaagctgcggtgtatctttcctcgatgcgccagaagaagtttttgctaccgtgctgaattatctcggcaaagatcccaacagcactaaagcggatgattacaccggaccggctaccgatctgctgttaaagctgcgcccgaacattcgttatttccattcatctcaatatattaacgacctggcaaacggcgatatttgcgtcgctatcggctgggcaggtgatgtctggcaggcgtcaaaccgcgcgaaggaagcgaagaatggcgtgaatgtctcgttctcgattccaaaagaaggggcgatggcgttctttgatgtattcgccatgcctgcggatgccaaaaataaagacgaagcctatcagttcctgaattacctgctgcgtcctgatgtggtggcacatatctctgaccatgtgttctatgctaacgccaataaagcagccacgccgctggtgagtgcggaagtccgtgataacccgggtatttatccgcctgcggatgtccgcgcgaagttgttcactctgaaagtacaggctccgaaaatcgaccgtgtgcgcacccgcgcgtggaccaaagtgaagagcggaaaataatccgcagccttagatgccgggcgggagcgccactccctccggcaattcgcaccaacatggtgcgcttgcacacatttaatgccggagagcagccgtgaatgacgctatccctcgcccccaggcgaaaacccgtaaggcgctgaccccgctattagaaatccgcaatctgaccaaatcctacgatggtcagcatgcggttgatgatgtcagcctgaccatctacaaaggtgaaatctttgcgctgctgggcgcatccggctgtggcaagtccacgctgctgcgtatgctggcaggtttcgaacaaccttcagccgggcagattatgcttgatggcgtcgatttgtcacaggtgccgccttacctgcgccccatcaatatgatgtttcagtcttacgcgctgtttccgcatatgaccgtggaacagaacatcgcttttggcctgaaacaggacaaactaccgaaagcggaaattgccagccgggtcaatgagatgctcggccttgtgcatatgcaggagttcgccaaacgcaaaccgcatcagctttccggtggtcagcgacagcgtgtggcactggcccgaagccttgccaagcgcccgaaactattactgctcgacgagccgatgggcgcgctggataaaaagctgcgtgaccggatgcagcttgaagtggtggatattctggagcgcgtcggtgtgacttgtgtgatggtcacccacgatcaggaagaggcgatgaccatggcggggcgtatcgccattatgaatcgtgggaaatttgtccagattggcgaaccggaagagatctacgagcatccgactacccgctatagcgccgaatttattggctcggttaatgtctttgaaggtgtactcaaagagcgtcaggaagatggtctggtgctttattcgccggggctggtgcatccactgaaagtcgatgcggatgcttcagtggtcgataacgtgccggtacacgtagcgctgcgtccggaaaaaatcatgctttgcgaagagccgcccgccaatggttgtaacttcgcggtgggggaggtgatacacattgcctatctcggcgatctttcggtgtatcacgttcgtctgaaaagtgggcagatgattagcgcccagctacaaaacgcccatcgtcatcgtaaagggttaccgacctggggcgacgaagtgcgtttgtgctgggaagtggacagctgtgtggtgctgacggtttaaggagcaaagatgagtacacttgaacctgctgcccagtcgaaaccgccgggcggatttaagctgtggttgtcgcagttgcaaatgaagcatgggcgcaaactggtcattgcgttgccgtatatctggttgatcttgctgtttctgctgccatttctgattgtctttaaaataagcctggcggagatggcgcgcgctattccaccttataccgaactgatggagtgggctgacgggcaactgtccatcacccttaatttcggtaatttcctgcaactgaccgacgatccgctctatttcgatgcttatctccagtcgttacaggtggcggcgatttcgacattttgctgtttactgatcggctatccgctggcgtgggcggtggcgcacagtaagccttcgacccgtaatatcttattactactggtgatcctgccgtcgtggacctcgtttctgattcgtgtctacgcctggatgggaatattaaaaaacaacggtgtgctgaataattttctgctgtggctgggggttatcgatcaaccgctgaccattcttcataccaatctggcagtttatattggcattgtttacgcctacgtgccgtttatggtgctgccgatttataccgcgttgattcgtattgattattcgctggtggaagcagcgctggatctcggtgcacgaccgctgaaaacgttctttactgtgatcgtgccgctgactaaaggtgggattattgccggatcgatgctggtgtttatcccggctgtgggcgagtttgtgatcccggaactgctcggtggcccggacagcatcatgatcgggcgcgtgctatggcaagagtttttcaataaccgcgactggccggtggcctcggcggtagcgatcatcatgttgctgctgctaattgtgccgataatgtggtttcacaaacaccagcaaaaaagcgtgggagaacacggatgaataatttaccggtagttcgttcgccctggcggattgtgattttgctgttgggcttcacctttctctacgcgccaatgctgatgctggttatctattcgtttaacagctcgaagctggtgacggtgtgggccggctggtcaacgcgctggtatggcgaattattgcgcgatgacgcgatgatgagtgcggttggtttaagtctgacaattgcggcctgtgcggcgacggcggcggcgatcctcggaactattgcggcggtggtgctggtgcgctttggcaggtttcgcggatcaaatggctttgcctttatgatcaccgcgccgctggtaatgccagatgtcatcacgggcttgtcgctgttgttattattcgtcgcgcttgctcatgccattggctggcctgcggaccgcggtatgcttaccatctggctggcgcatgtcactttctgtacggcttatgtggcagtcgttatttcgtcgcgtcttcgggaactggatcgctcgatagaagaagcagcgatggatctcggtgcgacgccgctgaaagtgtttttcgtcattacgctaccgatgatcatgcccgcgatcatttctggctggttactggcttttactttgtcgcttgatgatctggtgatcgccagctttgtatccgggccgggagccaccacgttaccgatgctggtcttttccagcgtgcggatgggggtgaatccggaaatcaacgccctggcaacattgatcctcggcgcggtcggaattgtcggatttatcgcctggtatctgatggctcgcgcagaaaaacagcggatacgcgacatccagtgtgcaagacgtggctgaagacactaaaatttgccaacctggctacataatgccgcgtatgtcgcggcattgttttcatggaagacgaaacgttgggattttttaagaaaacatcttcatctcatgctcgcctgaatgtgcctgcgcttgtgcaggtgnnnncgctcgccattattatgatccgtggcctcgacgtgctgatgattttcaatacgctgggcgtgcgcggtattggcgagttcattcatcgcagcgtacaaacctggagtttaacgctggtctttttaagcagtctggtgctggttttcattgagatctggtgtgcgttttcactggtgaaagggcgtcgctgggcgcgctggctgtatctgctgacacaaatcactgccgcaagttacttgtgggcggcttcgctggggtacggttatccggagctgttcagcattcccggtgaatcaaaacgtgaaatcttccatagcctgatgctgcagaagctgccggatatgctcatcctgatgctgctgttcgttccctcgaccagtcggcggttcttccagttgcaataatgtgtataatcgtcgcccctgatgatgtgaaggtcaatgtatgcagtgcgcactttacgacgcgggtcgctgtcgttcctgtcagtggataacgcagccgattccagagcaactctccgctaaaaccgccgatcttaaaaatctgctcgccgactttccggttgaggaatggtgcgcgccggtgtcaggcccggaacaagggtttcgtaataaagccaaaatggtggtgagtggtagcgttgaaaaaccactgctcggtatgctgcatcgcgacggcacaccggaagacctttgtgactgcccgctttatcctgcctcatttgcgcccgtttttgcggcgctaaaaccgtttatcgcccgagcggggttaacgccctacaacgtggcgcgtaagcgtggcgaactgaaatacattctgctgactgaaagccagagcgatggcggcatgatgctgcgctttgtactgcgttctgaaaccaaactagcacaactgcgtaaggcattgccgtggttacaggcacaattgccgcagctaaaagttatcaccgtcaatattcagccggtacatatggcgattatggaaggggagacggagatctacctgaccgaacaacaggcgctggtagagcgttttaacgatgtgccgctgtggatccgtccgcaaagtttcttccagactaatccggcggtcgccagccagctgtacgctaccgcgcgcgactgggtacgacagctgccggttaaacatatgtgggatctgttctgcggtgtggggggctttggtttacactgcgcgacgcctgacatgcagttaaccgggatcgaaattgcgctagaggccattgcctgtgcaaagcagtcagccgctgaactgggcttaacgcgtctgcaatttcaggcgctggactccactcagtttgccaccgctcagggggaggtgccggagctggtgctggttaacccgccgcgccgcggcattggtaaaccgctgtgtgattatctctcaacgatggcaccgcgttttattatctactccagctgtaacgcccaaaccatggcgaaagatatccgcgaactgccaggttaccgcatcgaacgggtacagctttttgatatgttcccgcacaccgcgcactatgaagtgctgacgctgctggtaaaaatgtaaatacatcattcaaatcaatatcacctcggcatacatccatccaaaataataatcgtgatcgatcgattaataataaccgatcgatcacggttatatattgctctatttttgcaaatcaaatcacaaataatcaaataagatctttaattgaactgttttgattactacagtgcacttaccgaatacatacagaggcattgcttagcgaaacacaaaatttcctgagacattattaacgtcagcagaaggttcatgcattgacaacggaaatgtacgcttatggagggcgttccgacgatgtttgccaaattcatagatgttattcaaacgtttttaactgaaccggcaattttaattggtttgctggtgggtattggttatgcccttgataagaaatcgccaataaaaattattaccggcatggtcagcgccatggtgggattaatgatggtgttatttggtggtttccagttttccgcaacatttaaaccggtagcagaagccgtaagtaaagcctatggtgttcacggatatttaatggattcctacgcaatgaaagcggcaacgcaaattgcattgggggataattttggttatgtcgggtatgtatttgtactggcgttttttaccaacctgctgctggtattatttggtcggtatactggtgccaaagggatatttttgacagggaataccggtgtttcacattctcaggcggtattatggttgattgtcttttggctgggttttagctggactacatccattattattgccggaatattaacgggtgtattctgggcgttctccaccacgctcattgttaagcccattgccaaagttaccaaagatgccggttttaccattgctcataaccagatgttgggattgtggtttttctccaaattcgcccataaatttggtgaccctgaaaagcacgatgctgaaaacctgaaacttcccgggtggctggcgatttttaaccataacgtaacggctatcgccattgtgatgacgctgtttgtcggtggtttcttgctatcaacgggtatcgataatgtccagttaatggcgaaaggcaagccctggtacatctatatcatcaaccttggcttacagttctccatgtatatggtcattctgctgcagggtgtgcgcatgatggtgggcgaaattaacggttcgtttaaaggctggcaagatcgctttattcctaacgctattcctgctgtcgatgttgcagcgctgttacctttttcacccaatgccgcaacgttaggcttcgtcttctgtacttttggcaccattttttcgatggggatcttattactggttcacagcccaattatggtattgcctggctttgtacctctgtttttctctggcggtccaattggcgtattagcaaaccgcatgggcggataccgttccgtaattatctgtacgttcttgctgggtattattcagaccttcggtacggtgtgggctattccgttaaccgggcttgctgaaaatggcgtcggctggacaggaatatttgactgggcaaccgtatggcctgctatttgtgaagttctgaaatttatcgctgcaacattccatcttggtccttacgcgggttaattaaatattaagggtttaaaaatgaaagatacaattaatattctgtttgtctgtggttacggtgtaggcagtagcgttatgttacaaacggtcgttaaaaangcgctgaccaaatatgatttcaaagttgaaatggaacataccgccgcaggtgaagtcggcggatttaccgactgggcggagatttttgctatttccaaaaaattactcgatgtggttagtcttgacccgaaacaagggcaatatttgattccgatagagaatattatggacggtgaaactattggtcagcaaatttatgaagtggttcagcaacattttccgcatttaattaatcaataaggtagggcgtaatgagagcgattattctgctgttcgatagtctgaataaacgttatctgccaccttatggcgatgcgttaaccaaagcgcctaatttccaacgtctggcggctcatgccgccacctttgaaaacagttacgtcggcagtatgccgtgtatgcctgcccggcgggagttgcataccgggcgatgtaacttcctgcatcgggagtgggggccgttagaaccgtttgacgattccatgccggagctgcttaaaaaggcggggatctatacccacctgataagcgatcatttgcattactgggaagatggcg

SEQ ID NO: 211 - DNA, 6442 bp, Escherichia coli
  Strain O55:H7
  modified_base (5201)..(5201): a, c, g or t
  modified_base (5337)..(5337): a, c, g or t
  modified_base (5438)..(5438): a, c, g or t
  modified_base (6169)..(6170): a, c, g or t
attatcataatcgctacagttcgtgggagattgtgcgcggacaggaaggcgatcactggcatgcaagcgttgcgcaaccgcctattcccgaggtgctacgggtgccgcaaaagcagaccggtggcggtgtttctggtctgtggcgccatgactgggcaaaccgggaatatattcagcaggaagcggattttccacaaactaaagtgtttgatgcaggctgtgcctttatccacaaaaatcacgcggaagataactggttattgcagatcgaaacgtttgatccgcacgagccgtttcacacaacggaagagtatctttccttgtatgaagataactgggatggaccgcattatgactggccgcgtggccgggtgcaggaaagcgacgaggccgtggagcacatccgttgccggtatcgttcgctggtgtcgatgtgcgatcgcaacctggggcgcattctcgacctgatggatgagcacgatctgtggcgagataccatgctgattgtcggcactgaccacggctttttactcggtgagcatggctggtgggcgaaaaaccagatgccttattacaacgaagttgccaataatccgttgtttatctgggacccgcgcagtggtgtaaaaggagagcggcgacaggcactggtacaaatgatcgactgggcgccaacgttgtatgacttttttcaacagccagtgccgcccgatgtgcaggggcaaccgctggcgaaaacggtcagtcacgatgaaccagtacgcagctcggcgatgtttggtgttttcagtggtcatgctaacgtaactgatgggcgttatgtgtatatgcgtgcagcgctgccggggcgtgaggatgatattgccaactacacgttgatgtcctgcaaaatgaacagccgctatccggtggatgagatgcgggctttatcgctggccccaccgtttcgttttaccaaagggttacaggtattacgcatcccggcacaggaaaaatataaggggttgaatcagtttggtcatttgctgtttgatctgcaaaacgatccgcagcagctacatccgattcatgatgatgtgatcgagtcccggatgatcgcgttgctgattcagttgatgaaagataatgatgcgccgccagagcagtttcagcgcctgggattagcgtagagaagtgattttgccggagtgggtgttcgcccactccggcaaatgaataattattgcgggaaccactgatcgctgatttgttgatatgtaccgtcagctttaattgctgccagcgcgttattcagtttttccagcagagctttgttatccggacgtacagcgatacccagaccggtgccaaagtattgcggatcggtcactttttcagtagcaacgcccagttgcggattggttttcagccattcattaaccaccgcagtgtcaccaaatacgccatcaatacggctatttttcagatcgataaaggcattttgataactgtcataggagaccgttttcacttccgggtgctgatcctgaatatatttctggtgcgtagtaccgttttccatcccaatgcgtttgcctttcaggtcggcaaacgttttgtaggtatcttttttggcaatcacgacggctgagttttcgtaatagggcgtggtgaacgatacctgcttgctacgatctggtgtgatatccataccggagattacggcgtcatatttcctgaatttcagtgacgggatcaggctgtcgaacgcgtgattggtaaaagtacattctgcctgcatctgtttgcataacgcttttgccaggtcgatatcaaagccgacgatctggttattggcatccatcgactcgaacggcggataggtcgctgatacgccaaaattgattttctctgcggcagaagcgccgaacgcacaggatgccagtaatgcggcaagaactaactttttcatgatggaactcccgtctgtcaatcttatgattattggccgtgtctgcggcatgggataacaatgccatcaagtgaatttatatgcaataaatatgattaaataatttgcatgaaataaaaaaagacggacaacttagtgagttgtccgtctttattataagaatttatgcactatgtaggccggataaggcgtccacgccgcatccggcacaggcaccgtgctgatgtctgatgcgacgctggcgcgtcttatcagacctacaaaacccccggcgaatgtacgcagccacattaattccttcgctcaaacgccagcgctttgcgctcgatcagacgcatcatcagcgtcagcaggccgttaacgaccagataaataatccctgccgcgccgaacaccatgacatcgtaggtgcgtccgtacaacaactggctgtatcccatcacttccatcagcgtaatggtgtaagccagagaggtacttttgaacaccagcaccacttcgttggaataagaagagagcgagcgtttaaaggcatacggcagcaggatcgccagcgtatcttttttgctcattcccagggcgctacaggactgccactgaccttccgggatcgcacgaattgcaccgtaaaacagctgcgtggtatacgccgcactgttcagcgacaacgcaatcagcgcacataaccacggttctgacaacaaatgccacagtgccggatactcctgcaacgtcgggaactgacccggcccgtaataaatcaggaagatctgcaccagcagcggtgtaccggtaaacagcgtgatataaccccgcaccagccacaccagcaccggcgttttcagcgtcaggatgatggtaaaaatcaacgccagaatcagtgccacaatcagcgaggcaacggttagcgtcaggctggtgtgcagccctttcatcagttcgggtaaatactcaaacattagctgggcctccgctcaaaacgtgtcgcgcgcaggtcaatgcgtttgagaatgtactgactgagcagggtgatcaccaggtaaatcgccgccgccacaatgtaccaggtaaatggttcctgggtacgagtagcgatgcttttggtttgcagcattaaatcattcacactaatcaaactgaccagcgcggtatctttcagcagcaccagccactggttaccgaggccaggcagcgcatgacgccacatctgcggcatcaccagacggaaaaagatagccgatttcgacagccccagcgcctggccggattcccactgacccatcggcaccgctttcaacgcgccgcgcagcgtttgcgaggcataggcggcatacagcagtgacagagcgatgacaccacaaaggaacgggctaacgtcgaagttttcaatctgcatctgcaccgggatctctacaatcccaagattgatagtgaagccatccgaaagtgtcagcagcagctgcgaggagccaaaatagataaacagcaccaccagaatttctggcaggccacgcagaatggttaccagcgctgaacctgcccacgcgacaggacgccatttcgcagactcccataccgcaaagaacatcgccagcgccagcccgacaatcaatgcacaaacggcaaggccgacggtcatcccggcggcgcttgctaaaggaaaaaattcattcatcaggaattacttctggaaccatttgttgtagatggtttcgtaagtgccatctttcttcactttttccagcgcagtgttgagtttctgctgcagctcagtgttgccctgacgtaccgcgatgccgaggccagtaccgaagtaatctttatcggtcactttatcgcccactgccgccagtttcgggttatctttcagccattcagttaccactgcggtgtcaccaaatacgctgtcgatacgaccgttttgcagatccagttttgcgttctggtagctgtcatacggcacggtggtgatttccgggtgcttatccataatgaatttctggtgagtcgtaccattctgtacgccgacttttttgcctttcagctgatcaacgctggtgtatttaccctgctgacccacaaacagggcagagttgtcatagtacggcgtggtaaacagtacctgcttttcacgttccgcggtgatatccatcccggccatcaccgcttccacgcgacggaatttcaggcttgggatcaggctgtcaaatgcctggttagagaaagtacaggtcgcatcaatctctttacacagcgcctgtgccaggtcgacgtcaaaaccaacgatctggttgtttgcatcaatcgattcaaacggaggataggaggcttcggtagcaaaacgaatggtttcggcagctgtggcggaaagactaaaacctgcaattaacgcggcaatcagaacttttttcattgttgttatcccgaatcttagtgagagagatagtttttaaatgcttcggtttgcggctcggtaaagcagctcgcgtcgccttgttctacgatatgaccgttttccatatacaccactcggctggcggttttacgcgccacttcaacttcgtgggtgacgatcacctgggtaatattcgtttctgccagctcacgaatgatgctgacgatttgtgccgtaatttccgggtccagtgcggcggtcggttcatcaaacagcagtacctgcggttccatcattaacgcacgggcaatagcaacacgctgctgctgaccaccagaaagatgcagcgggtaacgatcgctataaggtttgagacgcagacgttccagcagtttttctgcacgggccagcgcctgatctttactcaaccccagtacacggcagggcgcttcaatcaggttttgctgcacggtcagatgcggccacaggttgtattgctgaaacaccatgccaacgttacgacgcaaatcgcgaatcgctttgtctgagggtgttttggtgaaatcgaaatggttgcctgcaatgttgagcgtaccggagcgcggcatctcaagcagattgagtacacgcagcagcgagcttttacccgcgccgctggggccaagtaacaccagcgtttcgccctgtgggcaatccagcgtgatatcgaacagcgcctgatgcgcgccgtagaagcaattaatgccgtttaattgaatactcattgacactcgtatactggcagtctgatagctattgaggtcgaagatagtacctttgacagaataattatgcaatatttctgctttaaaagtnaaaagcaaagcgcattattcaataaacatagcacaaaataacgggggcggtggtcggcgagcataaatgtcggcattcctcacgaaatgccggacaatttacggggtttattggttgatcaaggcgttagcgattntcgatggactgacggagcgtacccgccgtggcatgaacgctaccgcctaagtagcgcacatcgtcgatcacccaacactggccttcctgaatcattaacanttcatcctgccagccctggtcaccctgcttgagatccacgcgcaatggaatgttacgggcatcacgattagggatagtcgatgcactggcaacgtgggcgctgtctggcaaggtggttcgactggagaacggatcactgcttaacaattcacgatgactattatcgcggctggcatcgctaagtagggttgccagtttgtcactcaaataggggcgcagggcggtaatgtcattgctgcgatgttgaatgcggtagtcatagaattgttgggccacgctgtcaggccccccctggacacaggaaccggtgcggggaccattatctttataagctggcgtgacggtggtacaggcactcagcagcagtgcacatggaataagtagagatagtgaacggtagcgcataatcatttccttattagcttgctgtctgcgtcacactacgaccaaacgctatcagattatttaatacattgtttttaatacaattctgaaacaatctgaacacctgattgggtttgagtccattgctggcgacccactcaaggttgctcgtagctgacttacttaaattacccaaacaatagacagtgtaaaccatttgtgaggttgagcgtgttatatggctgaaatgatcatttaaggtaaatatgatagttctgaaatggtggtataaatcctcctgtagaggttaagagcatctgcaagaagccagtttcacatttataacnncgtgataaatgaacgcggttattgtctaatcattacaaatttttcacatgcgataagagatcctgctattaagatgattgccaaaattacgttgtatttttgaaaatgagcgaaatttgatagtcccagctttgacttttgataatattatttatgctacagttgtgggtataaaatataatctttttgaacaagtgaatttgagctaagaataaatcaagttgtttcagtgtttcgttaattaatatgagtataaaaggtgttgtgctttt

SEQ ID NO: 212 - DNA, 610 bp, Escherichia coli
  Strain O55:H7
  modified_base (561)..(562): a, c, g or t
aagcgcgaggagttcggtggattatcgtttttcttgggtgatttttaatatgataaacaatatatctgatcaagcgtcatcatttccatgcacacaattgaatcaaagtgataatttcctcgattcactgagggaatttttcgcgatattaaattccagtcgtaagggtgagttgtctacatgggataccatctacttgcatctgatattagtaataaatgctgacagtgatctcataaaaaatgatgtgttgctcgcggaaaatattccaacagcggattatcaatttaatacattttttagtaatgctttcgagactgatgttaaaaaatatctgggtaaatcagaagataacgaagttgaaataaaaacgggtaatgaaagaatctctattggaatacgtaacagatcgaatggaaaacttgaaagacaaaagtttcttttcccattggactatgagaataaattacaacatcaattagacaagcattttacgattgaatcgcacccattattatacaggcatactatgggtagtaagattgcgaatgtgatttttgnnaaattatacagtcgtattgactttaacaaagaacaatatatatccttt

SEQ ID NO: 213 - DNA, 506 bp, Escherichia coli
  Strain O55:H7
ggacgcgtttcttcatttttatgattatagcaggcgatatgcaattaatgaaaatattgcaaaagacgctgtaacaaacaatatcgcattgatgagcactttttatgacagtgataatacgtcaggtgaggttttaaataatgattttacagaagagtcatttgaaactgcgttagatgtagagcatacaatagtgcttggatttgctgatgataattttgaaacaaaacctgttcattatcaggatttattaacacgatttagtgcctttcaagataccgtgtttaatctgtttcctgaaatgcactcttcgcattacaacgatatttgtagcgtaagtgtggatatgacaaagggaacgcaatgcatgattcacttgatggtgaatgaagaagttttcatgtctctgcctgttccagttgccacgatggtacgtgaagatgcaagtaattgaatcaatcttaaaacactactcaatgatggttgctttattaaatatagtcatt

SEQ ID NO: 214 - DNA, 20317 bp, Escherichia coli
  Strain O55:H7: Synthetic polynucleotide
  modified_base (1105)..(1105): a, c, g or t
  modified_base (1979)..(1979): a, c, g or t
  modified_base (2680)..(2680): a, c, g or t
  modified_base (2991)..(2991): a, c, g or t
  modified_base (4217)..(4220): a, c, g or t
  modified_base (5406)..(5406): a, c, g or t
  modified_base (6714)..(6714): a, c, g or t
  modified_base (7228)..(7228): a, c, g or t
  modified_base (11366)..(11367): a, c, g or t
  modified_base (11374)..(11375): a, c, g or t
  modified_base (14243)..(14243): a, c, g or t
  modified_base (16866)..(16869): a, c, g or t
acgtggcattaataaagcaaaacataagtaatctctatttatcacacactgttgtgaatgaaagcatattgaaaaaatgttgttttgaaaacggcagtttaggtgatgttaaaataacaaatagcaatatagtaaataatgtattcaaaaatatttcgtttagatctgttaaaattaacaacgtaaatactcattctttaaaatttattaactgtcatttttttaatgttgatatgataagagttaatttcagcaaatgtctttttcatgactgtagcatgcatggtgtcaagataaaaccatggttgccagtaaaatggacaaaagagttaataaatgattatttgtatggctgtttactctctctgtactctatctgtgcaagagatatatataatatgaacgccgggaataacgtgaaggttgctgcggatgcttttcttgaaatactttattctcttaaaaataaatattgtattaaactattaagcgctcaggatcgggcgtttatatacgaatttgcaagaatgatcttcgcttatattaatgacaaaagcattgagatcttattactttcttgttttgcggcggcggaccaaaaagcaatccagcggtatatacctcaggcgcaagatggggaagactttaggaatcatttacaatataagttgactcttcccactcattaatgttgccggcacaacataatagggcaggtaagcggtgctccataatgaaaccaatatccggttacgaaacagataattgtacaggcttatgtagctgtttttgacacaatgagatgatttcctaaactgatcaaaaccttcttcccaacatggcatatcagtccgataatgctttagagatcgaaggcttaacaaacaaggagatcgatcatgcaattttccacaactccaactctggaaggccagaccatcgttgaatattgcggtgtggtgactggcgaagcgattttaggcgcgaatattttccgtgatttctttgctggtattcgcgatatcgttggcggacgctccggtgcctacgaaaaagagctacgtaaagcgcgggagatcgcctttgaggagcttggctcccaggngcgggcgctgggggccgatgccgtagtcggtattgatatcgactacgaaacggtcgggcaaaacggcagtatgctgatggttagcgtcagcggtacggcggtgaaaacgcgtcgatgagaagagtcttctggctgatcgctgtcgctctgttactggcagggtgcgcaggcgaaaaaggcattgtcgagaaagagggatatcagcttgatacccgacgccaggcgcaggcggcgtatccgcgcattaaagtgctggtgatccactacaccgcagatgattttgatagctcgctggcgacactgaccgataagcaggtcagctcgcattatctggtccctgcggtaccaccgcgatacaacggtaaaccgcgcatctggcaattggtgccggaacaagaactggcctggcatgcggggattagcgcctggcgcggggcaacgcgccttaacgacacctctattggcattgagctggaaaaccgtggctggcaaaaatcggcgggggtgaaatattttgccccgtttgaaccggcacagattcaggcgcttattccgctggcgaaagatattattgcccgttatcacatcaagccggaaaacgtagtggcacatgcggatatcgccccgcagcgcaaagacgatccggggccattatttccctggcagcaactggcgcagcaggggattggtgcctggccggatgcgcagcgggtgaacttttaccttgccgggcgcgcgccgcacacaccggtagataccgcgtcattgctggagcttttggcgcgctacggttatgacgttaaacctgatatgacaccgcgcgagcagcggcgcgtgattatggcgttccagatgcatttccgcccgacgttanataacggcgaagcggatgcagaaactcaggcgattgccgaagcgttgctggagaaatacgggcaggattagcgcggcagttttccgtggtcgcgcagccaggcggcagttttctcgataccttcatccagggtgatgaccggctgataacctaactcttcctgtgcccgcgtaatatccagcgtaaagtcaaaattaagcttcgagacgccgtagtgggtcagcggcggctcttttgctgacttgcggcctaaacgctccatgctgcgggcgatcatatccagcatcgggtaagggacggaacgaatacgacagtcaatattcaactcgtcgatcagcttctgcacgatgctgcgcagtgtgcgatgctcgccgttggtgatgttgtacacacgcccggaaggtagcttatcgcaggcttcctggcttgccagccacatggcgtgcacggcattttcatagtaggtcatatccaccagcgcactgccgccatgcggtaacagaatgctgccgtagtggtgcatcatatgcgcaagacgggggataaagactttatcgtgcggtccgaacagactttgtgggcgcagaatagtaaagcgcgtttgtggattcgcctgcgaaagcatattgatcacttcttcgctggccgctttgctgcgggcaaactcgttggcgaagcggtgagggcgaaaatcttctttnatatcgcgatggtggtgataatcgaagtacagggagggagaagagatatgaataaagttacgtacaccccaggcgacagcccattcacccaggcggcgagtggcgcgaacgttagccagatcgaaagcctgttgtgtcccccagggagaggtaaagctggagcagtgccacagcgtatcaatgcccgcgagcatcactttagcttgtgatgagaccagctcggtcagatccgccggaacaaactctgcgcccattttttccagcaatttacccattgcctcgttgcgaccggtcgctcgcacgctgatgcntttctggcataaaaactctaccgcgtttcgacctaagccgctggtggcgccggtaaccagtaccttcatatcaatccactgttgttgagaaaatgacgtgcgcattcttccgtgatttcccccttgatgcaatgggaaacatgaaagaataacgcaggttttgtcgattaatctgtgctttgttctgccagtctggcgattcgttttgccattccgcgaaaaataaacagatgcgcggggatcatcaataaccagtaaaacagccccggcataccgtgcggatgccagaaagcgcggacatcgatagtacgatagtcgcctttatcttccagggtaaaacacagtcgtcccagccccggtgctttcatgccaaataacaacgtaagttgtttttccggttcaacgacaatcactttccagctatccaccgcatcgccagtttgcaaatattcgcgctccggacggcctttcgctaatttatgaccgatcgcacggtccatcaacgcccgtgtctgccacaaaatattgccaaagaaataacgctctttaccgccgatttggttcaccacctgccataaagccgcaaggctggcggacgttttaacggtaaatcccgcctgtttggcaaaataaccatactctggtcgccagcgggcaaaggcctgagtgtcgtatccccagtcgctggagttgaccagcttttcttcttctttcagggtgcgacgtaccgcgtcatcgaaagcgatcagccgttgtgggatgagcgcacgtagcgcggtgtcatccgccagcagatcgtgtttcagcccctgaatcaacgccctggcggtggtgggcggtacggaagtaatcacattgagaaaccacaccgaaatccagtgggtggggagggggatggggatcaaccagcggcgcttaccgctcaccgccataaaatgttcaaactgttgctgataactgagcacctctggtccggcggcttcgaagatgcggtgttcgttggctggatggtctaacagcgccaccagatagtgcagcaagttttccagcgcgatgggcgtggtgcgtgaacgtacccagcgtggcggcgttaacactggcaggttgtagaccatatcgcgcatgacttcgaacgctgctgaacctgcaccaacgattattccggcacgcaattcggtcactggtacattcgcttcacgaagaatgtccgccgtagcctgacgcgnnnncagatggtccgactgctcatgtggcggggcctgcaacgaactgagaaagattaattgcttaactggtacttcacgtagcgcatcgcggaagttgagagccacctggcgctcctgagcgataaaatcgccgccttcgcccatgctatgcaccagaaaatagaccgtatcgatatcctgtaacagggccggaaggttatccggccagctgagatcgactttatggcaactgacgtttgccagttgcagctttgcaagcctgtcgacatgacgtgccgccgccaggatctgatgcccttgctggctgagtgtgcgcaccagatgctgaccaatgtagccactggcaccaagaactaaaatgcgttgcggcacgtctccctccttaacgcgccaggaatgcgcgccagtgggcggcgacttctgccagttgttcgcgcgagacgtcaagatgggtcaccaggcggacaatcggcgaggcgttaatcagtacgtttctcgctttcatgtattcgcctaacgcggcagcattttcttcgccgacgcgaacaaacagcatattagtgtcctgacgcatcacatccgcgcctgcttcacgcagttgctccgccatccaggcggcgttgtcgtgatcttcctgcaaccgtgcgacgttatttttcagcgcatacatcccggcggcagccagaatgccggactggcgcatcccgccacctgtcattttccgccagcgaatggcacgtttaatgtaatcacgattaccgacgagtaatgaaccgactggcgtcccaagacctttcgacaggcaaatggtgaacgaatcacaatattgcgtgatctctttcagttcgctgccgtaagccaccacggcattaaagatgcgcgcaccgtcaacatgcagcgccagattgcgctcgcgggtaaattcccatgcatctttaaggtattcacgcggcaacactttgccgttgtgggtgttttccagactgagtaatttggtgcgggcgaaatggatatcgtcgggtttgattttcatcgccactttatccagcggtagcgtgccgtcggcagccgcgtcgatgggttgcggttgaatactgcccagcaccgccgcgccaccggcttcaaacagatagttatgcgcggcctgaccgacaatatactcttcgccgcgttcgcagtgactgagcanagcgaccaggttggcctgagtgccggtaggcagaaaaatggcggcttctttaccggaaagctctgctgcatagtcctgcagagcattaacggtagggtcgtctccgtaaacgtcgtccccaaccggggcggccatcatcgcttcgagcatggcgcggctcggtcgggttacggtatcactgcgtaaatcaatcatggcatgtccttattatgacgggaaatgccaccctttttaccttagccagttcgttttcgccagttcgatcacttcatcaccgcgtccgctgatgattgcgcgcagcatatacaggctgaaacctttggcctgttcgagtttgatctgcggtggaatggctaactcttctttggcgaccaccacatccaccaataccggaccgtcgatggagaaggcgcgttgcagggcttcatcgatttcagaggctttttctacacgaatacccgtaattccgcacgcttcggcaatgcgggcaaagttggtgtcgtgcagctcagtaccgtctgtcaggtagcctccggctttcatctccatcgccacaaagcccagcacgctgttattaaagacgataattttcaccggcagtttcatctgcactaccgagaggaaatcgcccatcaacatgctaaaaccgccatcgccgcacatggcgaccacctgacgttccggctcggttgcctgcgcgcccagcgcctgcggcatggcgttagccatcgaaccgtggttaaacgaacctaacaggcgacgcttgccgttcattttcagataacgcgccgcccacaccgttggcgtgccgacgtcacaggtaaagatggcgtcatcggcggcaaaatgactaatttgctgcgccagatattgcgggtgaatggctttctcgctcggtttagctaaatcgtccagccctttgcgggcatcgcggtaatcttccagcgctttatccagaaacttgcgatcggctttttcttccaccaatggcagcaatgcacgcagggtcgacttgatatcgccgaccagcgccatatccaccttgctgtgtgcgccgatgctggctgggttgatatcaatctgaataattttggcatcggtcgggtagaacgcacggtaggggaactgagtaccgagtagcactaacgtgtcggcgttcatcatggtatggaaacctgacgagaatccgattaacccggtcattccaacatcatacggattatcgtattcgacatgctctttaccgcgtagggcatgaacaataggtgctttaattttcccggcaaactcaactaactctttatgcgnccccgcgcagccgctgccacacatcagagcgatattgctggaataacgcagcagttgcgccagtttgcgtaactcttcttcttccggcgtcacgactggctgtggcgcatgataccagtgggtagttgccccttctggcgcaggttttaacgccacgtcgcccggtaacacgacaacggaaacgccacggttaagcaccgctttgcgcatggcaatcgccagcacttgtgggatctgctccgggctggaaaccagctcgcaatagtgactacattcgcggaatagctcttgtgggtgggtttcctggaaatagccgctgccaatttcgctggaaggaatatgagcggcaatcgccagtaccggaacgtgattgcggtggcaatcgaacaggccgttgattaagtgcaggttgccggggccgcacgatccagcacagaccgccagttctcctgaaagttgtgcttcagcgccagcggcaaacgccgccacttcttcatggcgggtggacatccantcgatggtgcccatgcgattaagactgtcgctaagaccgttcagagagtcgcccgtgactccccagatgcgtttcacgcctgccgattcgagtgttttggcgatataagctgcaaccgtttgtttcatggttctccatctcctgaatgtgataacggtaacaagtttagttcatctgacggagggggaagggatgggagagaaaggaggcactaacggttaaatagcccgatgaaaggaatatcatcgggcataaggcgattatgcgagaaccaaatccccctgcggatggcaggagcaggccagtacgtaaccttcagcgatttcggcgtcggtcagtgtcattgtactgctcaccgtatattcaccggaaaccactttcgtcttacagcagccgcaaacacccgcgcggcaggcggcgacaaccggaacgttattgctttccagcgcctccagcagcgtggtgccaacaggagcgtaaaattcttgcgccggttgcagtttggtgaatttcagaccgctggtcgccgcttccgctactggggtgaagaatttctctttaaagaaacgcgtcacgccgagtgctttcacttcctgctctacccaatccatatacggagccgggccgcaggtcatcacggtacgtgaagctaagtcaggaacgcgagtcaggagttcgcgagtgagacgaccagcgataaagccttcggtaacgttattttccgccaccagcgttaccggatagttacgccactcatcggcgaaaataacatcctgcggcgtacgcacgttgtagatcacccgcacattggcctgtggacggttcttcgccagccagcgacgcatcgacataatcggcgtgacgccgcagcctgcagccagcaacaggaatttatcttctgctttatcgtcgcaggtaaattcccccatcgcgtctgaaagccagagataatcaccgcgttttacatcgcgggtcagccactgggagccgacaccgtcatcaatccgccgcacggtcagggtgatatattcactcacgcctagcgtggaggaaatggtgtaagcacgcagcgtttccgctgagttacgcacgctgaccagtgcatattgcccggcgcggtatgggtagtaatcgtggcaaatcagggaaatcgtccacacatccggcgtttcttgcttaatgtgatgaacctgcatccgccacgggcattgattcgttggcatcgtcatcgacaaactccttacgcgctcaacagttgcttcatgtcttcttcaacagtggtgatagaacgcaggccgaatttctcgttcagcaccgccagcagatctggtgtcaggaaaccaggtgcattcgggccggtgacgatatttttcacgcccagagaaagcagcgtcagcagaatgacaatcgctttctgttcaaaccaggagagcaccagcgacagcggcagatcgttgacaccgcagcccagtttttctgccagcgtaaccgccagaataattgctgagtaagcatcgttacactgaccggcatccaccagacgaggcagaccttcgatatcgccaaactcaagtttgttaaagcgatatttaccacaggcgagagtcaggatcaggcagtcatccggcacgctggtggcgaaatcggtgaagtagtgacgttcgccgcgtgcgccgtcacagccaccaagcaggaagatatgacgcagtttttcacggctcaccagatcaattagcgtatccgctgcgccaagcagcgtctggcggccaaagcccacggtgatcaggtgcggaatttcgctgtatgggaagcctgccatttgttgcgcctgggcaatgaccgcagagaaatcttcgccatccagatgacgcacgccaggccagccaacgatgctgcgggtccagatacgatcgtcataagcgcctacggttgggtcgatgatgcagttcgaggtcatcacgatggggccagggaaacgagcgaactccacttgctgattctgccagccgctgccgtagttaccgaccagatgcttgaatttacgcagctccgggtagccatgcgcaggcagcatttcgccgtgggtgtagacattaacgcccgtgccttcggtctgttccagcaggttgtagagatctttgagatcgtgaccggaaatcaggatgcatttacccgccgtcgctttgacgttgacctgggttggcgtcgggtgaccgtatttaccggtttcgcctgcatccagaatgctcatcactttgaagttcatctggccgatttccattgaacactcaagaagcgcgttcatatcggcaggccaggtccccagccacgccatgattttatgatactgggcataaatatcgttgtcgtattgaccgagaacgtgtgcgtgttccatataggccgccgcacctttcaggccatacaggcacagcagacgcaggccgagaatgttttcgccaatcgccgctttatctttgttaggggtaaattctgctgcctgacgttgcagttcgccgagatcgtcgctcaccagttgcaggtcagccatcgggttatcgacgcgggcgttggcatctacagccaggcattgtgctttcagcgcctcgcgcaaggcaatcgcttcacgagcgtagccgacaatacgcggagaatcgaagttaacgttggtcagggttgagaaaaaggcacgtggcgcgaagctgtcgacatcgtggttgatgatgccgtattcacgcgcttttaccgcccaggcagaaagcccttgcagcgccgcgatgagtaaatcctgaaggtcagaagtttccgccgttttaccacacatcccctgcgcgtatgagcagccgtttcctgccggagtacggatagtttgttcacattgcacacaaaacatgatcacaccttttaaagttatatttaatatacatgtttaaggttaagacgcttaacgcggggataaaagggatttttcatgcaactttaagggagattgatttagcgcaattttggcggcagggatctaccgccagagaggtattacgcggagaaaaaggcgatgaggatcggcactaacaggctaagaataaaaccgtgaacaattgccgccgggaccatatccagcccgccagtacgttgaagaacgggcagggtgaaatccatcgacgtcgcaccgcataagcccagtgcggtagagcggctgcggcgaatcagcccagggatcaacataattgcaatcagctcacgggccagatcattaaaaaacgccgcgctcccgattaccggaccaaaagattcggtcaataaaataccggaaagagaataccagccgaaaccagaggccattgccagcgcggtattgatgggtagatcaagaataaaggcgttaattaaaccaccaattaatgaactggcaaccaccaccacggcgacaatcattccccggcgattaaggacaatctgctttaaggtcatgccattattgcgcaactgaataccgacgaggaaaagtagcagaattaacgtgtattcactggcttcggtcgcgtgttgtaagaaagccagtccactcaggccaatggcaaaaccaatcactactacgccgcacagttttagcgactcaagcgccatcgcaatacgcgacgggagtttttcttgctgatggtggttgcgccacggcagaccgcgctccagccacataagggcggcaatattacacagtaaaataacggtaatactgacggcagaataatgcagaatcgccaacaggttactggcgaggttatcgagaaacgccagactgatacccataaaaaagagaataaggtaaaccatccagcttaatagctgattaataacttttaacgcagcttgttggcgaagcggaatgaggtaacccacaatcaggggaaccagaatgattaacaacccagaaaacatgaaaacccagcccttgcaaagaaagaagtcgaaatgcgcgatgacacactactgaaagcggaaggacgagtaaagttgcaattaaaaggaaatgttatgcatcagagggggatttttaattttatatgagtgtttagcattgttgcgctcctttcatgtgcaatgccatataaagccactggcgcagggagcgcgcaggggnnggccagnngccgccgccccctgcacccccgggctctggcgaacaaaatcgccgctgcgcggtaccttcagcttatccccttcggcaaccgggtcgggcgcgaggtaacgtcctgtaagacgcgccctcagcccacatccatgtgggctgccccggccttcggggaacgcttcagcgattttgacgccactaatacccgtgcggtttgtaatgtcgaagataaaacaaccagggcagataaaatgccaatgctaattaattacgcttttccagcagagtccggtaaatcagaccaccgataatgccaccgacaattggcaccacccagaagaaccacagttgttctaatgcccagccgccctggaagatggcaaccgcggtgctgcgcgccgggttaacagaagtgttagtcaccggaatactgattaagtgaatcagggttaaggccagaccaatagcgatcggcgcaaaacctgccggagcgaatttgtcggttgcaccgtggatcactaacaggaagcccgcactcaataccagttcaactaccagcgcggaaagcatggaataaccgcctggtgaatgctcgccataaccgttagaagcaaaaccgctggctgccgcgtcaaaacccgttttaccactggcaattaaatacagcagcgctgccgcaacaataccgccgacaacctgggcaattacgtagccaacgacttcttttgccggaaaacgtccgccagcccataaaccaatagtgaccgccgggttaaaatgaccaccagaaatatgaccaacagcaaaggccatcgtcagaacggtcagaccgaacgccaacgccacgccggcaaaaccaatgcctaattccgggaagcctgcggccagtacagcactaccacagccaccaaaaacaagccagaaagtaccaaaacattcagctgctaattttctgaacatatccacctcaattaaaaattgaccctgtgaaaaatatggtcgttttatagggtcgtcgtaaaaaagtgacgacggaaataatgcgcggctattttaaaaacgaaggcgagtcattcaccagataaataaatccagtaaatttgatttagggcaacagcgggttgccccatatagtcatttgtctgattgacagtgtagtgcaagcaaaagatttaatcctttaggcgtaataaaaaataatttatcatgctaattatttgattttgttgtttttgcagacttatcagcaagagggagtataacgcgattattcgctcatttttcagacatttgccatgcttaaatgtgatgtcatcacgtattagcaaggcctttcccgttatactgccagcgtaaaggataagtcacatatttctggaggggatatgattcttgagcgcgttgaaattgtgggttttcgcggtatcaaccgtttgtcgttgatgctggaacaaaacaacgtcctgattggggagaacgcgtggggtaaatccagcttgctggacgccttaaccctgctgctatcgccagaatcagatctctaccattttgagcgcgacgatttctggttcccgccgggagatatcaacgggcgagaacatcatctgcatattattttgaccttccgcgaatcgctgccaggccgacatcgggttcgccgttatcggccgctggaagcgtgctggacgccatgcaccgatggctatcaccgtattttttatcgtctggaaggggagagtgcggaagacggcagcgtgatgacactgcgcagttttctcgataaagacggacatccgattgatgttgaggatattaacgatcaggcacaccatctggtgcgtttaatgccggtgctgcgcttgcgtgatgcccgttttatgcgccgtattcgtaacggcacggtgccaaatgtccccaatgtggaagtcaccgcgcgccagctcgatttcctcgcccgtgagttgtcctcacatccgcaaaatctctctgatggacagattcgtcagggactttccgcaatggtgcagttgcttgagcattatttctctgagcagggggctggacaggcgcgatatcgtttaatgcggcggcgggccagcaatgagcaacgaagctggcgctatctggacatcatcaaccggatgattgaccgacctggagggcgctcgtatcgggttattttgctcggcctgtttgctactttattgcaggcaaaaggcacattgcgactggataaagacgcccgtccattgttgctgatcgaagatccagaaacgcgtttacaccccattatgctttcagttgcctggcatctgttgaatcttttgcctttacaacgtattgctaccaccaactctggcgagctgctttcgttaactccagtggaacatgtttgccgcctggtgcgtgaatcttctcgtgttgccgcctggcgtctggggccaagtggcttgagcaccgaagacagccgccgcatctcttttcacattcgttttaatcgtccgtcatcgctgtttgctcgctgctggttgctggtggaaggggaaacggaaacctgggttatcaatgaactggcgcgtcagtgcggacatcattttgatgccgaagggatcaaggtcattgagtttgcccagtccgggctaaagccactggttaaatttgcccgccgaatggggattgaatggcatgtactggtcgatggcgatgaagcagggaagaaatatgccgctacggtacgcagcctgttgaataatgatcgggaagccgaacgagaacatttaacggcgttaccggcgctggatatggaacattttatgtatcgccagggattttccgatgtgttccaccgcgtggcgcaaatcccggaaaatgtcccgatgaatctgngcaaaattatctcgaaagcgatccatcgctcttccaaacccgatcttgccattgaagtggcaatggaggccggacgtcgtggtgtggactccgtaccgacgctgctgaaaaaaatgttctcacgcgtgctgtggctggcgcgcggtcgcgcggattaaccgcgaaacatcgtggccatttgtggctgaatagcgtcgagcatctcatagcgccgacggtattcagcccgttttttactggcgatttcggcaatctcttttcgtgctatctgtgctggaaggcggtaatggcgttcagcatcacatacgccgccaaccgattcccagaaagcgttgtaatcggcatggatcttgccttctttatcgcgataacgcaggctgcggtaaatatgcgtttcattgctgacggcaataatctgctctacctgcaaacgttgggcaaacagacaggccgcttccatcacgaggcgtttgggaaatagcccgtggcaggctttcgtcgcattctggatttcctgatgtggaatttcccattttgcgccttgcagtccaccaataaacatcgttcttttcccctgatattcacacagggtaaacgtgatttctgccagaggaataccttcgctgttgcggaacaggattgtgctgtcaccttctttatccattgagatcatcatggtcagctcaagcgtgaactgctcgccgtttttgccttccagcttcgccagttgcagcccgggggtattcaaatataagctgaattcttccgccgacatacatccacggagtaacgcataatggtaacgtaacgcctccagcaattgcttacggctaagattcgccgcaaggtaagggcgatgcagacgcacaggcagtcgcggctggcgcgttaacaatacattgagattaggccagtgggaaagttcgttcatccactcaacgcttaaacgcggcataatcaacgagcgcagcaaaaatttctggcgaaaactacggcgatgccagaatttacccggccgacactgtccacgtgccagactaagaaaaagtgacaggctgctgagagattcagatgacgtaaaggtccgttcggttagctgcgacatattcatgaaatcaatggttgtacatgacgtcgatttcaccattgcgtatcttaaccaaacatcaatagtgtgattactaacgtaaattttagggttttgttgatatttcgttgaagttaatgacccggattggcatatggagtattcagaatatttatgaaaaagcggaaaaccgtgaagaagcgttacgttattgcgctggtgatagtcatcgccggactgattacgttatggagaattcttaacgcacccgtgccgacttatcagacactgattgtgcgccccggtgatttacagcaaagcgtgctggcgaccggaaagctggacgcgctgcgtaaggttgacgtgggcgcgcaggtcagcggtcagttgaaaacgctgtcggtggcgattggcgataaagtaaaaaaagaccagcttttaggggttattgatcctgaacaggctgaaaaccagatcaaggaggtcgaagcaacgctgatggagctacgcgcgcagcggcagcaggcggaagcggagctgaaactggcgcgggtgacgtattcccgtcagcaacgtctggcacaaacgcaggcggtttcactgcaggatctcgacaccgccgcgacggagatggctgtgaaacaggcgcaaattggcaccattgacgcgcaaatcaagcgcaatcaggcttctctcgatacggctaaaaccaatctcgattacactcgcatcgttgccccgatggccggggaagtcacgcaaatcaccactctgcaaggccagacggtgattgccgcacaacaagcaccgaacattctgacgctggcagatatgagcaccatgctggtaaaagcgcaggtttctgaagcggatgtaatccacctgaagccggggcaaaaagcctggtttacggtacttggcgatccactgacgcgctacgaggggcaaatcaaggatgtactaccgacgccggaaaaggttaacgacgctattttctattacgcccgttttgaagtccccaaccccaatggtttgctgcggctggatatgactgcgcaagtgcatattcagctcaccgatgtgaaaaatgtgctgacgatccctctgtcggcgttaggcgatccggttggcgataatcgttataaagtcaaattgttgcgtaatggtgaaacacgcgagcgtgaagtgacgattggcgcacgtaacgataccgatgttgagattgtcaaagggctggaagcgggcgatgaagtggtgattggtgaggccaaaccaggagctgcacaatgacgcctttgctcgaattaaaggatattcgtcgcagctatcctgccggtgatgagcaggttgaggtgctgaagggcatcaccctcgatatttatgccggtgagatggtagcgattgttggcgcttcgggttccggtaaatcgaccctgatgaatattctcggctgtctggataaggccaccagcggcacctatcgcgtcgccggtcaggatgttgccacgctggacgccgatgcgctggcgcaactgnnnngcgagcatttcggctttattttccagcgttaccatttgctttcgcatttaaccgccgagcagaacgttgaagtaccagccgtctatgctggtcttgagcggaaacagcggctgcttcgcgcccaggagttgctgcaacgactggggctggaagaccgtacagagtattatccggcacagctttcgggtggtcagcaacagcgcgttagcatcgcgcgggcattgatgaacggcggtcaggtaattcttgccgatgaaccgaccggcgcactggacagccattcaggcgaagaggtgatggcgatcctgcatcagctgcgcgatcgcgggcatacggtgattatcgtcactcacgatccgcaggtcgctgctcaggccgagcgggtgatcgaaattcgcgacggcgaaattgtgcgcaatcctcccgccattgaaaaagtgaatgttgctggcgggacggaacctgttgtcaacacggcgtctggctggcggcagtttgtcagcggttttaatgaggcgctgacgatggcatggcgggcgctggcagcgaataaaatgcgtactttactgaccatgctggggattataatcggtattgcgtcggtggtttccattgtcgtggtgggcgacgccgccaaacaaatggtgctggcggatattcgttctattggtacgaatactattgatgtctatcccgggaaagattttggcgatgacgatccgcaatatcaacaggcgctgaagtacgatgacttaatcgccatccaaaaacaaccgtgggtcgcttcagccacacctgccgtctcgcaaaacctgcgcctgcgttataacaatgttgatgttgctgccagtgccaatggcgtgagcggcgattattttaatgtctatggcatgaccttcagtgaaggaaacacctttaaccaggaacagctgaacggtcgtgcgcaggtcgtggttctcgacagtaatactcgccgccagcttttcccccataaagcagatgtggttggcgaggtgattctggtcggcaatatgcccgccagagtcattggtgtggcggaagaaaaacagtcgatgtttggtagcagtaaagtgctgcgtgtctggctaccttacagcacgatgtccgggcgagttatgggccagtcgtggctgaactccattactgtcagggtgaaagaaggatttgacagcgccgaggcggaacagcaactcacgcgtttactttcactgcgccacggtaagaaggatttctttacctggaacatggacggcgtcttgaaaaccgttgaaaagaccacacgtactttacaactgtttatgacgctggtggcggtgatttcgctggtagtgggcggtattggtgtaatgaatattatgctggtgtcagtgaccgagcggacgcgggaaattggcattcgcatggctgtaggtgcgcgagcaagcgatgttttgcaacagttcctgatcgaagccgtactggtttgcctggtcggtggcgcgttgggaataacactgtcactgttaattgctttcaccttgcagcttttcttacccggctgggagattggtttttcaccgttggcactgctgctggcgtttctctgctcgacggtcaccgggattttatttggctggttacccgcacgaaatgcggcacgactggatccagtagatgctctggcacgagagtaatttttgagataaaaatgccagccgatcgggctggcattttgcctttaggatgtacacaatgagacagaagagctatgcgactgccgcttctacttcgacgggcacaataacactggcgtgattgccttttggcccctggtggacatcaaactgaacggattgtccagcttttagcgttctgtaaccatccatctgaatggtggaataatgagcgaaaatatcttcgccgccgccttcagggcagatgaaaccaaaccctttggcattgttgaaccacttaacagtacccttttccatgcttcgacatccttcgcaaatcttatacaagtaagatggaataaaccggggtcagagagggggctgttcaaaacctcgccaactctagaaatacaatttagagaattagggcgagccgtcaagcatttgacaggggacagggggcaggtatgaatcaaaaatttgaagcagttaacgctattgacaggaatgtgacagatgtcgctgatgccaacgatagatgatagttatctatcatgtggagtagattggtcaggcaaataagctcttgtcagcggcagggcgttctgccgataaccgtaaccgaagatgataactgacaatgggtaaaacgaacgactggctggactttgatcaactggcggaagaaaaagttcgcgacgcgctaaaaccgccatctatgtataaagtgatattagtcaatgatgattacactccgatggagtttgttattgacgtgttacaaaaattcttttcttatgatgtagaacgtgcaacgcaattgatgctcgctgttcactaccaggggaaggccatttgcggagtctttaccgccgaggttgcagaaaccaaagtggcgatggtgaacaagtacgcgagggagaatgagcatccattgctgtgtacgctagaaaaagcctgaatgcaggcataaaaattgggggaggtgcctatgctcaatcaagaactggaactcagtttaaatatggctttcgccagagcgcgcgagcaccgtcatgagtttatgaccgtcgagcacttgttactggcgctgctcagtaacccatctgcccgggaggcgctggaagcgtgttctgtggatttggttgcgctccgtcaggaactggaagcctttattgaacaaaccacacccgttctgcctgccagtgaagaggagcgcgacacacagccgacgctgagttttcagcgtgtactgcaacgtgcggtcttccatgtccagtcctccggtcgcaatgaggttaccggtgcaaacgttctggtcgctatctttagcgaacaggagtcgcaggcggcatatctgttgcgtaaacatgaagtcagccgtctcgatgtggtgaactttatctctcatggcacgcgtaaagacgagccgacacagtcttctgatcctggcagccagccaaacagcgaagaacaagctggtggggaggaacgtatggagaatttcacgacgaacctgaatcagcttgcgcgcgtgggcggaatcgacccactgattggtcgtgagaaggagctggagcgtgctattcaggttctctgccgtcgccgtaaaaacaacccgctgctagtgggggaatctggtgtcggtaaaaccgcgattgcagaaggtcttgcctggcgaattgttcagggcgatgtgccggaagtgatggctgactgtacgatttactctctcgatatcggttctctgttagcgggcacaaaatatcgcggcg

SEQ ID NO: 215 - DNA, 6188 bp, Escherichia coli
  Strain O55:H7
  modified_base (2)..(2): a, c, g or t
  modified_base (1702)..(1702): a, c, g or t
  modified_base (2969)..(2969): a, c, g or t
anaaacgttttaaagcgttgctcaagcagctggagcaggacactaacagcatcctgtttattgatgagatccacaccattatcggtgcgggtgcagcgtctggtggtcaggttgatgcggctaacctaatcaaaccgttgctctccagcggtaaaattcgcgtaattggttcgacaacctatcaggagttcagcaacattttcgagaaagaccgtgctctggcgcgtcgcttccagaaaattgatattactgaaccgtcgatcgaagaaactgttcaaatcatcaatggcctgaaaccgaagtatgaagcacaccacgacgtgcgttataccgcaaaagcggtgcgtgcggcggtagagctggcggtgaaatacattaacgatcgtcatctgccggataaagccattgatgttatcgacgaagcgggcgctcgcgcacgtctgatgccggtaagcaaacgcaagaaaaccgttaatgtggcggatattgagtccgtggtggcccgtattgcacgcattccagagaagagtgtttctcagagtgaccgcgataccctgaaaaacctcggcgatcgcctgaaaatgctggtcttcggtcaggataaagccattgaggcgctgactgaagccattaagatggcgcgtgcaggtttaggtcacgaacataaaccggtcggttcgttcctgtttgccggccctaccggggtcgggaaaacagaggtgacggtacagctttcgaaagctttgggcattgagcttctgcgctttgatatgtccgagtatatggaacgccataccgtcagccgtcttattggtgcgcctccgggatacgttggttttgatcagggcggtttgctgactgatgcggtcatcaagcatccacatgcggtgctgctgctggacgaaatcgagaaagcgcacccggacgtgttcaatattctgttgcaggtgatggacaacggtacgctgaccgataacaacggacgcaaagcggacttccgtaacgtggtactggtgatgaccactaacgccggggtacgggaaactgagcgcaaatccattggtcttatccaccaggataacagcaccgatgcgatggaagagatcaagaagatctttacaccggaattccgtaaccgtctcgacaacattatctggttcgatcatctgtcaactgacgtgatccatcaggtggtggataaattcatcgtcgagttgcaggttcagctggatcagaaaggtgtttctctggaagtgagccaggaagcgcgtaactggctggccgagaaaggttacgaccgggcaatgggcgcacgtccgatggcgcgtgtcatccaggacaacctgaaaaaaccgctcgccaacgaactgctgtttggttcgctggtggacggcggtcaggtcaccgtcgcgctggataaagagaaaaatgagctgacttacggattccagagtgcacaaaagcacaaggcggaagcagcgcattaatctgattgtcaggtaggttggtgaagtccgtaatctcgaaagaggttacggactttttatttatggggtggaacggtgaaaaccctatttttggaggtgaaggtaatttgttgataattagtgctgctggaaaaggtaaggataaaaaagggtgacagcaggaaaatgagatggttttgctttattaacaacgggctaaacgtgtagtatttganttcactgccgtacaggcagcttagaaattcactggtaacatactccacccgccaccatgttcactgccgtacaggcagataaaatgcgaaaaaaaagcccgtactttcgtacgagctcttctttaaatatggcggtgagggggggattcgaacccccgatacgttgccgtatacacactttccaggcgtgctccttcagccactcggacacctcaccaaattgttttgctgccaaacctcatgggtggcaacggggcgctactatagggagttggagtaaaacggtcaagaagaattttaatgataattattgtttgctcatactgtaaacaacttgtgcagtatatctacatcgagacaagttatggacttatacttccaaagtacttcatacatatcacaaaataaaaaggccggttaaaccgaccttttactcgttctttctcttcgcccatcaggcggtaaaacaatcagcgactacggaagacaatgcggcctttgctcaggtcgtacggggtcagttcaacagtcactttgtcgcccgtcaggatgcggatgtagtttttgcgcattttaccggagatgtgtgcagtaaccacgtgaccgttttctaactctacgcggaacatggtattaggcaacgtttcaagaacggtaccttgcatttcaatattgtcttctttggccatctaatcctctggggtatcactaccgtaatttgaaccggcaagataatgccgaagttctgtaaataagtaaagatttgcgcgctaaatcgcaacaaacaggttcggcacattactccgaaaacacacggctaagccgcaccaaaagcgcaacgtataagggagcggtgagataaacgatgggcgttacctgacgcgaaaaattccttatcggcagcggggtaatgagcgtaaccaactctgcgaccgcaattataacactctggggagaaatgtgccgaaaacattcattcttgtggtgaaaacaagcatcgtggtacccagaaattattcggcaatcgtccgaggcgcatttgattgagataattaaggtaattccggcggggaatttcgcaggcaccaagcgatgctgtgtgatcgttaaggacctggcagtcgataagcttaccgccatgaccgataaattcctcacagaataccagaagcgccgttttagacgcattttccatccggctgaacatggactcgccacaaaatagcgttccctgggccacgccgtacataccgccgacaagctcatnttcacgccagacttcaatggagtgggcatgaccgagttcgtgaaggcgatggtaggcttcgaccacgccacgcgtgatccaggttccttcttcgcgatcgctggcacagccttcaatgacctgaccaaaagcgtaattcatcgtgacacgatagggcgagcgtttatgaaatcgcttcatactacggctgatatgcagtgattctggccatagcaccgcgcggggatcgggcgaccaccagaggatggggtcgcctggagaaaaccacggaaaaataccacgctggtaagccattaacaggcgcgcagggctaagatcgcccccaagtgccagcaggccgttaggctcacgtaatgcgccttccggggaagggaaggctattgaatggcgagaaagctgaaccaggcgcatgaccgcaaaactccacgcaagtcggatcgttcaataatagcttacaaaccctgcttgaactggtaataacgcccctgtctggcaagcagttctgcgtgagtaccttgctcaataatttgcccgttgtccatcactattatttgttggaaacgagagagtccgcgaagtcgatgggtgaccattaacaccgttttctcacgcatcatttctgcaagcaattcaaggatctggctttcggttgtggcatctaagccttcggtaggttcatccagcaacaccagtggcgcatcatgtaacagcgcacgggcgatagccagacggcgcagttcaccaccggagagctggcgtccgccttcacctaaccaactgttgagacctgcatcctcgagcagcttctccagaccaacgcgacgtaagatcaccgccagagcctcatcactactgccaggcgaggcgagtaacagattatcacgcagcgtggcgctaaacagatgcactcgctgaggaacaacgctgatggtctgtcgtagagccgcttcattcaggctggctatggggctatcgttaagcaaaatctcgccctgttgcgggtcccatgcgcgggtcagcagttgtaacagtgttgatttgccgcatccggttcgcccgagaatcgctatatgttccccggcgtttacctgaagagaaatccctttaagtgcctgttgggattgctccggataagtgaactgaacatcccgtaatgtcagcgaaacgcgatcggcaacacgagtttgggtatcagggaaggtgacctccggtttttgatccgttaagtcagagatacgtacggcagaggcaatgacttgccccagatgctgaaatgcacccgttactggtgccagtgcttcaaacgcggctaacgcgcaaaagacaaacagggcaattaacgcgccgggttgagcattgccgccaacgccgccagacgccatccacagcatcaggatcaccgctaacgcgccaatgagcagcattatcgcttgcgacaatgcggtcagttcagattgacggcgttgcgcttccagccattgaatttctgtattctctagttgcgtgcgataacgatcgctggcaccaaaaatggtcagctcagcttgcccttgcagccaggccgtcagttgttggcgatactgtccgcgaagatgagtcagattttgcccggtgctttttcccgcacgataaaacagcggtggcatcaggaaaagcgtcagtaacataatgccgcccagcgtaaaggcgagggtggaatcaaggaaacttaacccgattgtcaccaccataatcaccacaaaagcgcccaccagcggcgagataacgcgcaggtaaagatgatcgagcgtatcaacatccgccaccacgcggttgagcaattcgccctgacgatagcgcgccagtccggcaggggagaggggcaacaatttgctgaaggtgtaaatgcgcagatgctgcaacacgcggaaagtcgcgtcgtgacttaccagacgttcaaaataacgcccggcagtacgggtgattgctgcaccacgcacgcccgcagcgggtagcatatagttgaagctgtacagtccggcaacccccgcaaccgctgaggccgagaggaaccagccggaaagtgtcaacagaccgatactggcgagcagcgtcacaattgccagcacaataccaagacttaacatccatttatgacgtttatacagtgccagatagggtagcaaagcgcgcatttaaatctcctcctgacgatgggccagtaatgtggcgaatgggccaccagccacacttaattccgcgtaacgtccttgctcaataatccggccatcctgcataacccaaatgacatcccagtcagcaagatcttctaactggtgggtgaccattaacgttgtctggcgcagagaggcggcattcagcgcctccattacgcgctgttcactgtgagcatcaaggctggcagcgggttcatccaacagtaatagcgaacagggatttagtaacgcacgggccaccgccacgcgctgcgcctgccccacggaaaggcgggcagcctggtcgccaacaggcgtatcaacgccttgtggcaggagcggtagaaactcgctgacccaggcgttatccagcgctgcttgtaattcttgttcgctggcatcaggtcgcgccagtagtacgttatcccgtaatgttgctgccggtaattgtgggttttgcccaacccaggagagatgtttacgccatgattctggtgataaatcgcgtaattctatcccgttgattcgtaatgatccctgatatgagagaaaaccagaaagcgcgttcagcagtgagcttttacctgaaccgctgcgaccaaccaacactgcacgttggcctgctggcaaagtaaagttcagcggtccggccagcgttttaccttccggcgacgtgataaacagatcctcggcctcaatggtcagcggatcggttgatgctaattccgtctcaccgcgctgcggatgggcgaacggggtttccataaacgttttcagactgtcagctgcaccaacagcctgggctttagcatgataaaacgtaccgagatcgcgtaatggctggaaaaactctggcgcaaggatcagggccagaaaacccgcagccagcgtcacgccagtatcgtagtgaccaaaatccagctcgccgagataggaaaaaccaaagtagaccgccaccagagcaattgacagcgaggtaaaaaattcgagaatgccggaggataaaaacgccagccgtagcact

SEQ ID NO: 216 - DNA, 22931 bp, Escherichia coli
  Strain O55:H7
  modified_base (342)..(342): a, c, g or t
  modified_base (2185)..(2185): a, c, g or t
  modified_base (3706)..(3706): a, c, g or t
  modified_base (4432)..(4432): a, c, g or t
  modified_base (6749)..(6749): a, c, g or t
  modified_base (7846)..(7846): a, c, g or t
  modified_base (8407)..(8407): a, c, g or t
  modified_base (8481)..(8481): a, c, g or t
  modified_base (8836)..(8836): a, c, g or t
  modified_base (9275)..(9275): a, c, g or t
  modified_base (11817)..(11817): a, c, g or t
  modified_base (14960)..(14960): a, c, g or t
  modified_base (19988)..(19988): a, c, g or t
  modified_base (19990)..(19993): a, c, g or t
gtccgttggcggaaatcttccgaagcagaacgaatactttcaatttcagcttcaccacgaccaaaaatacgcaatgtttccatgccgcgcaggcgatcgaggaaatgcccacttaagcgagcaagagcgagaaagttacgtcggttagcatcggcagcccccatcccaaccagcgccataaacaacggaattaacggtgcagtgcccagcagaatgagcgccgcagcccagttagaggggaagatcgccaccacaatcagcaacggcaccgacactgccagcgccatttgcggcaggtagcgtgcatagtaatcatgcatatcgtcaatttgctcgagtacnagcgtcgcccagctccccgcaggtttaccctgaatccacgctggccctgcttgttgcagacggtcgagaacctgacggcggatggcaaagcggatatgctgcccggcgtgataacccacccgttcgcgtaaccagaccacccatgcgcgcagtacaaaggtcagaaccattaacgtaaagggaagcagcagggcttcacggggaatattctccataatcatatgttgcagaattcgcgccatgaaccatgcctgggcaatgatcaatatgccgctcacaaagcccagcagacgagaaatattcagccaacgttgggagatgacgctttgctgttttaaccagcgggttaactctttttgacgagatttattcattgcacgcttagcaggtgagttatcagaattatttgcagagcaatgttacaacggggaaaaaataaaggcgacccatagtcgcatggtgtcgccttctttacttttgttactgatttgtaaaattattttgcgtcagctaaaccatcgaggtagcgttccgcatcaagtgctgccatgcagcctgtaccagcagatgtaatggcctggcgataaatgtgatccatcacgtcgcctgcggcaaagacgccaggaatgctggtctgggtggcattaccatgaatacccgactgcactttgatgtagccgttttccagttccagctgcccttcgaaaatggcagtattcgggctgtgaccgatagcaacaaacagaccggcaacgtcgagtgactcgatgttatcgctgttttgcgtatcgcgcagacgaacgccagtgacacccatttgatcgccggtcacttcttccagcgtacggttggtgtgcagaatgatgttgccgttctccactttatccatcagacgcttaatgaggattttttccgcgcggaaaccgtcacggcggtgaatcagatgcacttccgaagcgatgttagacagatacagcgcctcttcaaccgcggtattgccgccgccgatgaccgcaactttctggttgcgatagaagaaaccgtcgcaggttgcacaagcagaaactccacggcctttaaaggcttcttcagagggcaggccgagatagcgtgcagaagctccggtggcaataatcagcgcgtcgcaagtgtattcgccgttatcgccattcagacggaacggacggttttgcagatccaccttgttgatatgatcaaaaatgatctcagtttcaaacttggtggcatgttcgtgcatgcgctccattaataacggaccggtcagatcgtttggatcgccaggccagttttccacttccgtggtggtggtcagttggccgcctttttccatgccggtaatcagcacaggttgcaggttggcgcgcgccgcatagacagcagcggtgtatcccgccgggcctgaacccaggataagcagtttactgtgtttggtcgtgcccatgagatccccatagttgttggcagacaatgggcaggattgtagggaatttacagacgtaaaaaaagagtatgacgattttgttaacaatttgtgcaatcggcagcatcgataagcaggtcaaattctcccgtcattatcacctctgctacttaaatttcccgctttataagccgattaaatgatgaataaacgcccctgttaatgaatatctggcatgttgtactaaaaatcgatgttttgctttgacaatcccctagtgttttgcgaaaacattcgaggaagaaaaaaaacagtattcttatatgcgcataaccatgcatgtaaataccatgtttaccgtgctagtgaaatctacgtatggcgtggacagacgccattcgngatgtcgatagctgccacaaggcaacggtcttctcaccgtagacccaggcattgcgcgccgtgaatcttcatgatttcggtctatcgtgacgggtagcgactctgaacagtgatgtttcagggtcagacaggagtagggaaggaatacagagagacaataataatggtagatagcaagaagcgccctggcaaagatctcgaccgtatcgatcgtaacattcttaatgagttgcaaaaggatgggcgtatttctaacgtcgagctttctaaacgtgtgggactttccccaacgccgtgccttgagcgtgtgcgtcggctggaaagacaagggtttattcagggctatacggcgctgcttaacccccattatctggatgcatcacttctggtattcgttgagattactctgaatcgtggcgcaccggatgtgtttgaacaattcaataccgctgtacaaaaacttgaagaaattcaggagtgtcatttagtatctggtgatttcgactacctgttgaaaacacgcgtgccggatatgtcagcctaccgtaagttgctgggggaaaccctgctgcgtctgcctggcgtcaatgacacacggacatacgttgttatggaagaagtcaagcagagtaatcgtctggttattaagacgcgctaacacggaacaggtgcaaaatcggcgtattttgattacactcctgttaatccatacagcaacagtactggggtaacctggtactgttgtccgttttagcatcgggcaggaaaagcctgtaacctggagagcctttcttgagccaggaatacactgaagacaaagaagtcacattgacaaagttaagtagcggccgccgccttctggaggcgttgctgatccttattgtcctgtttgccgtctggttgatggctgccttactaagctttaacccttcggaccccagctggtcgcaaacggcctggcatgaacctatccataatttaggtgggatgcccggtgcgtggttggcagatacgctgttctttatttttggcgtgatggcttacaccattcccgtcattattgtcggcggttgttggtttgcctggcgtcatcagtccagcgacgaatacattgattattttgccgtttcgctacgcatcattggcgttttggcgctcatccttacctcctgtggtctggcggcaatcaacgctgacgatatctggtattttgcctccggtggcgtcattggcagcttactaagcactacgctacaaccactgctacacagtagcgggggaactattgcgctgctctgcgtttgggcagcgggcctgacgttgttcaccggttggtcatgggtgaccattgctgaaaaactcggcggctggattttaaacattctcaccttcgccagtaatcgtacccgtcgcgatgatacctgggtcgatgaagatgagtatgaagacgacgaagagtatgaagatgaaaaccacggcaaacagcatgaatcacgccgtgcccgtattcttcgcggcgcnctagcgcgtcgtaaacggttggcggaaaaattcattaatccgatggggcggcaaacagacgctgcgttgttctccggtaagcggatggatgatgacgaagagattacctacactgcacgcggtgtggctgccgacccggacgacgtcctattttcgggcaatcgtgcaacgcagccagaatatgacgaatacgatccattattaaacggtgcgccaattaccgaacctgtcgctgtagcagctgctgctaccacggcgacacaaagctgggctgcgccggttgaacctgtgactcagacgccgcctgttgcctctgttgatgttccaccttcgcaacctacagtagcctggcagcctgtaccgggtccacaaacgggagagccggttattgctcctgcaccggaaggttacccacagcagtcacaatatgcgcagcctgcagtgcaatataatgagccgctgcaacaaccagtacagccgcagcagccgtattatgcacctgcagctgaacaacctgcgcaacagccgtattatgcccctgcgccagaacaaccggtggcaggtaacgcctggcaagccgaagagcagcaatccacttttgctccacagtctacataccagactgagcaaacttatcagcagccagccgctcaggagccgttgtaccaacagccgcaacccgttgaacagcagcctgttgtggagcctgaacccgttgtagaaganacaaaacccgcgcgtccgccgctttactactttgaagaagttgaagagaagcgagcccgtgaacgtgaacaacttgcggcctggtatcaaccgattccagaaccggttaaagaaccagaaccgatcaaatcttcgctgaaagcaccttctgttgcagcagtacctccagtagaagccgctgccgctgtttctccgctggcatctggcgtgaaaaaagcgacactggcgacgggggctgccgcaaccgttgccgcgccagtcttcagtctggcaaatagcggtggaccgcgtccgcaggtcaaagaggggattggcccgcagttgccacgaccgaaacgtatccgcgtgccaactcgtcgtgaattggcgtcttacggtattaagctgccctcacagcgtgcggcggaagaaaaagcccgtgaagcccagcgcaatcagtacgattctggcgatcagtacaacgatgatgaaatcgatgcgatgcagcaggatgaactggcacgtcagttcgcccagacacagcagcaacgctatggcgaacagtatcaacatgatgtgcccgtaaacgcagaagatgcagatgctgcggcagaggctgaactggctcgtcagtttgcgcaaactcaacaacaacgttattccggcgaacaaccggctggggcgaatccgttctcgctggatgattttgaattttcgccaatgaaagcgttgctggatgatggtccacacgaaccgctgtttacgccaattgttgaacctgtacagcagccgcaacaaccggttgcaccgcagcagcagtatcagcagccacaacagccggttgcgccacagccgcagtatcagcagccacaacagcaggttgcgccgcagccacaatatcagcagccgcaacaaccggttgcgccacagcagcaatatcagcagccgcaacaaccagttgcgccgcagccgcagtatcaacagccgcaacaaccggttgcaccgcagccgcagtatcagcagccacaacagccagttgcgccacagccgcaggatactctgcttcatccgctgttgatgcgtaatggcgacagccgtccgttgcataaaccgacgacgccgctgccttctctggatttgctgacaccgccgccgagcgaagtggagccggtagatacctttgcgcttgaacaaatggctcgcctggtggaagcgcgtctggctgatttccgtattaaagccgatgtcgtcaattactctccggggccggttatcactcgctttgaacttaacctggcaccgggcgtaaaagcggcgcgcatttctaacttgtcacgggaccttgcccgttcactttcgacggtggcggtgcgtgtcgttgaagttattcctggcaaaccctatgtaggtctggagttaccgaataaaaaacgacaaaccgtttatctgcgcgaagtattggataacgccaaattccgcgataatccatcgccattaaccgtggtgctgggtaaagatatcgccggtgagccggtggttgccgatctggcgaaaatgccgcacttgttagttgcggggactaccggttccggtaaatctgtcggtgtgaacgcgatgatcctgagcatgctttataaagcacagccagaagatgtgcgtttcatcatgatcgacccgaaaatgctggagctttcggtgtatgaaggcattccgcacctgttaacggaagtcgttactgatatgaaagatgccgccaacgcgctgcgctggtgtgttaacgagatggagcgtcgttataaactgatgtctgcgctgggtgtgcgtaatctggcgggttataacgaaaaaattgctgaagccgatcgcatgatgcgtccgattccagacccgtactggaagccgggtgacagtatggatgcccagcatccggtgctgaaaaaagaaccatacattgtggtgttggtggacgaatttgccgacctgatgatgacagtaggtaaaaaagtggaagagctgatagcacgtctggcgcaaaaagcccgtgccgcgggtatccacctcgtactggcaactcagcgtccatcggttgatgttattactggtctgattaaagcgaatattccgacccgtatcgcctttaccgtatccagtaagattgactcacgtaccattcttgatcaggctggcgcggaatcactgctgggtatgggggatatgctctactctgggccgaactccacgttgccggtacgtgtccatggtgcttttgttcgcgatcaggaagttcatgccgtggtgcaggactggaaagcgcgtggtcgcccacagtatgttgatngcatcacctccgacagcgaaagcgaaggtggtgcgggtggtttcgatggcgctgaagaactggatccgttgttcgatcaggcggtgcagtttgtcactgaaaaacgcaaagcgtcaatttctggcgtacaacgtcagttccgcattggttataaccgtgcagcgcgtattatcgaacagatggaagcgcaggggattgtcagcgaacaggggcacaacggtaatcgtgaagtgctggccccaccgccgtttgactaattaatgcattgccggataaggcgcggtagcgtcgcatccggcactctatcaactgaaaattcagtattttcttctttcctcaagctgattattagcctggaatagagattagagggaactcccgatcgggagtgacgtaatttgaggaataatgatgaaaaaaattgccatcacctgtgcattactctcaagcttagtagcaagcagcgtttgggctgatgccgcaagcgatctgaaaagccgcctggataaagtcagcagcttccacgccagcttcacacaaaaagtgactgacggtagcggcgcggcggtgcaggaaggtcagggcgatctgtgggtgaaacgtccaaacttattcaactggcatatgacacaacctgatgaaagcattctggtttctgacggtaaaacactgtggttctataacccgttcgttgagcaagctacggcaacctggctgaaagatgccaccggtaatacgccgtttatgctgattgcccgcaaccagtccagcgactggcagcagtacaatatcaaacagaatggcgatgactttgtcctgacgccgaaagccagcaatggcaatctgaagcagttcaccattaacgtgggacgtgatggcacaatccatcagtttagcgcggtggagcaggacgatcagcgcagcagttatcaactgaaatcccagcaaaatggggctgtggatgcagcgaaatttaccttcaccccgccgcaaggcgtcacggtagatgatcaacgtaagtagaggcacctgagtgagcaatctgtcgctcgatttttcggataatacttttcaacctctggccgcgcgtatgcggncagaaaatttagcacagtatatcggtcagcaacatttgctggctgcggggaagccgttgccgcgcgctatcgaagccgggcatttacattctatgatcctctgggggccaccgggtaccggcaaaacaaccctcgctgaagtgattgcccgctatgcgaacgctgatgtggaacgtatttctgccgtcacctctggtgtgaaagagattcgcgaggcgatcgagcgcgcccggcaaaaccgcaatgcaggtcgccgcactattctttttgttgacgaagttcaccgtttcaacaaaagccagcaggatgcatttctgccacatattgaagacggcaccatcacttttattggcgcaaccactgaaaacccgtcgtttgagcttaattcggcactgctttcccgtgcccgtgtttatctgttgaaatccctgagtacagaggatattgagcaagtactaactcaggcgatggaagacaaaacccgtggctatggtggtcaggatattgttctgccagatgaaacacgacgtgccattgcagaactggtgaatggcgacgcgngccgggcgttaaatacgctggaaatgatggcggatatggccgaagtcgatgatagcggtaagcgggtcctgaancctgaattactgaccgaaatcgccggtgaacgtagcgcccgctttgataacaaaggcgatcgcttttacgatctgatttccgcactgcataagtcggtacgtggtagcgcacccgatgcggcgctgtactggtatgcgcgaattattaccgctggtggcgatccgttatatgtcgcgcgtcgctgtctggcgattgcgtctgaagacgtcggtaatgccgatccacgggcgatgcaggtggcaattgcggcctgggattgctttactcgcgttggcccggcggaaggtgaacgcgccattgctcaggcgattgtttacctggcctgcgcgccaaaaagcaacgctgtctacactncgtttaaagccgcgctggccgatgctcgcgaacgcccggattatgacgtgccggttcatttgcgtaatgcgccgacgaaattaatgaaggaaatgggctacgggcaggaatatcgttacgctcatgatgaagcaaacgcttatgctgccggtgaggtttacttcccgccggaaatagcacaaacacgctattatttcccgacaaacaggggccttgaaggcaagattggcgaaaagctcgcctggctggctgaacaggatcaaaatagccccataaaacgctaccgttaatgttatcgttgcggtaatgttgttactgtatccctgtggtcgcaggctgtggccacatctcccatttaattcgataagcacaggataagcatgctcgatcccaatctgctgcgtaatgagccagacgcagtcgctgaaaaactggcacnccggggctttaagctggatgtagataagctgggcgctcttgaagagcgtcgtaaagtattgcaggtcaaaacggaaaacctgcaagcggagcgtaactcccgatcgaaatccattggccaggcgaaagcgcgcggggaagatatcgagcctttacgtctggaagtgaacaaactgggcgaagagctggatgcagcaaaagccgagctggatgctttacaggctgaaattcgcgatatcgcgctgaccatccctaacctgcctgcagatgaagtgccggtaggtaaagacgaaaatgacaacgttgaagtcagccgctggggtaccccgcgtgagtttgactttgaagttcgtgaccacgtgacgctgggtgaaatgcactctggcctcgactttgcagctgcagttaagctgactggttcccgctttgtggtaatgaaagggcagattgctcgcatgcaccgcgcactgtcgcagtttatgctggatctgcataccgaacagcatggctacagtgagaactatgttccgtacctggttaaccaggacacgctgtacggtacgggtcagctgccgaaatttgctggcgatctgttccatactcgtccgctggaagaagaagcagacaccagtaactatgcgctgatcccaactgcagaagttccgctgactaacctggtgcgcggtgaaatcatcgatgaagatgatctgccaattaagatgaccgcccacaccccatgcttccgttctgaagccggttcatatggtcgtgacacccgtggtctgatccgtatgcaccagttcgacaaagttgaaatggtgcagatcgtgcgcccggaagactcaatggcggcgctggaagagatgactggtcatgcagaaaaagtcctgcagttgctgggcctgccgtaccgtaaaatcatcctttgcactggcgacatgggctttggcgcttgcaaaacttacgacctggaagtatggatcccggcacagaacacctaccgtgagatctcttcctgctccaacgtttgggatttccaggcacgtcgtatgcaggcacgttgccgcagcaagtcggacaagaaaacccgtctggttcataccctgaacggttctggtctggctgttggtcgtacgctggttgcagtaatggaaaactatcagcaagctgatggtcgtattgaagtaccagaagttctgcgtccgtatatgaacggactggaatatattggctaatacccaatttttctgaatctaaaaagcgcctacgggcgctttttttgtctccctttgataccgaacaataattactcctcacttacacgtaatactactttcgagtgaaaatctacctatctctttgattttcaaattatccgatgtatacaagcctatatagcgatctgctatagaaataattacacaatacggtttgttactggaatcaatcgtgagcaagcttgagtgagccattatgaaaacgaaaatccctgatgcggtattggctgctgaggtgagtcgccgtggtttggtaaaaacgacagcgatcggcggcctggcaatggccagcagcgcattaacattaccttttagtcggattgcgcacgctgtcgatagcgccattccaacaaaatcaggcgaaaaggttatctggagcgcctgtacagttaactgtggtagtcgctgcccgctacgtatgcacgtcgtggacggtgaaatcaaatatgtcgaaacggacaataccggcgatgacaattacgacggcctgcaccaggttcgcgcctgcctgcgtgggcgttccatgcgtcgccgtgtctacaatccggaccgcctgaaatatccgatgaaacgagtcggggcgcgcggtgaaggcaaattcgagcgcattagctgggaagaagcctacgacatcatcgcgaccaatatgcagcgcctgatcaaagagtacggcaacgaatccatctatctgaactatggcaccggtacgctgggtggcaccatgacccgctcctggccgccgggaaataccctggtcgcgcggctgatgaactgctgcggcggctatctgaaccattacggcgactactcctccgcgcaaattgcggaaggtctgaactatacctacggcggctgggcagatggcaacagcccgtcggatatcgaaaacagtaagctggtagtgctgtttggtaataaccctggcgaaacgcgaatgagtggcggtggggtgacttactatcttgaacaggcacgccagaaatctaatgcccgcatgatcatcatcgatccgcgctataccgacaccggtgccgggcgcgaagatgagtggatccctattcgtccgggaacagatgccgcactggttaacggtctggcgtacgtcatgatcactgaaaacctggtggatcaggcattcctcgataaatattgcgttggctacgatgagaaaaccctgccagccagtgcgccgaaaaatggccactataaagcttatattctgggtgaagggccagatggcgtggctaaaacaccggaatgggcctngcaaatcaccggtgttccggcagacaaaatcatcaaactggctcgtgaaatcggcagtaccaaaccggcgtttatcagccagggatggggcccgcagcgtcacgctaacggtgaaatcgcaacccgtgctatctcgatgctggcgattctgaccggtaacgttggtattaatggagggaacagcggcgcgcgtgaaggttcatacagtttaccgtttgtccgtatgccgaccttggaaaacccgatccagaccagcatttcgatgtttatgtggaccgatgccattgaacgtggcccggaaatgacggcgctacgtgatggtgtgcgcgggaaagataagctggatgtgccgatcaaaatgatctggaactatgccggtaactgcctgattaaccagcattctgaaatcaaccgtacccatgaaatccttcaggatgataagaagtgcgagctgattgtggttatcgactgccacatgacctcatcggcgaaatatgctgacatcctgctgcctgactgcaccgcttccgaacagatggactttgcactggatgcatcctgcgggaatatgtcttacgtgattttcaacgatcaggtgattaaaccgcgctttgaatgtaagaccatctatgaaatgaccagcgaactggcaaaacgtcttggcgttgagcaacagtttactgaaggccgtacccaggaagagtggatgcggcatctgtatgcccagtcgcgggaagcgattcctgaactgccaacgtttgaagagttccgcaagcaggggatctttaaaaagcgcgacccacaagggcatcacgttgcttataaagccttccgtgaagatccgcaggcaaatccactgaccacgccatcgggtaaaattgagatttattcgcaggcgctggctgacattgccgctacctgggaattgccagaaggcgatgtgatcgatccactgccgatctacacgccgggctttgaaagttatcaggatccgctgaacaaacagtatccgctgcagcttacaggtttccactataaatctcgcgttcactcaacttacggcaacgttgatgtgctgaaagcggcttgccgtcaggaaatgtggatcaacccgcttgatgcccaaaaacgcggtatccacaacggcgataaagtcaggatctttaacgatcgtggtgaggttcatattgaggcgaaagtgacgccacgaatgatgccgggtgtggtcgcactgggtgaaggtgcctggtatgacccggatgcaaaacgtgtcgataagggtggttgtattaacgtactgaccactcaacgtccgtctcctctcgctaaggggaatccgtcacatacaaaccttgttcaggttgaaaaggtgtaaggagtaaccgatgacaacccggtatggattttttattgattccagccgttgcaccggttgcaaaacctgcgagctggcttgtaaagactacaaagatttgacgccagaagtcagcttccgccgcatttatgaatatgctggtggcgactggcaggaagataacggtgtctggcaccagaacgtgtttgcctactatctgtcgatttcgtgcaaccactgcgaagatccggcttgtactaaagtctgcccgagcggtgcgatgcataaacgtgaagatggttttgttgtggtcgatgaagatgtgtgcattggctgccgctactgccatatggcttgcccgtatggcgcaccgcaatataacgaaacgaaaggccatatgaccaaatgcgatggttgttatgaccgtgttgcggagggtaaaaagccgatctgtgttgaatcttgtccgctgcgggcgctggatttcggccctatcgacgagctgcgtaaaaaacatggcgatctggcggccgttgcgccgttgccgcgagctcactttaccaaaccgaatattgtgatcaaacccaatgccaatagccgcccgaccggggataccactggctatctggcaaacccgaaggaggtgtgagatgggaagtggatggcatgaatggccgctgatgatcttcacggtcttcgggcaatgtgtggcgggtggttttatcgttctggctttggcgctgctcaaaggcgacctgcgagcagaagcccagcagcgtgttatcgcctgcatgtttggcttatgggtgctgatgggcattggctttatcgcctctatgctccatcttggttcaccgatgcgcgcctttaactcgctcaaccgggtaggggcttcagcactcagtaacgaaatcgccagcggttcgatcttttttgctgtaggcggcatcggctggttgctggcaatgctgaaaaagctgtcacctgcattgcgtacgctatggctggtggtgacgatggttcttggcgtcgtctttgtctggatgatggtgcgtgtgtataacagcattgataccgttccgacctggtacagcatctggacgccgatgggcttcttcctgacgatgttcatgggcggcccgttactgggttacctgttgctgagtctggctggcgtcgatggctgggcgatgcgtctgctgccagccatttctgtactggcactggtggtgagtggcgtgatgtcagtgatgcagggcacagagctggcaactattcatagttctgtgcagcaggccgcagcgctggtgccggactatggtgcgctgatgtcctggcgaatcgtgcttttggccgttgccctgtgcttgtggattgcaccacagctaaaaggttatcagcctgcggttccgctactatccgtctcattcattctgcttctggcaggggaattaatcggtcgcggcgtattctatggtttgcatatgaccgtggggatggccgtcgcaagctaatcagtaacaaccggggtttcggccccggttctcttttatttctgcttcgttaacgtgtcataactggtcatcaaattacgataatcaggaatgtggttagagaacaacgtcgccagtccttcaatatcattacgccagtcacggtgcagctcgcaagccacgccgaaccatgtcatcaattgcgcacctgcttgcgacatgcgatcccatgccgaatgccgggtaatttcattaaaggtccctgacgcgtcagtcacaacaaagacatcaaaccnttcttcaatggctgaaagcgccgggaatgccacgcaaacttcggttaccacaccggcaataattaactgttttttacctgtcgctttgactgcttttacaaaatcttcgttatcccaggcgttaatattgccagggcgagcaatgtaaggtgcatcggggaattgtgctttcagctctggaactaatgggccgttaggaccggtttcaaaactggtggtaagaatagttggtaagttgaaatacttagccaggtcacccagcgccagcacgttatttttaaacttatcgggttcgatatcccgtacaagggaaagtaaaccagcctggtgatcaacaagcaaaacggcagcatcatttttatcaagacgaacatacggtttggtcatcctcttctcctttcgagagtcagtggtacgtctgaaatcggtcagacgcgatgcattgctctgaaagcatagacgggaaatatgagtttgctgtgaccatgaaatttttcgactgaacgaagcgtatgaaatttgtgttagatcaataaaaacaatcagatgagattaatcatctcttcagcattagcgttatgaatgagtaatataaatcgataataccgccgctgcgatatgcgcgtattttcacccattgacaatgttttttgcggtggcatgatgcgcatgaaatttgaacttcctcacggttttaattcatgtccacgtatacccggcctgtcatgcttttgctgtctggcctgcttttgttgactctggcgatcgcggtgttaaatacactcgtgccgctttggctcgcccaggaacacatgtccacatggcaggtaggcgttgtcagctcatcctattttaccggcaaccttgtcggtacattgctgacagggtatgtcattaaacgcattggctttaaccgcagctattatctggcctccttcatttttgccgctggctgtgccggccttggcctgatgattggtttctggagctggttggcgtggcgttttgtcgcgggcgtcggctgtgccatgatttgggtagtcgttgagagcgcgctgatgtgcagtgggacgtcacgtaaccgtgggcgtttgcttgctgcgtatatgatggtttattacgtgggaacatttttaggccagttactggtcagcaaagtctcaaccgagctgatgagcgtattgccgtgggttacaggtttgacgttggcagggatcttaccgctgttgtttacgcgtgtcctgaatcagcaggctgaaaaccatgattcgacgtcaattacgtcaatgctaaaactccgtcaggcgcggcttggcgtgaatggctgcattatctcaggaatcgtgctgggatctctatatggcctgatgccgctgtacctcaatcacaaaggggtgagcaatgccagcattggtttctggatggcggtactggtcagtgcgggtatcctcggacaatggccgattggacgtctggcggataagtttggtcgactgctggtgttgcgtgttcaggtctttgtcgtcattctcggcagtatcgcgatgcttagccaggcggcgatggccccagcgttattcatcctcggtgccgctggctttacgctatatccggtggcgatggcctgggcttgtgagaaagttgaacatcatcaactggtggcgatgaaccaggccttactgttgagctataccgtgggaagtctgcttggcccgtcatttaccgctatgctaatgcagaatttctccgataatttattgtttatcatgatcgccagcgtatcgtttatctatttgctgatgctgcttcgcaacgccggtcatacgccgaaacccgttgctcacgtgtaaatgaattcaagcaaagtgtgaacttactgtttcacactctgcttttttgtttcttctatctgacttgcttttttccaaattttattcgtttaaaaataaaatgtgcagcaggttataattttgcatttcgctatttccgcacttcttatttgccgcgcataatccctcgttttacagatgcccctttaattttggcgaaggatttgtctatggctgggaatgttcaggaaaaacagctgcgatggtacaacattgcgctgatgtcttttatcactgtctggggttttggcaacgttgttaataactatgccaaccaggggctggtggttgttttttcatgggtgtttatctttgcgctctatttcacaccttatgcactaattgttggtcagttaggctcgaccttcaaagatgggaagggcggggtcagtacctggattaaacacacgatgggacccggattggcttacctcgccgcgtggacctactgggtggtgcatattccctatctggcacaaaaaccccaggcaatactgattgcgctcggttgggcgatgaaaggcgacggttcgctaatcaaagaatattcagtcgtagcgttacaggggttaacgctggtgctgtttatcttctttatgtgggttgcttcacgcggtatgaaatcgctgaaaatcgtcggttctgtggcagggattgcgatgtttgttatgtcgctcctgtatgtggcgatggcggtaaccgcgcctgcgattactgaagtgcatattgcgaccacaaacattacctgggaaacgttcattcctcatatcgactttacctacattaccactatttcaatgctggttttcgcggttggcggagctgagaagatttctccttacgttaatcaaacgcgcaacccaggaaaagaatttccaaaagggatgttatgcctggcggtgatggttgcggtttgtgccattctgggctcactggcgatggggatgatgtttgactcgcgtaatatcccggatgacttaatgactaacggtcagtattacgcctttcagaagctgggcgagtattacaacatgggtaatactttaatggtgatttacgccattgcgaataccctgggacaagtagctgcgctggtattctcgattgatgccccgcttaaagtgctattaggcgatgctgacagcaaatatattccagccagtttatgtcgtaccaacgcttctggtacgcccgttaatggctattttctgaccctggtgctggtggcgatcctgattatgctgccgactctcggcatcggtgatatgaacaatctctataaatggctgttgaatcttaactcggtagtgatgccgctgcgttatttatgggtatttgttgcatttattgcagtcgttcgcctggcgcagaaatatacaccagagtatgtctttattcgtaataagcctctggcaatgaccgtcgggatttggtgttttgcctttactgcctttgcctgtttgacggggatcttcccgaaaatggaagccttcactgcagagtggaccttccagttggcgctgaatgttgcaacgccgtttgtgctggtaggattaggactgatattcccgctgctggcgcgtaaagcgaatagtaaataattattgtggtcggtgacgctgactctggcagatctgacccgtttttacataatcgagaaatgcgcgcaagccgcaggacatatactggcggtttgggtaatacatttggaagctgtgctgtaagggcgttagaaatagagctctgaattatttatgcagcgcggaataaaaaagcggcaactcaataaagttgccgctttacggggaaattagaacattaccttatgaccgtactgctcaagaatacctttcacgcgttccatggtttctttcttcggtggtttaacaccatcgagtttgtattcttcacccatcgccacccatttgtgtttgcccagttcgtggtaggggagaagttcgattttctcaacgttacccatatcacgggtaaattcaccgaggcgatgcgctgaatcgtcatcgtcagaccagcctgggacaacaacgtagcggatccacaccttcacatttttattcgccagatatttggcgaactccagcgtgcggtggttggaaactccaaccagattttggtggatctcgtcgttcatctgtttgagatcgagcattaccaggtcggttacttccagcagttcatcaatcaccggatcgtaacgacgaacaaaaccgttggtgtccagacaggtatgaatgccttcttttttgcaggcgcggaaccagtcacgaacaaactcagcttgcaggattgcttcaccgccggatgcggtaacgccgccgccggaagcgttcataaagtggcgataggtcaccacttccttcatcaaatcttcaacggtaacttctttaccgccatgcgtgtcccaggtgtcgcggttatgacaatacaggcagcgcatcaggcagccctggaaaaaggtgataaagcgaatacctgggccgtctacggttccacaggattcaaaggagtgaatgcgaccaataactgacattgcggtgtttctccagatgtggcccatctgaggccgtgttggtgcgcagctcgaaggctacgtcgagtctgttttggcagtcaccttaaagtatagatagctgacaaaaaaggctcacgtgctaaaaaaggccccactttcgtggagcctttattgtacgctttttactgtacgatttcagtcaaatctaattacatagattgagtgaaggtacgagtaataacgtcctgctgctgttctttagtcagcgagttgaaacgtactgcgtagccagatacacggatggtcagctgcggatatttttccggattttccatcgcgtcgagcagcatttcacggttcatcacgttaacgttcaggtgctgaccaccttcgatggatgcttcgtggtggaagtaaccatccatcagaccagccaggttggtcttacgaacttcgtcgtctttacccagtgcgttcggaacgatagagaaggtgtaggagataccatctttagcgtaagcaaacggcagtttagcaacggaagtcagagacgctacagcacctttctggtcacgaccgtgcatcgggttagcacccggtccgaangnnnngccagcacgacgaccgtctggggtgttacccgttttcttaccatacacaacgttagaagtgatggtcagaacagactgagtcgggatagcgtcacggtaggtgtgcagtttctgaattttcttcatgaaacgttctactaggtcaacagccaggtcatctacacgcggatcgttgttaccaaactgcgggtattcgccttcgatttcgaagtcgatagccagaccgtcttcgtcacgaatcggtttaactttcgcatatttgattgcagacagggagtcagcagcaacggacagaccagcgataccacacgccatggtgcggataacgtcacggtcgtgcagcgccatcagagaggcttcgtagctgtacttgtcgtgcatgtagtgaatgatgttcagtgcagtgatgtactgtttagccagccagtccatgaagtgatccatgcgctccatcacttcatcgtagttcaggagatcgcctttgatcggttcagacttcggaccaacctgcattttcagtttttcgtcaacgccgccgttgattgcgtacagcatggttttcgccaggtttgcacgcgcaccgaagaactgcatttgtttaccaacgatcatcgggcttacgcagcaagcgatagcgtagtcatcgttgttgaagtccggacgcatcaggtcatcgttctcatactgcagagaagaggtgtcgatggacactttagcggcgaatttcttgaagttcagcggcagtttttcagaccacagaatggtcatgttcggttccggagacggacccatggtgtacagggtgttcaggaaacggaagctgtttttggtaaccagggtacgaccgtcgaggcccataccaccgatagattcggttgcccagatcgggtcgccagagaacagttcatcgtactccggagtacgcaggaagcgaaccatacgcagtttcatgaccaggtggtcaaccatttcctgcgcttcttgttcggtgatcttgccagctttcaggtcacgttcgatgtacacatccaggaaggtggaggtacgaccgaaggacattgcagcaccgttctgagacttaacagcagccaggtagccgaagtaagtccactggatagcttcctgagcgttggtagccggaccagagatgtcgtagccgtatttcgcagccatttctttcatctgacccagagcgcggtgctgttcagcgatttcttcgcgcagacggatagtctgttccaggtttacgccgttttccagatcagcctgcagagaggtgaactgagcgtatttgtctttcatcaggtagtcgataccgtacagcgcaacgcgacggtagtcaccgatgatacggccacggccataagcatctggcagaccggtcagaacaccggatttacggcaacgcaggatgtccggagtgtaaacgtcgaacacgccctggttgtgagttttacggtattcagtgaagatttttttgatcatcgggtccagttcgcggttgtacgctttgcaggaaccttcgatcattttgataccaccgaacgggataagagcacgtttcagcggagcttcagtctgcagaccaacaactttttccaacgctttgttgatgtagccagcgtcgtgagaggtgatggtggaagcaacagcggtgtcgaagtcaactggcgcgtgagtgcggttttccagtttaacgccttccattactttgtcccacagggtggtggtcgcttcagtagcgccagccaggaaggactcgtcaccctcgtacggagtgtagtttttctgaatgaagtcacggacgtttacttcattctgccagtcacctttggtaaaaccttcccaggctgtggctaacttttcattaagctcggacatgtaacacctaccttcttaagtggattttttatttactgcgtacttcgacaaccattaatggtgatcgttttcacgcaggtaaatgacccagtatgtcaacccaaccaacaaaccaccgccgataatattaccgatcgtaaccggaatcaggttatcagtgatgaagttcatcacggtcaggtgagaaaaattttccggtgcagaaccgacagcggtccagaattccggagatgcgaagtcgcggattacaatacccatcgggatcataaacatgtttgcgatactgtgctcaaaaccgctggcaacaaacatcgcgaccggcagcaccatgataaacgctttgtccatcaggctgcggccagaataactcatccatactgccagacataccatcaggtttgccaggataccaaggcagacggcctcaataaaagtatggtgcactttgtggtcggcggtttgtaggacgtttagtccccattgaccatttgcggtcatatactcgccggaaagccacattaaaagtacaaacagcagtgcgccgaccaggttgccaaaatagacatttagccagtttttagccaactgaccccaagtgatgcgcccactcgccttagcaacaacaatcaacactgtggaagtaaagagatcggctccgcagacaacacaaagaatcagtcccagagagaagcaaatgccgccaaccagttttgccatgccgaagggcattgtgcctgtgccagtggttgctgtgatatagaagacgaatgcgattgagatgaaaacaccggcggtaatcgccagatagaaagtcttaagcggatgtttcgttgctttatagacacccgcctcttcggccactttggccattgcagcaggaagtaaaagatcaaaagggttgtcagctttcacactaactctctctttattaagtcggcgacgagatactaacaaagcattatagatgagaaattgatatagatcatatctcgcctggcttataggcccgtaactcgcatggtttttatgcaaatacggagtaaatatttgattatcc

SEQ ID NO: 217 - DNA, 3268 bp, Escherichia coli
  Strain O55:H7
  modified_base (1845)..(1845): a, c, g or t
  modified_base (2569)..(2569): a, c, g or t
acaaatgagttgaattttttccgcatcctccgctaaaacagttaattaaaagggagcatcaggcgaataaagtaacaatatcgatcgtatttattaaatacaaattaccgatatttaaccttataattacaattattttattaatgcaaatatatgtaaagcggggcattaaaaaaacgccccgtaatataactcagacgaatcattaagcctacattacgtaggctatttgattttattttgcccagaatgctgctttggcgcgctgcagcttttcgtaggccttcaacagcgactgatgtgcagcaaacgcgtgcagatcgctatctactggttgcaagccataaaacgccgcttcgccgctcattgccgcactggcggcttccacggcatctgcgccgtacatgcgaacaaacgcattcagatattgcagcggctggcgatcttcttcctgcgccagtaataacaacgtttgcaggcagcgataatagttggcgcgttccgggctgaataccgatgagttaaactccatcgtccattcggtccagaccagagcctgttccagatcgccaccagccagcgccagcatggcttttaattcaccaatacgcagggtgtaccaaccgttatccgacccggtcgccagacccaacagctcacgcacgcgggtaaagtcatcaaaaccttcttcatccagttgctcgatgaggttcaggtaatcttctttttcccactcgctgcctggtagcgaaagaatcgtttcacgtaaatggctgcccatactgttattcgcgagccacagatcttcagccggataaatatcggacatgccaggcacgataatacggcaagcataaacgcccagatgctcgtaatcggcaatataaacttctttatcttctttgttgaagatagccatcagcgtagcaaactcttcttccgtggtgccggagaaattccagtccacaaacggataatcggcatcctgcttgaacaggtcccaggagattaaaccgctggaatcgataaagtgcgtttcgaggttggtatgttcagcgacttcttcatcatcgaaggttggcggagtaaacacatccaaatctttcaggccacgaccttgcagcagctcggtcacggtacgttccagtgctacgccaaaatcaggatgcgyaccgaaagaggcaaagcaggtgccgttagcaggattaaacagtaccacgcaaatcaccggatactggccgccaagggaaccatcatatgcgaagatcgggaaaccttctgcttccagtgtttcgatcgcttcaaccaccgctgggtaacgcgccagcacgtctgccgggatttccggcaagctgatgctttcagcaataatgcggtttttcacgtagcgttcgaaaacttcggacaacccctgaacgcgtgcttcgttacgggtattgccagcagacataccgttagaaacgtacaggttaccaatgatattcatcggaatataaacggtctgattatcagactgacgtgtaaacggcagaccgcaaataccacgatcttcgttaccggattgtaggtcaatcagcatactgccggtcaattcattctccggatcgtaaaatgcgcgcagacgttcatcgagcagcccttctggcacatcgtcattttcggtcagtgggaaccatttttcgttgggataatgcacaaatggaccgttggcgatggtttcgcccagccagaaatcagcaaaaaagtagttggttgagagacgctcgaaatattcaccgagtgcagaagccagcgccgctttcttggttgcgcctttaccgttggtaaaacacagtgcgcactctntgtcgcgaatatgtacagaccagacgttaggcacgggattcagccaggaggcctcttcaatctgaaagccgaggtctgaaagtttttgctggaagcgagcgatggaatcttccagtgcggcatctttgccggggataaatgtttgcgtcatgaaaatcactttagtcgtacggaaagcgcgcaataatacgggttttatctcaaaggcgctatcaccgccgccatgccgatgaactgttgactatgcttttagcggataaaccacgttaagagcataaaaatgaaggcgttcgatctccaccgtatggcatttgataaagtgccttttgatttccttggcgaagttgcactacgtagtctttatacctttgtactggtctttttgttcctcaaaatgaccggaagacgcggtgtgcggcagatgtcgctgtttgaagttttaatcattctgacgctgggatcagcggcgggagatgtggcgttttatgatgatgtgccgatggtcccggtacttatcgtctttattactctggcgttgttataccgcctggtaatgtggttgatggcgcacagtgaaaaactggaagatcttctggaaggcaagccagttgtcattattgaagatggcgagctggcctggtcgaaactcaataactccaacatgacggaatttgagttctttatggagctacgattgcgtggcgtggagcagctggggcaggtncgtctggcgattctcgaaaccaacgggcaaatcagtgtctatttctttgaagatgacaaggtgaaatcgggtttacttattttacccagtgattgtacgcagcgttacaaagtggtgccggagtcggcggactatgcctgtattcgttgtagtgaaatcattcatatgaaagcgggggaaaaacaattatgtccgcgctgtgcaaatccagaatggacgaaggcaagtcgggcaaaacgggtgacctgacagtaaaaacatcggctttttgctaataatccgagagattcttttgtgtgatgcaagccacatttttgccctcaacggttttactcattgcgatgtgtgtcactgaatgataaaaccgatagccacaggaataatgtattacctgtggtcgcaatcgattgaccgcgggttaatagcaacgcaacgtggtgaggggaaatggctcaaatcttcaattttagttctggtccggcaatgctaccggcagaggtgcttaaacaggctcaacaggaactgcgcgactggaacggtcttggtacgtcggtgatggaagtgagtcaccgtggcaaagagttcattcaggttgcagaggaagccgagaaggattttcgcgatcttcttaatgtcccctccaactacaaggtattattctgccatggcggtggtcgcggtcagtttgctgcggtaccg

SEQ ID NO: 218 - DNA, 39643 bp, Escherichia coli
  Strain O55:H7
  modified_base (3168)..(3168): a, c, g or t
  modified_base (4619)..(4619): a, c, g or t
  modified_base (7201)..(7201): a, c, g or t
  modified_base (11187)..(11190): a, c, g or t
  modified_base (16115)..(16115): a, c, g or t
  modified_base (16659)..(16659): a, c, g or t
  modified_base (16843)..(16843): a, c, g or t
  modified_base (17186)..(17186): a, c, g or t
  modified_base (19103)..(19103): a, c, g or t
  modified_base (19642)..(19643): a, c, g or t
  modified_base (19647)..(19647): a, c, g or t
  modified_base (21437)..(21437): a, c, g or t
  modified_base (24297)..(24297): a, c, g or t
  modified_base (25219)..(25219): a, c, g or t
  modified_base (28308)..(28308): a, c, g or t
  modified_base (31089)..(31089): a, c, g or t
  modified_base (33718)..(33718): a, c, g or t
  modified_base (34813)..(34813): a, c, g or t
  modified_base (36026)..(36026): a, c, g or t
  modified_base (37020)..(37020): a, c, g or t
  modified_base (37039)..(37039): a, c, g or t
  modified_base (38117)..(38117): a, c, g or t
  modified_base (38204)..(38204): a, c, g or t
  modified_base (38357)..(38357): a, c, g or t
  modified_base (39408)..(39408): a, c, g or t
  modified_base (39583)..(39584): a, c, g or t
tattctcggtgataaaaccaccgcagattatgttgatgccggttactgggcggcaagtgccattaaagaagcgaaaaaatactgcacgcctaatgtctttgacgccaaagtgactgttgatggtctgcgcgcggttaagccaatgcgtgaatggcaactctctgataatgctgcttatatgcattactgcccgaatgaaaccatcgacggtatcgccatcgacgaaacgccagacttcggcaaagatgtggtggtcgccgccgacttctcttcaaccattctttcccgtccgattgacgtcagccgttatggtgtaatttacgctggcgcgcagaaaaatatcggcccggcaggcctgacaatcgtcatcgtccgtgaagatttgctgggcaaagcgaatgtcgcgtgtccgtcgattctggattattccatcctcaacgataacggctccatgtttaacacgccgccgacatttgcctggtatctatctggtctggtctttaaatggctgaaagcgaacggcggtgtagctgaaatggataaaatcaatcagcaaaaagcagaactgctatatggggtgattgataacagcgatttctaccgcaatgacgtggcgaaagctaaccgttcgcggatgaacgtgccgttccagttggcggacagtgcgcttgacaaattgttccttgaagagtcttttgctgcaggccttcatgcactgaaaggtcaccgtgtggtcggcggaatgcgcgcgtctatttataatgccatgccgctggaaggcgttaaagcgctgacagacttcatggttgagttcgaacgccgtcacggttaatgccgaaattttgcttaatccccacagccagcctgtggggtttttatttctgttgtagagagttgagttcatggaatccctgacgttacaacccatcgctcgtgtcgatggcactattaatctgcccggttccaagagcgtttctaaccgcgctttattgctggcggcattagcacacggcaaaacagtattaaccaatctgctggatagcgatgacgtgcgccatatgctgaatgcattaacagcgttaggggtaagctatacgctttcagccgatcgtacacgttgcgaaattatcggtaacggcggtccattacacgcagaaggtgccctggagttgttcctcggtaacgccggaacggcaatgcgtccgctggcggcagctctttgtctgggtagcaatgatattgtgctgaccggtgagctgcgtatgaaagagcgcccgattggtcatctggtggatgcgctgcgcctgggcggggcgaagatcacttacctggaacaagaaaattatccgccgttgcgtttacagggcggctttactggcggcaacgttgacgttgatggctccgtttccagccaattcctcaccgcactgttaatgactgcgcctcttgcgccggaagatacggtgattcgtattaaaggcgatctggtttctaaaccttatatcgacatcacactcaatctgatgaagacgtttggtgttgaaattgaaaatcagcactatcaacaatttgtcgtaaaaggcgggcagtcttatcagtctccgggtacttatttggtcgaaggcgatgcatcttcggcttcttactttctggcagcagcagcaatcaaaggcggcactgtaaaagtgaccggtattggacgtaacagtatgcagggtgatattcgctttgctgatgtgctggaaaaaatgggcgcgaccatttgctggggcgatgattatatttcctgcacgcgtggtgaactgaacgctattgatatggatatgaaccatattcctgatgcggcgatgaccattgctacggcggcgttatttgcaaaaggcaccaccacgctgcgcaatatctataactggcgtgttaaagaaaccgatcgcctgtttgcgatggcaacagaactgcgtaaagtcggtgcggaagtagaagaggggcacgattacattcgtatcactccaccggaaaaactgaattttgccgagatcgcgacatacaatgatcaccggatggcgatgtgtttctcgctggtggcgttgtcagatacaccagtgacgattcttgatcccaaatgtacggccaaaacatttccggattatttcgagcagctggcgcggattagccaggcagcctgaatgaataacgtccaataaatagccaaaactttctttatcaaaacgtcggcacattgccggcgttttttttcggaccttgtgagtcattttgattaatggtagcgtcgcttgtcaatgtaagttgttgatacataatgtttgtatatgattaatcaacggatgattcacatgaagaatactaaattactgctggcgattgtgacctctgcagcattactgacggggtgtcaaaatacccacggtattgataccaatatggctatcagctccggtttaaatgcctataaagcagcaacgttaagcgatgccgatgcaaaagcgattgccaatcagggctgtgccgaaatggacagcggcaatcaagtcgcaagtaaatccagcaagtacggtaaacgtctggcaaaaatcgccaaagcattgggtaacaatattaatggcacgccggtcaactataaggtttatatgaccagcgacgtcaacgcatgggcgatggcgaacggctgtgttcgtgtttacagtggcctgatggacatgatgaacgataacgaaattgaaggcgttctgggccatgaactgggccacgtcgcgttgggtcactcgctggctgaaatgaaagcttcttatgcgatcgttgccgcacgcgatgccatttcagctaccagcggtgtggcttcccagctttcccgctcacaattgggtgatatcgcagaaggcgctatcaatgcgaaatactcccgcgataaagagtccgaagcagatgatttctcctttgatctgttgaagaaacgtggcatcagcacccaggggcaggttggcagctttgaaaaactggctagcctggatggcggtcgcacccagtccatgtttgactctcacccaccatcaacagagcgtgcgcaacacatccgtgatcgtatcgcctctggtaagtaaatcattgtcatctttcgggctggtcttctgccagcccgctataattgcncaataaatccccatctgaatacagacaaaactggtttttgcacacaacgttaacgatttgtggcgtcggcgcgtataatgcgcgcggttatgttaacggtacgcctgttttaaggagataaagatgacggcaattgccccggttattaccattgatggcccaagcggtgcagggaaaggcaccttgtgtaaggctatggcggaagcgttgcaatggcatcttctggattcgggtgcaatttatcgcgtactggcactagcggcattacatcaccatgttgatgttgcatcggaagatgcgctggtgccgctggcatcccatctggatgtacgttttgtgtcaaccaatggcaatctggaagtgatcctcgaaggggaagatgtcagcggcgaaattcgtactcaggaagtggcgaatgcagcttcacaagtcgcggcattcccacgcgttcgtgaagcattattgcgtcgccaacgcgcgtttcgcgaattaccaggcctgattgccgatggccgcgacatgggaacggtggtattccctgatgcgccagtgaaaattttccttgacgcctcctcggaagaacgtgcgcatcgccgcatgctacagttgcaggagaagggctttagtgttaactttgagcgccttttggccgagatcaaagaacgcgacgaccgcgatcgtaaccgagcggtagcgccactggttccggcagccgatgctttagtgttggattccaccaccttaagcattgagcaagtgattgaaaaagcgctacaatacgcgcgccagaaattggctctcgcataagcgaccgaatttgcagtacccccgttgcaatggaatgacagcgggtatgttaaacaaccccatccggcatggagccaggtggacgttaaatataaacctgaagattaaacatgactgaatcttttgctcaactctttgaagagtccttaaaagaaatcgaaacccgcccgggttctatcgttcgtggcgttgttgttgctatcgacaaagacgtagtactggttgacgctggtctgaaatctgagtccgccatcccggctgagcagttcaaaaacgcccagggcgagctggaaatccaggtaggtgacgaagttgacgttgctctggacgcagtagaagacggcttcggtgaaactctgctgtcccgtgagaaagctaaacgtcacgaagcctggatcacgctggaaaaagcttacgaagatgctgaaactgttaccggtgttatcaacggcaaagttaagggcggcttcactgttgagctgaacggtattcgtgcgttcctgccaggttctctggtagacgttcgtccggtgcgtgacactctgcacctggaaggcaaagagcttgaattcaaagtaatcaagctggatcagaagcgcaacaacgttgttgtttctcgtcgtgccgttatcgaatccgaaaanagcgcagagcgcgatcagctgctggaaaacctgcaggaaggcatggaagttaaaggtatcgttaagaacctcactgactacggtgcattcgttgatctgggcggcgttgacggcctgctgcacatcactgacatggcctggaaacgcgttaagcatccgagcgaaatcgtcaacgtgggcgacgaaatcactgttaaagtgctgaagttcgaccgcgaacgtacccgtgtatccctgggcctgaaacagctgggcgaagatccgtgggtagctatcgctaaacgttatccggaaggtaccaaactgactggtcgcgtgaccaacctgaccgactacggctgcttcgttgaaatcgaagaaggcgttgaaggcctggtacacgtttccgaaatggattggaccaacaaaaacatccacccgtccaaagttgttaacgttggcgatgtagtggaagttatggttctggatatcgacgaagaacgtcgtcgtatctccctgggtctgaaacagtgcaaagctaacccgtggcagcagttcgcggaaacccacaacaagggcgaccgtgttgaaggtaaaatcaagtctatcactgacttcggtatcttcatcggcctggacggcggcatcgacggcctggttcacctgtctgacatctcctggaacgttgcaggcgaagaagcagttcgtgaatacaaaaaaggcgacgaaatcgctgcagttgttctgcaggttgacgcagaacgtgaacgtatctccctgggcgttaaacagctcgcagaagatccgttcaacaactgggttgctctgaacaagaaaggcgctatcgtaaccggtaaagtaactgcagttgacgctaaaggcgcaaccgtagaactggctgacggcgttgaaggttacctgcgtgcttctgaagcatcccgtgaccgcgttgaagacgctaccctggttctgagcgttggcgacgaagttgaagctaaattcaccggcgttgatcgtaaaaaccgtgcaatcagcctgtctgttcgtgcgaaagacgaagctgacgagaaagatgcaatcgcaactgttaacaaacaggaagatgcaaacttctccaacaacgcaatggctgaagctttcaaagcagctaaaggcgagtaattctctgactcttcgggatttttattctgaagtttgttgagtttacttgacagattgcaggtttcgtcctgtaatcaagcactaagggcggctacggccgcccttaatcaatgcagcaacagcagccgcttaatttgcctttaaggaaccggaggaatcatgaccaagtcagaattgatagaaagacttgccacccagcaatcgcacattcccgccaagacggttgaagatgcagtaaaagagatgctggagcatatggcctcgactcttgcgcagggcgagcgtattgaaatccgcggtttcggcagtttctctttgcactaccgcgcaccacgtaccggacgtaatccgaagactggcgataaagtagaactggaaggaaaatacgttcctcactttaaacctggtaaagaactgcgcgatcgcgccaatatttacggttaagtttttactcaaacttgaacgagagaaaagcacctgtcgggtgcttttttcatttatctaatctggaactggaagctgcctcgcagagttttgagcagttttcaccctttcgttaaattcttctgaatgtgcctcggggaacgcaaaattcccaccagacaaccgctcaacaaagttgcacactttccataaacagggaggggtgcatgaaaataacgacagtcggcgtatgcataatttgcggaatttttccgttgctgattttgccccaattgcctgggacattaacccttgcgtttctgactctcttcgcctgcgtactggcatttatccctgttaaaaccgtccgttatatcgcgctgacgttgctgtttttcgtttggggcatattatcagcaaagcaaattttgttggcaggagaaaccttaactggcgcgacgcaggatgcaattgttgagatcactgctactgacggcatgaccactcattacggtcaaattacttatctacaaggtcaacgtatattccctgcgccaggccttgtgctgtatggcgaatatcttccgcaagcggtttgtgccggacaactgtggtcaatgaaactcaaagttcgtgccgttcatggtcaacttaatgatggcggctttgatagccagcgttatgccattgcccagcatcagccgctcaccggccgctttctgcaggcaagtgttattgaaccgaattgtagcctgcgtgcacagtatctggcgtcactacaaacaacgctgcaaccctatccgtggaatgcggttattcttggtttaggtatgggggaacggttatccgtccctaaagaaatcaaaaatatcatgcgtgatactggaacggcgcatttaatggcgatatcgggattgcacatcgcttttgcggcgttgctggctgccggactcattcgcagtggacaaatttttctgcctgggcgctggatccactggcaaatgccattaattggcggnatctgctgtgctgctttttatgcctggctgacgggaatgcaacctcctgcattgcgtaccgttgtggcgcttgctacgtggggtatgcttaagttaagtgggcgacagtggagtggctgggatgtatggatatgttgtctggcggcaattttgctgatggatcctgttgtcattctctcgcaaagtttatggctctctgccgctgcggtcgcggcattgatattttggtatcagtggtttccctgtcctgagtggcaactgccgccggtattgcgtgcagttgtttccctcatccatctgcaactgggaatcacacttctgcttatgcccgtgcaaatcgtcatatttcatggcattagtctgacctcgtttattgcaaatctattagcaattcccttggtgacatttatcacggttccgttgatcctcgccgcgatggttgtgcatttaagcgggccgttaatcctggatcaagggttatggtttcttgccgaccggtctttggctttacttttcttggggttaaagagtttgccagaagggtggatcaacattgctgaacgttggcaatggctatcattttccccatggttcttactggtggtatggcgattaaacgcctggcgaacgttgccagcaatgtgtgtggctgtaggcttgctgatgtgctggccgctgtggcaaaaacctcgacctgacgagtggcaagtgtacatgcttgatgtcgggcaagggctggcaatggtgatagccagaaacggcaaagcgattctctatgacacgggactggcctggcctgaaggggatagtgggcaacaactgattatcccctggctccactggcataatcttgaaccggaaggcgttatcctgagtcatgaacatctggatcaccggggagggctggactcaatattgcatacatggccgatgttatggatcagaagtccgttaaactgggaacatcatcagccctgtgtgcgtggcgaagcgtggcaatggcaaggattgcgtttcagcgcgcactggcctttacaaggtagcaacgataaaggaaataaccattcctgtgtggttaaggttgatgacgggacgaatagcattcttctaaccggtgatattgaagccccagctgaacaaaagatgctaagccgttactggcagcaagtgcaggcaacattgcttcaggtacctcaccatggcagtaatacctcatcatcattgccattaattcagcgagtgaatggaaaagtggcactcgcatcggcatcgcgctataacgcatggcgactgccctctaacaaagttaagcatcgctatcaacaacaaggttatacgtggcttgatactcctcatcaggggcaagtaacggtcgatttttcagcgcaaggctggcggattagcagcctcagggagccaattttacctcgttggtatcatcagtggtttggcgtgccagtggataacgggtagaatatgcggctatttcaacaaatgctggttttttgaatgcataacgacaaagatctctctacgtggcagacattccgccgactgtggccaaccattgcgccttttaaagcgggtctgatcgtggcgggcgtagcgttaatcctcaacgcagccagcgataccttcatgttatcgctccttaagccacttcttgatgatggctttggtaaaacagatcgctccgtgctggtgtggatgccgctggtggtgatcgggctgatgattttgcgtggtatcaccagctatgtctccagctactgtatctcctgggtatcaggaaaggtggtaatgaccatgcgtcgccgcctgtttggtcacatgatgggaatgccggtttcattctttgacaaacagtcaacgggtacgctgttgtcacgtatcacctacgattccgaacaggttgcttcttcctcttccggcgcactgattactgttgtgcgtgaaggtgcgtcgatcatcggcctgttcatcatgatgttctattacagttggcaattgtcgatcattttgattgtgctggcaccgattgtttcgattgcgattcgcgtagtatcgaagcgttttcgcaacatcagtaaaaacatgcagaacaccatggggcaggtgaccaccagcgctgaacaaatgctgaaaggccataaagaagtattgattttcggtggtcaggaagtggaaacgaaacgcttcgataaagtcagcaaccgaatgcgtcttcaggggatgaaaatggtttcagcctcttccatctctgatccgatcattcagctgatcgcctctttggcgctggcgtttgttctgtatgcggcgagcttcccaagtgtcatggatagcctgactgccggtacgattaccgttgttttctcttcaatgattgcactgatgcgtccgctgaaatcgctgactaacgttaacgcccagttccagcgcggtatggcggcttgtcagacactgtttaccattctggacagtgagcaggagaaagacgaaggtaagcgcgtgatcgagcgtgcgactggcgacgtggaattccgcaacgtcacctttacttatccgggacgtgacgtacccgcattgcgtaacatcaacctgaaaattccggcagggaaaacggtcgctctggttggacgctctggttcaggtaaatcaaccatcgccagcctgatcacgcgtttttacgatattgatgaaggcgaaatcctgatggatggtcacgatctgcgcgagtataccctggcgtcgttgcgtaaccaggttgctctggtgtcgcagaatgtccatctgtttaacgatacggttgctaacaacattgcttacgcacgaactgaacagtacagccgtgagcaaattgaagaagcggcgcgtatggcctacgccatggacttcatcaataagatggataacggtctcgatacagtgattggtgaaaacggcgtactgctctctggcggtcagcgtcagcgtattgctatcgctcgagccttgttgcgtgatagcccgattctgattctggatgaagctacctcggctctggataccgaatccgaacgtgcgattcaggcggcactggatgagttgcagaaaaaccgtacctctctggtgattgcccaccgcttgtctaccattgaaaaggcagacgaaatcgtggtcgtcgaggatggtgtcattgtggaacgcggtacgcataacgatttgcttgagcaccgcggcgtttacgcgcaacttcacaaaatgcagtttggccaatgatcgaaaaaatctggtctggtgaatcccctttgtggcggctattgctgccactctcctggttgtatggcctggtgagtggcgcgatccgtctttgctataaactaaaactgaagcgcgcctggcgtgcccccgtaccggttgtcgtggttggtaatctcaccgcaggcggcaacggaaaaaccccggtcgttgtctggctggtggaacagttgcaacagcgcggtattcgcgtgggggtcgtatcgcggggatatggtggtaaggctgaatcttatccgctgttattgtcggcagataccaccacagcacaggcgggtgatgaacctgtgttgatttatcaacgcactgatgcgcctgttgcggtttctcccgttcgttctgatgcggtaaaagccattctggcgcaacaccctgatgtgcagatcatcgtaaccgacgacggtttacagcattaccgtctggcgcgtgatgtggaaattgtcgttattgatggtgtgcgtcgctttggcaatggctggtggttgccggcggggccaatgcgtgagcgagcggggcgcttaaagtcagttgatgcggtaatcgtcaacggcggtgtcccccgcagcggtgaaatccccatgcatctgctgccgggtcaggcggtgaatttacgtaccggtacgcgttgtgacgttgctcagcttgaacatgtggtggcgatggcagggattgggcatccgccgcgcttnnnngccacgctgaagatgtgcggcgtacaaccggaaaaatgtgtaccgctggccgatcatcagtctttgaaccatgcggatgtcagcgcgttggtaagcaccgggcaaacgctggtaatgactgaaaaagatgcggtgaaatgccgggcctttgcagaagaaaattggtggtatttgcccgttgacgcacagctttcaggtgatgaaccagcgaaactgcttgcgcaactaacctcgctggcttctggcaactagttacgccgcggcagcgttcgattgatggagtcatgaatgtcgctgccgcacctctcccttgctgatgcgcgtaatcttcaccttgccgcgcaaggcctgttaaacaaaccccgccgtcgagcgtcgttggaggatattccggcaacgatctcccgcatgtccttgctgcaaatcgataccatcaatattgttgcccgtagcccatatctggtgcttttcagtcgtctgggaaattatcctgcccagtggctggatgagtctctggcgcgtggcgaattaatggaatactgggcgcatgaagcctgctttatgccacgcagtgactttcgtcttattcgccaccgcatgctggcacctgaaaaaatgggctggaaatacaaagacgcctggatgcaggaacatgaggcggaaattgcacagttaattcagcatattcatgataaggggccggtacgttcagccgattttgagtatcctcgtaaaggtgcaagcggctggtgggaatggaagccgcataaacggcatctggaaggtttatttactgccggaaaggtgatggtgattgaacggcgcaacttccagcgcgtttatgatttaacccaccgtgtcatgcctgactgggatgatgagcgcgatctcgtttcgcaaacagaagcagaaatcatcatgctggataacagtgcgcgtagcctgggaatattccgcgaacagtggctggcagattactatcggctgaaacgtccggcactggcagcgtggcgcgaagcgagggctgaacagcggcaaatcattgctgtgcatgttgaaaaattgggcaatctttggctgcatgctgatttgctgccgctactcgagcgagcgctggccggaaagctcactgcaacgcacagcgcggtactttcgccttttgatcctgttgtctgggatcgcaaacgcgcagagcagctttttgattttagctaccggctggagtgctataccccagcgccgaaacgccagtatggctattttgttctgccgttattacatcgtgggcaattagttgggcgaatggatgccaaaatgcatcgccagacaggcatccttgaagttatctctctgtggttacaggaaggtattaaaccaacgacaacgctgcaaaaagggttacgtcaggcgattactgatttcgctaactggcagcaggcaacgcgggtgacattaggacactgcccgcaaggtctctttacggattgccgcaccggctgggaaatagaccccgtcgcataaatgattatgataagatttatgcattcataacccgatccatctggaggaactatggatcatcgtctgcttgaaatcattgcctgcccggtttgcaacggaaaactttggtataaccaggaaaaacaagaacttatttgcaaactggacaacctggctttcccgctgcgcgatggcattccagtgttgctggaaacggaagcccgcgtgctgactgctgatgagagtaaatcatgagttttgtggtcattattcccgcgcgctacgcgtccacgcgtctgcccggtaaaccattggttgatattaacggcaaacccatgattgttcatgttcttgaacgcgcgcgcgaatcaggtgccgagcgcatcatcgtggcaaccgatcatgaggatgtcgcccgcgccgttgaagccgctggcggtgaagtatgtatgacgcgcgccgatcaccagtcagggacagaacgcttggcggaagttgtcgaaaaatgcgcgttcagcgacgacacggtgatcgttaatgtgcagggtgatgaaccgatgatccctgcgacaatcattcgtcaggttgctgataacctcgctcagcgtcaggtgggtatggcgactctggcggtgccaatccacaatgcggaagaagcgtttaacccgaatgcggtgaaagtggttctcgacgctgaagggtatgcactgtacttctcacgcgctaccattccgtgggatcgtgatcgttttgcaaaaggccttgaaaccgttggcgataacttcctgcgtcatcttggtatttatggctaccgtgcaggctttatccgtcgttacgtcacctggcagccaagcccgttagaacacatcgaaatgttagagcagcttcgtgttttgtggtacggcgaaaaaatccatgttgctgtcgcgcatgaagttcctggcacaggtgtggatacccctgaagatctcgagcgcgttcgcgctgaaatgcgctaatttcacttcacgacacttcagccaattttgggaggagtgtcgtaccgttacgattttcctcaatttttcttttcaacaattgatctcattcaggtgacatcttttatattggcgctcattatgaaagcagtagcttttatgagggtaatctgaatggaacagctgcgtgccgaattaagccatttactgggcgaaaaactcagtcgtattgagtgcgtcaatgaaaaagcggatacggcgttgtgggctttgtatgacagccagggaaacccaatgccgctaatggcaagaagctttagtacgcccggaaaagcccgacaactggcatggaaaaccaccatgctggcaagaagtgggactgtccgtatgccgactatttatggtgtgatgacgcatgaagaacaccccggccctgatgtcctgctactggagcggatgcgtggtgtttcggtggaggcaccagcccgaacaccagaacgttgggaacagctcaaagaccaaatcgttgaagccttactggcctggcaccgtcaggacagtcgcggttgcgtcggcgcggtcgacaatactcaggaaaatttctggccctcatggttccggcaacatgttgaagtgctatggaccacgctcaatcagttcaataacaccggtctgacgatgcaggataagcggatcctgtttcgcactcgcgaatgtctcccggcattatttgaaggttttaacgacaattgtgtgctgattcacggtaacttctgtttacgcagcatgttgaaagattcgcgcagcgatcagttactggcgatggtcgggccgggactaatgctttgggcaccgcgagaatacgaactgttccgactaatggataattctctggcggaagatttgctctggagttacctgcaacgcgcgccagtggcggagtcgttcatctggcggcgttggttgtatgtgttatgggatgaagttgcgcaactggttaataccggacgatttagtcggcgcaacttcgatctggcatcaaaatcactcttgccgtggctcgcctgacgaaccttttagccactgccagatgcggccaagcgtttcatagccaacacgatcgctatgcatcaaccagaccggagaagggattgcccgttcccacgggttaagcggcgagtcgatggccaactgattcgccggggctggtagtggatttaacccttcctgctgaaaaaagatcatcgcccgcggcagatgtgatgcggaggtcaccagcaggaaaggggcgtcaccaatcgcctgtttcactgccgcagcttcttcttcggtatcttttggcaaatccagggtgataatttgctcgcgcggtacgcccagcgattgcgcaactctggcacctacttccgctgtactcaccgtattggtttttgctacgcctcccgtgaagatcagttttgaacccggattttcgcgccataaacggataccctcattcaggcgtggcagactgttattgattaaattagagctcggtgcccactgcgggttccaggtataaccacctccgagcaccacgatatagtccactttttgcgaattattccatgtcggataggtgctttcgatgggacgcagcaggcggtcggctaccggttgcaaactcaataacaagagtgccagccacccaatgctaataaaaatcttcccggttttttgaaaacggctaaaccacagtagcgccaggccagcgccaataattaacaacatcagcggaagtggcagcaacatattgccaatcacttttttcagtgtaaaaagcatcctttctggttccttttttaaccatatagcaagggatcgccagcgatattacaccagacgggttcattctcgccgtggctgtgacaaaatagcgtctttatcagaaaacgtcttagccaaccggtggagaaagcaatgcaggatcgcaattttgatgatattgcggaaaagttttcccgtaacatttacggcaccaccaaagggcagcttcgacaggctattctgtggcaggatctcgatcgcgtgctggcggaaatgggtccgcaaaaactgcgtgtgctggatgcgggcggtggagaagggcagaccgcaatcaaaatggccgagcgcgggcatcaggtcattttatgcgatctttctgcgcagatgatcgaccgcgcaaaacaggcggcagaagcaaaaggtgtgagcgacaacatgcaatttatacattgcgccgctcaggatgttgcttcgcatttggaaacgcccgttgatctgatattgttccatgcggtgctcgagtgggtggctgatccccgcagcgtattgcagaccctgtggtcagtgttgcgtccaggcggcgtgttgtcgttaatgttctacaatgcgcatggtttgttgatgcataacatggtcgccggnaattttgattacgtgcaggcgggaatgccgaaaaagaaaaaacggacgctttcgccagattatccacgcgacccgacgcaggtttatctgtggctggaagaagctggttggcaaattatgggtaagacaggcgttcgcgtgtttcatgattatctgcgcgagaagcaccagcagcgcgactgctatgaagcattacttgaattagaaacgcgttattgccgtcaggaaccgtatattaccctggggcgttatattcatgtcaccgcgcgcaaaccgcagagcaaggataaagtatgagtgaattttcccagacagtccccgaactggttgcctgggccagaaaaaatgacttctccatttcgctaccggtagaccgactctcttttctgctggcagttgccacgctgaacggcgagcgtctggatggtgagatgagtgaaggcgagctggtggatgcattccgccatgtgagtgatgcgtttgagcaaaccagcgaaaccatcggcgtgcgcgccaacaacgcgatcaacgacatggtgcgtcnacgtctgctgaaccgctttaccagcgagcaggcagaagggaacgcaatttaccgtctgacgccgctcggcatcggcattactgactattacatccgtcagcgcgagttttctacgctgcgcctttctatgcagttgtcgattgtggcgggtgagctcaaacgcgcagcagatgccgccgaaganggcggtgatgaatttcactggcaccgtaatgtctatgcgccactgaaatattcggtagcagaaattttcgacagtatcgacctgacgcaacgtctgatggacgaacagcagcagcaggtgaaggacgatatcgcccagttgctgaacaaagactggcgggcggcgatttccagctgtgaattgttgctttcggaaacttccggaacgctgcgtgaattgcaggatacactggaagcggcaggcgacaaattgcaggctaatctgttgcgcattcaggatgcgacgatgactcatgacgatctgcatttcgtcgatcgtctggtgttcgatctgcagagcaaantcgaccgtattatcagttggggccagcaatccatcgatttgtggattggctacgaccgccacgtacataaatttattcgtaccgcgatcgatatggataaaaaccgcgtctttgctcagcggttacgtcagtcggtacaaacctattttgatgagccgtgggcgctaagttatgccaatgccgatcgtctgctggatatgcgtgacgaagagatggcactgcgcgatgaagaagtgactggggaacttccgccagatttggaatacgaagagtttaacgagatccgcgaacagctggcggcgatcatcgaagaacaacttgccgtgtacaaaaccagacaagtgccgctggatcttggtctggtggtacgcgaatatctgtcacagtatccgcgtgcacgtcactttgacgttgcgcgcattgttattgatcaggcggtacgtcttggcgtagcgcaagcagatttcaccggactgccagcgaaatggcagccgattaatgattacggagccaaggtacaggcgcatgtcatcgacaaatattgaacaagtgatgccggttaagctggcgcaggcgctggcgaatccgttatttccggcgctggacagcgccttacgttcaggccgccatattggcctcgacgaactggataatcatgcattcctgatggattttcaggaatatctggaagagttttacgcgcgttataacgttgagcttattcgtgcaccggaagggttcttctatttacgtccacgttccaccacgctgatccctcgttccgtcttgtcggaactggatatgatggtcgggaaaatcctctgttatctctatctcagcccggaacggctggcgaatgaggggattttcacccagcaggaactgtacgacgaactgctcaccctggccgatgaagcgaaactgctgaaactggtgaacaaccgttcaaccggttcagacattgaccgtcagaagttgcaggaaaaagtacgttcttcgctcaaccgtctgcgtcgtttaggtatggtgtggtttatgggccacgacagcagcaagttccgcattaccgaatcggtgttccgcttcggagccgatgtgcgtgctggcgacgatccccgtgaagcacagcgtcgcctgattcgtgatggcgaagcaatgccgattgaaaatcatctgcaactcaacgatgaaaccgaagagaatcagccagatagcggagaggaagaataatgattgaacgcggtaaatttcgctcactgacgctgattaactggaacggcttctttgcccgaacttttgaccttgacgagctggtcacgacgctttctggcggtaacggggcgggtaaatccaccaccatggcggcgttcgttacggcgctgatccccgacctgaccctgctgcatttccgtaacactacggaagccggggccaccagcggttcgcgcgataaaggtctgcacggtaagctgaaagcgggtgtctgttattcgatgctcgacaccattaactcgcgccaccagcgcgtggtggtcggtgtgcgtctgcaacaggttgccggacgcgatcgtaaagtggatatcaaaccatttgccattcagggactgccgatgtcggtgcagccgacacagctggtgaccgaaactctgaacgaacgccaggcgcgcgtgctgccgcttaacgagctgaaagacaagctcgaggcgatggaaggcgtgcagtttaaacagttcaactccattaccgattaccactcgctgatgttcgatctgggcatcattgcgcgtcgtctgcgctccgcatctgaccgtagcaaattctatcgtctgatcgaagcttcgctgtatggcgggatctccagtgccattacccgttctctgcgcgactacctgttgccggaaaacagcggcgtgcgtnaagcgttccaggacatggaagcggcgctgcgtgaaaaccgcatgacgctggaagcgattcgtgtcacccagtcggaccgtgacctgtttaagcatctgatcagcgaagctaccaactacgtggcggcggactacatgcgtcacgccaacgagcgccgtgtccatctcgataaggccctggagtttcgtcgcgaactacatacttcgcgtcagcaactggcggcggagcagtacaaacacgtcgatatggcgcgtgagctggcagagcacaacggtgccgaaggcgatctggaagcggattatcaggcggccagcgatcacctgaacctggtgcaaaccgcactgcgtcagcaggagaagatcgaacgctacgaagcggatctcgatgagctgcagatccgtctggaagagcaaaacgaagtggtggcagaagccatcgaacgccaggaagagaacgaggctcgcgcggaagctgccgaactggaagtggacgagctgaaaagccagcttgctgactaccagcaggcgctggacgtccannaaangcgcgcgatccagtacaaccaggcgattgctgcgcttaatcgtgccaaagaactgtgccatctgccggacttaaccgccgacagcgccgccgaatggctggaaaccttccaggcgaaagagctggaagcgactgaaaaaatgctctctcttgagcagaaaatgagcatggcgcaaaccgcgcacagccagtttgagcaggcttatcagctggtggtggcaatcaacggcccgctggcgcgtaacgaggcgtgggatgtcgctcgcgaactattgcgcgaaggggtcgatcagcgtcacctggcagagcaggttcagccgttgcggatgcgcttaagcgaactggaacagcgtctgcgcgaacagcaagaagctgagcgtctgctggcagatttctgcaaacgtcagggcaagaattttgacattgacgagctggaagccctgcatcaggagctggaagcacgcattgcctctctttccgatagcgtgtctaacgcccgtgaagagcggatggcactgcgccaggagcaggaacagctgcagtctcgcattcagagtttgatgcagcgtgcaccggtttggctggcagcgcaaaacagtctcaaccagttgagcgaacagtgcggcgaagagttcacctccagccaggacgtcactgaatatctgcaacagttgctggagcgtgagcgcgaggccattgttgaacgcgatgaagtaggcgcgcgcaaaaacgccgtcgatgaagagatcgaacgtttaagccagcctggcggctctgaagatcagcgtctgaacgcgctagcggagcgttttggtggtgtgctgctgtcagaaatttatgacgacgttagcctggaagatgcgccgtacttctcagcgctgtatggcccgtcacgccacgccatcgtggtgccagatctgtcacaggtaaccgaacacctggaaggtttgaccgattgcccggaagatctctatttgatcgaaggggatccgcagtcattcgatgacagcgtgttcagcgttgatgagctggaaaaagcggtagtggtgaaaatcgccgatcgtcagtggcgttattcacgtttcccggaagtgccgctgtttggtcgtgctgcgcgtgaaagccgtattgaaagcctccatgccgagcgtgaagtgctttccgaacgcttcgccacgctctcctttgatgtacagaaaacccagcgtctgcatcaggcgttcagccgctttatcggcagtcatctggcggtggcgtttgagtctgacccggaagcagaaatccgtcaactgaacagccgtcgcgtcgaactggagcgggcgttgagtaatcatgaaaatgataaccagcagcagcgtattcagtttgagcaggcgaaagaaggcgttacggcgctgaaccgcattctgccgcgtctcaacctgttggctgatgacagcctggcggatcgcgtcgatgaaatccgcgaacgtctggatgaagcccaggaagccgcgcgttttgttcagcagtttggcaatcaactggcgaaactggaaccgatcgtttcggtattgcagagcgacccggaacagttcgaacagttaaaagaagattacgcgtactctcagcagatgcagcgcgatgcccgtcagcaggcgtttgccctgacggaagtggtgcagcgtcgtgcgcactttagctactctgactcggcagaaatgcttagcggtaacagcgatctcaacgaaaaactgcgtgaacgtctggaacaggcggaagcggagcgtacccgcgctcgcgaagcgttgngcggtcacgcagcgcagttgagtcagtacaaccaggtgctggcttcgctgaaaagttcttacgacaccaaaaaagagctactcaacgatctgcaacgtgaattgcaggatatcggcgtgcgtgctgatagcggggcagaagagcgggcacgtattcgccgtgacgagctgcatgcacaactgagcaataaccgttcgcgccgcaatcaactggaaaaagcgctcaccttctgcgaagcggagatggacaacctgacccgcaaactgcgcaagctggagcgtgattactttgagatgcgcgagcaggtagtgaccgcgaaagcgggctggtgtgcagtcatgcgcatggtgaaagataacggcgttgagcgccgcttacaccgtcgtgagctggcttatctctccgctgatgatttgcgttccatgtcggataaggcgttaggtgcgctgcgtctggcggtggcggataacgaacatctgcgcgacgtgctgcgcatgtcggaagatcccaaacgtccggagcgtaaaattcagttcttcgtggcggtttatcagcatctgcgtgaacgtattcgtcaggatattattcgtaccgatgatccggtggaagctatcgaacagatggagatcgaacttagccgtctgaccgaagagttaacctcccgtgaacagaaactggcgatcagttcccgcagcgtggcgaacatcattcgcaaaaccattcagcgcgagcagaaccgtatccgtatgctcaaccaggggttgcagaacgtatcgtttggtcaggtgaacagcgtgcgcctcaacgtgaacgtgcgtgaaacgcacgccatgctgctggatgtgctctctgaacagcatgagcagcatcaggatctgtttaacagcaaccgtctgaccttctcggaagcgctggcgaaattgtatcagcgtcttaatccgcagattgatatggggcagcgcacgccgcagaccattggcgaagaactgctggattaccgcaactatctggaaatggaagttgaggttaaccgtggttccgatggctggttgcgcgcagagtctggtgcattgtcgaccggtgaggcgattggtaccggtatgtcgattctggtgatggtggtacaaagctgggaagatgaatctcgccgcctgcgcggtaaagatatctctccttgccgcctgctgttcctcgatgaagcagcgcgactggatgctcgttctatcgccacgctgtttgaattgtgtgagcgtttgcaaatgcagctcatcatcgcagcgccggaaaatatcagcccggagaaaggcaccacctataaactggtgcgtaaagtcttccagaataccgaacatgttcatgtcgtcggcctgcgaggatttgcgccgcaactccctgaaacgcttccaggaagtgacgaagcgccttctcaggcgagttaaaattaaggcggcagcaatgccgccttttctttttccgaaaactccgtttctgcactaaaaaagtggcacattacggcgcgcttttctttaaacttctttacattaggttatgtaaaaacgtatcggcgtttatatactgaagataagcctgatgagtaacaggcttgctcgtcatactttcgtgagtattggcgttgtacaggcaagtcgtaaaataacagcctggctattcagagtatgataaaaacagggggcaagggatgttgcttaatatgatgtgtggtcgtcggctgtcggcaatcagtttgtgcctggccgtaacattcgctccactgttcaatgcgcaggccgatgagcctgaagtaatccctggcgacagcccggtggctgtcagtgaacagggcgaggcactgccgcaggcgcaagccacggcaataatggcggggatcctgccattgcctgaaggtgcggcagaaaaagcccgcacgcaaatcgaatctcaattacccgcaggttacaagccggtttatcttaaccagcttcaactgttgtatgccgcacgcgatatgcaacccatgtgggaaaaccgtgatgctgttaaagccttccagcaacagctggcagaggtggcgattgccggtttccagccgcagtttaataaatgggtagagttactgaccgatcctggtgttaacgggatggcacgcgacgtggtgctctctgatgcgatgatgggctatctccatttcattgcaaatattccggtcaaaggcactcgctggctatatagcagtaaaccttatgcgcttgcaacgccgccgctttcggtgattaaccaatggcagcaggcgctggataaaggtcaattgcctacgtttgttgcaggactggcaccgcagcatccgcaatatgcggcgatgcatgaatcgttactggccttactcagtgacaccaaaccgtggccccaactgaccggcaaagcaacgttgcgcccagggcagtggagtaacgacgtaccggcgttgcgtgaaatattgcaacgcacaggcatgttggacggggggccgaaaattactctacctggcgatgacacgccaactgacgcggtagtcagcccatccgctgttactgttgaaacagcagaaactaagccgatggataagcaaacgacgtctcgtagtaaacctgcgcctgccgttcgcgccgcctacgataatgaactggtggaagccgttaaacgttttcaggcatggcaaggattgggggcagatggtgctattggcccggcaacgcgtgactggttaaacgtaacgcccgcccagcgtgctggcgtgttggctctcaacatccagcgattgcgcttgctgccaacagagctttctaccgggatcatggttaacattccggcctattcgctggtntactatcagaacggcaatcaggtgctggattcgcgagtcattgtcggtcgccccgatcgcaaaacgccgatgatgagcagtgcccttaacaatgtagtggtaaacccgccgtggaacgtacctccaactctggcacgcaaagatattctgccgaaagtgcgcaacgatccgggatatctcgaaagccatggctatacggtgatgcgcggctggaacagcagagaagcgattgacccatggcaggttgactggtctacaatcacggcctcgaatttaccgtttcgcttccaacaggctccaggcccacggaactcgctggggcgctataaattcaatatgccgagttcagaggccatttatttgcatgacacgccgaaccacaatctgttcaagcgtgatacacgcgcattgagctcaggctgtgtacgagtgaataaagcttccgatctggcgaatatgctgttgcaggatgcaggctggaatgacaaacgtatttctgatgcgctgaagcagggtgatacacgttacgtcaatattcggcagtcgattccggtgaatctctactacctgacggcctttgttggtgcagatggtcgtacccagtatcgtacagatatttacaattatgatctgcctgcgcgatccagctcgcaaatcgtatcgaaagcggaacaattaatcaggtaaatgaagtagttcggggaaatcagttgtcgtaataattagcatgattgggggcaattctctgcagcccccgtcactgctggggttgagtcatcttgacgtctgctttacgggcggttaaggtgcctcttgtgcgccagaagtgcatataaacgataacattgacctgtagacttgattatcatggacaaattcgacgctaatcgccgcaaattgctggcgcttggtggcgttgcantcggtgccgccatcctgccgacccctgcgtttgcaacactctctaccccacgcccgcgcattttgacactcaataatcttcataccggagagtcaatcaaagcggagtttttcgatggcagaggctatattcaggaagaattggcaaaacttaaccattttttccgcgattaccgcgcgaacaaaataaagtccatcgacccaggattattcgaccagttgtatcgcctgcaagggttattaggcacccgcaaaccggtgcaactcatttccggttatcgttccattgataccaacaatgaactacgcgcccgcagccgtggagtagcgaagaaaagctatcacactaaaggccaggcgatggatttccatattgaaggtatcgcgttaagcaatattcgcaaagccgcgttatctatgcgcgcaggtggtgtaggatattacccacgtagtaactttgtgcatattgataccgggccagcacggcactggtagtaattgcttaacgaaacaggggcagtatgaactatcgtattattccggtcaccgcattctcccagaactgttcattgatctggtgtgaacaaacccgcctggccgcactggtcgatcctggcggcgatgcggaaaaaatcaaacaggaagttgacgccagcggcctgacactgatgcagatcctgctgacgcatggtcatctggaccacgttggcgcagcggcggaactggcgcaacattacggcgtgccggtttttggcccggaaaaagaagatgagttctggctgcaaggcttgcctgcgcaaagtcgtatgtttggtctggaagagtgccagccgctgacgccagatcgttggctgaacgaaggcgataccatcagcatagggaatgtgactttacaggtgttacattgccctgggcatacgccgggtcatgtcgtgttttttgatgatcgggcaaagctgctgatttctggcgatgttattttcaaaggcggagtagggcgcagtgacttcccgcgtggcgatcataatcaactgatttcttcaatcaaagataaattgctgccactgggtgatgacgtgacatttattccgggtcacggaccattatccacacttggttatgaacgcctgcataatcccttcctgcaagacgaaatgcccgtctggtaaggcacacataaaaaagcccgcttttcagcgggcttcattgtttttaacgcttacagcactgccacaatcgcttcgcacagcggagccatgttatctggtgtcatcccggccacgtttacgcgaccagaagcaacagcatacacgccaaactcttcgcgcagacgcagcacttgttcttttgtcaggccactgaaggagaacatgccgttctgtttgatgataaagctgaagtcgcggtttgcgcctttttcctgcagcgtattgacgaacaactgacgcatacgctgaatacgctggcgcatatcagtcagctcttgttcccaaatcgcacgtaacgcatcgttgctcaggatggtggcaacaacagaagcgccgtgtgctggtgggttagagtagttagcgcgaatcgccgctttcatttggctgaatgcgcgatcaacggtttcactgtcggcagcaaccagagtacaagcgccaacacgctcgttgtacaggccaaagtttttagagtaggaactggcaacaatcagctctttatgcatagccgcgaaagcgcgcagtccttcagcatcttcttccagaccacgggcaaaaccctggtaagcgaagtcaaacagcggtaaccagcctttctcaacggagagttgtgccagtgtctgccattgttccagcgtagggtcgataccggttgggttgtggcagcagccatggaacagcactacgtcgccagcctgagcttcgttcaggctgttaatcagtgcatcgaagtcaagggtgtggttttccgcatcataataagcgtattcacgaacttccagatctgcagagttaaagacgctcttatggttcggccagcttgggttgctcacccacactcgcttaacgctggtattttttgccaggaaatcggcagctatgcgtagtgcgccagtgccacccggagtctgtgccgtgcgagcacgtttgtcattgatcagggcgctacctttaccaaacagcagttcctgagtgcagcgaccaaattcagggatgccgtcaatgccgaggtaatttttggtggtttcattttcgagcagatactgttcagcctttttcacgctggtcagtaccggggttttgcccgtctcatctttatagacaccaatcccgaggttaattttgccgggacgttcatcggcacgaaacagatcggccaggcccagaatcgggtcggcaggagcggcggtaatgttctcaaacatgacgaggttccattatggttacagaagggaagtccgctatcagggtaacgggagatttacaaaattccaactattactgatgaaaacgcaggctgtttttgcaagacgtgagattgctctggaaggcataaaaaaaacaggaccaaagtcctgttttttcggcatttaacaaagaggtgtgctattagaactggtaaacgatacccacagcaacggtgtcgtctgaacctacgcccagtttgttgtcagaatcgatctggttgatgatgtagtcaacataggtggacatgtttttgttgaagtagtaggttgcgcccacttcaaagtagttcaccagatcaacatcaccgataccttctacgtctttcgctttagatttggtgtaagcgatggacggacgcagaccgaaatcgaactggtattgcgcaactaacagaacgtcttgcgttttgttggcgaagccgctgatgtttgtaaatttattagtgatcggcgtagcgttacgcgtttcaccgtagttcgctgccaggtagatgttgttcgcatcatacttcagaccagtagcccactgttcagcttttttaccgttgccaagaagttgagcttcttgcaggttggtacggtcagctgcaccataagcaccaacgataccaaagccttcgtattcgtagctgataganccgccaacaccgtcgccgttagagcggcgtgcagtgtcacgctcgtttttacccaggtactgaacagcgaagttcaggccatcaaccagaccaaagaagttggagttacgataggtagcaacgccgccaacacgaccaacgaagaagtcatcgctgtatgcagtatcaccaccaaattctggcagcatatcggtgtaacccagtgcatcataaaccacaccgtagttacggccgtaatcgaaagaaccaacgtcagcgtatttaagacccgcgaatgccagacgcgttttgttaccagtttgagcgtcagcgccttcagagttgttaccctggaagttatattcccactgaccataaccggtcagatcggaattgatttgagtttcccctttaaaaccaagacgggcataggtcatgtcgccattgccaccgtaactgttttcaccgttacccttggagaaataatgcagaccgacagctttaccgtacagatctactttgttgccatctttgttatagatttctgcagcgtttgcagtacctgctactaacagagcagggacgatcactgccagaatattgcgcttcatcattatttattaccctcatggttttttttatgacacctgccactgccgtcaataatttctgtcaataaaattttacggaactattgatgagagtttggtgtctttatgtgtctgcaggcatctttccattcaaactaacgtttcgctaccgtgaaagtgctacaaagataaagatttagtttcaaaaagaaaaaatatgtaactaaaagtaaaaattaaggaactttgtgaacaccgtcatatttccatagaggcgtgatgatatttacagcaatttttatctatttatatgatttccttatatttaaattaactaaacggaaattttgtttctgatggaaactttatcgacctggcccaaaatcctctttcagacatccagaatgccaaaaaaatagtatgaaaattgtgctatcagctaagaaaaaactaatccgcaataagaatgcgggttattttttgtgcgtaaatgttgcaatgtaatattccgtaacaggatgatcgttatggcggggttgcaaatagattgattgacttaacaaacagataacttgacagaaaggataaaaaagagccagcgggtgctggctcttgtagacgctaaattagaagctggcgttacgcggagttcgtgggaacggaatcacatcacgcacgttttgcacaccagttacgtaagcaatcaggcgttcaaaaccaagaccgaaaccggaatgcggaacagtaccgtagcgacgcagatcgcgataccaccagtaatcttctttgttcaggcccatttccagcatacgctcgtccagcacgtccagacgctcttcacgctgggagccaccaatgatctcaccgatgcccggagccagaacatccatagccgcaacggttttaccgtcttcgttgaggcgcatatagaacgctttaatatctttcggatagtttttaaccactaccggtgctttaaagtgttcttccgccagataacgctcatgctcagaagagagatcgacgccccagtaaaccgggttttcaaacttcctgccgcagttttcgagaatggttactgcttcggtgtaatccacctgcgcgaaatcggcctcaataaagcgttccagacgagaaacggcatctttatctacgcgttcagcgaagaatttcatgtcgtcagcgcgttcttcgagaaccgctttgaagacatatttcagcatggcttcagccagacccgcgatatcgttcaggttagcaaacgccacttccggctccagcatccagaattccgccaggtgacggctggtgttggagttttcagcacggaaagtcgggccgaaggtataaattttggataatgcgcaagcgtaggtttcgccgttcaactggccagatacggtcaggaaagactctttaccaaagaagtctttgtcgaaatccactttgccctgatcgttacgcggcagattttccagatccagcgtagaaacgcggaacatttcgccagccccttcggtatcagacgcagtaatcagtggcgttgaaacccagaagaatccctgctcgttaaagaagcgatgcagcgcctgcgccagcgtatggcgaacgcgcgcgacggcaccaatcaggtttgtgcgcggacgcaggtgagcgacttcacgcagatactcaatgctgtggcgttttgccgccatcgggtaagtgtctggatcttcaacccaaccagcaacttcaaccttgctggtctgaatttcaaattgttgcccctggcccggcgacgccacgactttacccgtcacaatgaccgagcagccggtggtcagacgcaggacgtcttcattgtaattgggcagagaattattgatgacagcctgtacaggatcaaagcaggaaccgtcataaacggcgaggaaggagatgccagcttttgaatctcggcgggtacgtacccatccgcgtacggtgacttcgctgtcaacggctacgcggccctggagtacgtcggctacaggcacaacgctcataatattctctctgttaatagtcggaaaaaataaacacttgtccacccgtaaatggggggatacctatgttacctggcatctgcaatcagacaagcagaattcgcaaatgcagcgaaagatttcggaattaaaggtaaaaaaagggagccgattagctccctgatgatattaactggcttttttantatgcggaaggtcgaacgctttgcgcagcgcccgaacaaacgctttatcatggcagatagttttgccagggctgtcagaaagtttcgccaccggtttaccgttacactctaccaacttaatcacaatattcagggggtttacctgggggatatcgcaggtcaggcgagtcccaataccaaaacttaattgcacgcgggaagagaagtggcggtatagctcaaccgctttgcgtaaatccagattgtcagagaaaaccagcgttttactctgtggatcaatttccagcttttcataatgtgcaatggctttttcaccccattcaaccgggtcgccagagtcatgacgcaggccctgataccgactagcgaactcgacaccgaaatcacgcaggaaagcatccatagtgatgcagtcggttaatgcaatgccaagttggtcgggatactcttccagccaggcagcaagtgcagctcgctggctgttggctagatccgggctgatttgctgatgtgcctggaaccattcgtgtgcctgtgttcccatcggcgtgagggaaagccgacgcgccagatcgtagttgctggtgcccacgaaccaggattcctgttgcagacgcttaacgatggtttcttgtacttcgcgagaaaaacggcgacgggtgccaaaatccatcagatggaagcgcgacatatcaagaccagcggttaacgccgagaagtcgactaatttgctttccagcgtgtcgagggcttgcgcaacgtcggcctgcggtgagcgatagcgatgtaccatttcactgataaccgccagcaaaggaacttcccagaggatgacttcacgccacgggccgcttaaacgaatatccagcttgccattatcgttggacacggtgacttgttccgggttaaagcggaactcgcgtaaccagttaagatagtcggccttaaagaaaggcagggcagaaagccactgatattcatcatcctgcaggcgcaggtgctgcatcgcctgaacctgttcacgaatagcatcggcataaatacccagcagatcgtcacctcggcaacgaaactccgccgcgacatgcacatcgtaataatgatgaaacacggcttgctgcatatgcaacttataagcatctgtatccagcaacgagtgcagaacaggagaagcgaattgtgtcataggtgcgcagtagcgtcctcgtacaggagcgtttagtacaataaacatcttcaggaactgctggagtataccttgtttcgcaatttattgaaccccgatcacaccatatgccacctttctggtcgatggcattacgcggtgtatgttataaaaatgtagcaataaaggcgtttgtacctgaaaagatgaagattctgcatagcgcgatttacgcaacaggaatagactgaacaccagactctataaaagatgctaaaggttatttatgactcaacagccacaagccaaataccgtcacgattatcgtgcgccggattaccagattactgatattgacttgacctttgacctcgacgcgcaaaagacggtcgttaccgcggtcagccaggctgtccgtcatggtgcatcagatgctccgctttgtctcaacggcgaagacctcaaactggtttctgttcatattaatgatgagccgtggaccgcctggaaagaagaagagggcgcactggtcatcagtaatttgccggagcgttttacgcttaagatcattaatgaaataagcccggcggcgaatacggcgctggaagggctttatcagtcaggcgatgcgctttgcacccagtgtgaagccgaaggtttccgccatattacgtattatctcgaccgcccggacgtgctggcgcgttttaccaccaaaattattgccgataaaaccaaatatcccttcctgctttccaacggtaaccgcgttgcgcaaggcgaactggaaaacggacgccattgggtacagtggcaggacccgttcccgaaaccgtgctacctgtttgcgctggtggcaggcgactttgatgtactgcgcgatacctttaccacgcgttctggtcgcgaagtagcactggagctgtacgtcgatcgcggcaaccttgatcgcgcgccgtgggcgatgacctcgctgaaaaactccatgaaatgggatgaagaacgctttggcctggagtatgacctcgacatctatatgatcgtcgcggtggatttcttcaatatgggcgcaatggagaataagggtctgaatatctttaactccaaatatgtgctggcccgcaccgataccgccaccgacaaagattacctcgatattgaacgcgttatcggccatgaatatttccataactggaccggtaaccgagtgacctgccgcgactggttccagctcagcctgaaagaaggtttaaccgtcttccgcgatcaggaattcagctctgaccttggttcccgcgcggtaaaccgtatcaataatgtgcgcaccatgcgcggattgcagtttgcggaagacgccagcccgatggcgcacccaatccgcccggacatggtcattgagatgaacaatttctacaccctgaccgtttacgagaagggcgcggaagtgattcgtatgatccacantctgcttggcgaagaaaacttccagaaagggatgcagctctatttcgagcgccatgatggcagtgcagcgacctgcgacgatttcgttcaggcgatggaagatgcgtcgaatgtcgatctctcccatttccgccgttggtacagccagtccggtacgccggttgtgaccgtcaaagacgactacaatccggaaaccgagcagtacaccctgaccatcagccagcgcacgccagccacgccggatcaagcagaaaaacagccgctgcatattccgtttgccatcgaattgtatgacaacgaaggcaaagtgatcccgttgcagaaaggcggtcatccggtgaattccgtgctgaacgtcacccagtcggaacagacctttgtttttgataatgtctacttccagccggtgcctgcgctgctgtgcgaattctctgcgccagtgaaactggaatataagtggagcgatcagcaactgaccttcctgatgcgtcatgcgcgtaatgatttttcccgttgggatgcggcgcaaagtttgctggcaacctacatcaagctgaacgtcgcccgtcatcagcaagggcagccgctgtctctgccggtacatgtggctgacgctttccgcgcggtgctgctcgatgagaagattgatccggcgctggcggcagaaatcctgacgctgccttctgtcaatgaaatggctgaactgttcgatatcatcgacccgattgctattgccgaagtacgcgaagcactcactcgtactctggcgactgaactggcggatgagctactggctatttacaacgcgaattaccagagcgagtaccgtgttgagcatgaagatattgcaaaacgcactctgcgtaatgcctgcctgcgcttccttgcttttggtgaaacgcatctggctgacgtgctggtgagcaagcaataccatgaagcaaacaatatgaccgatgcgctggcagcgctttctgcggcggttgctgcacagctgccttgccgtgacgcgctgatgcaggagtacgacgacaagtggcatcaggatggtctggtgatggataaatggtttatcctgcaagccaccagcccggnggcgaatgtgctggagacggtgcgcggcctgttgcagcatcgctcatttaccatgagcaacccgaaccgcattcgttcgttgattggtgcgtttgcgggcagcaacccggcagcgttccatgccgaagatgggagcggttaccagttcctggtggaaatgcttaccgacctgaacagccgtaacccgcaggtagcttcacgcctgattgaaccgctgattcgcctgaaacgttatgatgccaaacgtcaggagaaaatgcgcgcggcgctggaacagttgaaagggctggaaaatctctctggcgatctgtacgagaagatcaccaaagcactggcttaataaatccccgaatggcggcaatagcgccgccattcggggattttacccctgttttctcaggcgagtttcagattcaccacgctgcatcacccgttgcaacacttccgcttccagctccgctaatcgcaccgaccctaaccggcgcggacggggaatatccaccgtcaaatccagaccaatttttccctcttcaattaacaacacccgatcagccattgctaccgcttcgctcacatcatgcgtcaccaacagtacggtaaaaccgtgctcctgccaaagtgacacaatcaaatcctgcatctcgagtcgcgttaaggcatccagcgcaccgagcggttcatcaagcaacaataaacccggtcgatgaatcaacgctcttgccagcgccactcgctgtttctgcccgccagaaagtgcggcaggccattccccggcgcgattctccagtcctaccgcagccaacgcccgacgcgcggcatcgcgccactggcctttaaggcctaacccaacgttatcaatcaccgatttccacggtagcagacgcgcatcctgaaacatcattcgcgtgtcttcctgaatttcagccagcggtgtggtgcccgctaacacatcgccagcggttggcgtttccagacctgccagcaggcgcagcagggtacttttgccaccaccgctgcggcccaccaccgccacaaactgacctgccggaatatgtaaatccagttggttcaggacgatattttccgcgtaatgtttgcttactgcattgagcaacaatggtgtgccctggttcagacgagcagtattcataccgtggcctccttcaaatgataagccgggttccagcgcaaccagaggcgctctaacagctgngcgctgacgtcagcaagtttgccgagcagggcgtaaagaataatagcgactaccaccacgtccgtttgcaaaaactcccgcgcattcatcgccagataaccaatgcctgaattggcagaaatggtttcggcaacaatcagcgtcagccacatcaggcccaacgcaaaacgcacgccgaccataattgagggcagggcaccaggcaggatcacatggataaacagcggtatgccggataatccatagctacgcgccatctccaccaacccgcgatcgatattacggatgccatgccaggtgttgatataaatggggaatagcgtaccgagcgccaccagaaagatttttgcggattcatcaatgccaaaccacaaaatcaccagcgggatcagcgccagatgcggcacgttgcgcaacatctgaattgaggtatccagcagcctttctccccagcgcgacagtccgctaatcagtcccaaaatcaaccccagcgagccgccaattgaaaaaccaatcagcgcccgccaggagctgatcgccagatgctgccacaattcgccgctggctgagagcgtccagaacgccatcaccaccccttccggtgagggcaaaatacgcgtcgacaaccagccaaccgaggaggccagttgccacaccgtcacgatgcccaccggtaaaaaccagggggcaacgcgcaataaccacttcttcactggcgttgccattatcttcttccttagctttgcgcgactctgcgagggataaaatcattcgccaccgcttcgccttgcggattcagcggctgcggctggggaatttccggaatggcgacatccagatgtgggaacagcaactcgccgacccgatacgcttcttccagatgcggatagcccgaaagcacaaagctgtcgatgccaagcgcggcatattcgttgattcgcgcagcgaccgtaggaccatcgcccaccagcgccgtcccggcaccgccgcgcantaagccaacgcccgcccanaaattggggctgatctccagattgtcgcgcttgccgttatgtagcgctgccattcgctgttgccccacggaatccgtgcgggcgaatgcggcttgtgctttggcgatagtctcatcatcaagatgcgagattaaccgctcggcggcctgccacgcttcgtcgttagtttcacgaacaatcacatgcagacgaatgccgaaacgaattttgcgtccatgcgcggcagctttcgcccgcacttgttcgattttctctttaaccagttccggcggttcgccccaggtgaggtagagatcaacctgttctgccgccagctcctgggcgacgtctgacgatccgccaaagtaaagcggaggatacggctgttgaatcggcgggaagagcagtttggctccccgcacatgaatatgtttaccgttgaaatcgacggtttcccccagcaataaacgccgccagacctgggtaaattccgccgaggcttcgtagcgctcactatgatcaaggaacacgccgtcgcctgccagttcttgtggatcgctgcctgtgaccaggttaaacaacgcacgtccatttgagagacggtcaagcgtggcggcctggcgggcggcaacggtaggtgaggttacgctgggacgcagggcgacaagaaacttcagccgctgcgtcaccgggatcatcgatgcggcaaccagccacgcatcttcgcaggagcgccccgttgggatcagcacaccggtatagccaagacgatccgccgcttgcgcaatttgttgcagataaccgtgatcaaccgggcgtgaaccttcttccgttcccagataatgcccgtcaccatgggtcggtaaaaaccagaacatattcagactcataattgttttccttccagttgagtgggctgccagatgcgttggcgaatatcgacttttttcggcaccagacgattttcataaaacagatctgccgtttgctgctgtaaggcggcaacctcggcgttaaccggtttgatggtggtaggagggcgatgatctaagtaagaggcaatcaccggtgccggtaagcccatcgtttttgccagtanagcgatactttgctcgcgctggctgcgggttaacgcatcggcctcactaaaggttgccagtacaccctgaataaaagcgccgttttnttctgcataggggcgagctgccagataaaacgatccggtttgattgagatcggtgccgtctttcaacacccgcacgccgccctgtaataatgcagcggagtagtagggatcccagatagcccaggcgtcaacgttaccttgctggaacgcggngcgggcatcagctggcgtcagataagtgggctggatgtcagtaaacttaagtccggcctggcgtagtgcgcgcagtaaaagattgtgtgaactggaacctttctggaacgcaactttgtggcctttaagatcggctgcggttttgatcgggctgttttctgccaccagaatcacctcggcttttggcttcggcggctcgacgcccacgtacagcaaatcagccccggcagcctgggcgaagattggcggaatatccccggtactgccgagatcaatactgccaacgtttaacgcctcaagcatttgcgggccagcggggaactccacccacgagatttttgattgcggatagcgtttttccagtaactggtggctttttgccaataccataccaatactgcctttctgatagcctatacgtaacgcttcaggcgaggattctgcagcaaccacaatcgtagagacgctaagcaatcccaccagcgccagtttaatgatgttacgcatgggcattacctcgcagagaatgaagatcaggaacctgaacatcgcggcggtgcaatgcctgccagaaagtttctagcgcggtatcaagacgggtttgtaaattcggcgtgaactggggtttgtgatggtaatcaattacttgtgagtcatcggcaaacacgccgtgcaggatctcctgggctttcagcgcacttaaaactggcttaagggcataatcgaccgccagcagatgggccaccgtaccgcccgtcgccagcggtagcaccactttgccttgcaacgcacgttctggcagcaggtcgagcagggttttcagcgcaccggaataagcggctttatacacaggcgtggcgacaatcagcccgtcagcctgttgcaactgttcggtgaaggtatggagtgccggactatcgaaacgagcataaagcagatcttccgcggcgaagttttgcagattccagtgataaacctcaacatccaggccatttagtttttcccgcgcatattccagcaaggagctggagcgagaaggaaagcgaggacnacccgccagggtgatgacacgcatactctctccttataaccaattgttcttgttttgttaacattgataacaattcgctcagtctgtcggagagacaagaaaatgccaaatataaattttgtgtatctttttctgaaaataaactaaagaaagggctttatatatcacgcatatnnatttattggatagtcattagatgttgaatcaatgaattactcgttcaggtaatatttaa

SEQ ID NO: 219 - DNA, 18169 bp, Escherichia coli
  Strain O55:H7
  modified_base (3)..(3): a, c, g or t
  modified_base (1056)..(1056): a, c, g or t
  modified_base (1059)..(1059): a, c, g or t
  modified_base (5314)..(5314): a, c, g or t
  modified_base (6177)..(6177): a, c, g or t
  modified_base (7079)..(7079): a, c, g or t
  modified_base (8890)..(8893): a, c, g or t
  modified_base (11444)..(11444): a, c, g or t
  modified_base (12717)..(12717): a, c, g or t
  modified_base (13330)..(13330): a, c, g or t
  modified_base (13393)..(13393): a, c, g or t
ctntaaattaaagatttgtcacttattggatttagtatgcttgatttaaatggcggacaattattgttattattaagtctaatgtcatttaaaggcattatcatatttacgaagagatcaggatgataacgatgaaaaaaagtgtattaacggcgtttataactgtggtatgtgcaacgtccagcgttatggctgctgatgataatgctatcacggatggctcagtaacatttaatggtaaagttattgctccagcttgtaccctggtagctgcgacgaaagattccgtggtgactttgccagatgttagtgccacgaagttgcaaaccaatggtcaggtttctggcgtgcaaactgatgtgccaattgaattaaaagattgtgatactaccgtaacaaaaaatgcaacgttcacctttaatggcactgcggatactactcagattacagcgtttgctaaccaggcctcatctgatgctgctacaaacgtggccctgcaaatgtatatgaatgatggtacaacggccatcaagccagacacagaaaccgggaacattttgttgcaagatggagatcagacgttgacttttaaagttgattatatcgctacggggaaagcgacttctggtaatgtgaatgcggtaacaaatttccatattaactattattaatagaactcattaattgttttattaattagtacccctccagtgttatggaggggatattcatattttttaagagtgactatttatgaaaacttgcataacaaagggaattgtgaccgtaagtttaacggcaatattactcagctgttcgtccacatgggcggcaggtaaaggcggggttgaacttgcagcaacacgtcttgtttattcggaaggtgaagagcaaatttcactgggtgtacgtaacaccagtccggatgttccttatctgattcagtcatgggtgatgaccccagataataaaaaatcagcggactttattattacaccaccgctatttgtgctgaatccggcaaacgagaatctgttacgcattatgtacattggngcnccgttggcgaaagacagagaaactcttttcttcactagcgtacgggcagtcccttcaacaacgaagcgggaagaaggcaataccctgaagattgccacacaaagcgtcatcaaacttttctggcgaccaaaaggtttagcgtatcccttaggcgaggctccggcgaaactgcgttgcacttcgtcagctgacatggttacggtcagtaacccaacaccttatttcattaccctgacagacctgaaaataggtggaaagttagttaaaaatcaaatgatttccccctttgataaataccaattctctctgccaaagggtgccaaaaatagcagcgtaacgtatcgaaccatcaatgactacggggcggaaacgccgcaactcaactgtaaatcgtaattcgtcttcagttaagagagcgagatgtatagaactcaccgacaacacagcctgttaagctctggtggagtgccatcgtttattggtgggctggtggtgtttgtgccggcagcgttcaatgcacaagctgaaacctggttcgatccagcctttttcaaagatgatccctcaatggtggccgatttgtctcgtttcgaaaaaggacaaaaaataacgccaggggtttatcgtgtcgatattgttctgaatcagacaattgtagatacgcgcaacgtcaattttgttgagataacgccagagaaggggattgccgcctgtttgacgactgaaagcctggatgcaatgggcgtgaatactgatgcatttccggcttttaaacaactggacaaacaagcgtgtgcgccattggcggagattattccggatgccagcgtaacttttaatgtgaataaactccgtctggaaatttcagtaccgcaaattgccatcaaaagtaatgctcgtggttatgtccccctgaacgttgggatgaagggatcaacgcgctattactgggatattcatttagcggggctaacagtattcatagcagcgcagacagtgattctggcgacagttattttctgaatttaaacagtggcgttaatttaggcccatggagattgcgcaacaattcaacatggagtcgtagtagtggccaaaccgcagaatggaagaatctcagcagctatttgcaacgggcggttattcctctgaaaggcgaactgaccgtaggtgatgattatactgcaggcgattttttcgatagtgtcagctttcgtggtgtgcagctggcgtcagatgacaacatgctgccagacagcctgaaagggtttgcgcctgtggtgcgtggtatcgccaaaagcaatgcccagataacgattaagcaaaatggttacaccatttaccaaacttatgtatcgcctggtgcttttgaaattagtgatatctattccacgtcgtcgagcggtgatttgttagttgaaatcaaagaagcggacggcagcgtcaatagctacagcgtacccttttccagcgtgccattactccagcgtcaggggcgaatcaaatacgcggtgacactggcgaaatacagaaccaatagtaatgaacagcaggagagcaaatttgcccaggccacgttgcagtggggcggaccgtggggaacgacctggtatggtggtggacaatatgctgaatattaccgtgccgccatgtttggtctgggatttaacctcggcgatttcggagcaatttcgttcgatgtgacccaggcgaagagtacgctggcagaccaaagcgaacataaaggtcagtcatatcgttttctgtatgccaaaacgctcaaccaattgggtactaactttcaattgatgggctatcgctattcgacgtcgggtttctacaccctttccgacaccatgtataaacatatggatggctacgaatttaatgacggtgatgatgaagatacgccgatgtggtcgcgttattacaatttgttttacaccaaacgtggcaaactgcaggtcaatatctcccagcaattaagcgagtacggttcgttttatttaagtggtagccagcaaacttactggcataccgatcaacaggatcggctattacagtttggctataacacgcaaattaaagatctctcgctggggatctcctggaactacagtaagtcccgtggccaacctgatgctgatcaggtgtttgcacttaatttttccctgccactcaatctgttgctctccagaagtaatgatagctataccagcaaaaaaaattacgcctggatgacctctaacaccagtatcgataacgaagggcacactacacaaaacctgggtttaacggagacactactcgatgacggtaacctgagctacagcgtgcaacagggatataacagcgaggggaaaacggctaatggcagcgccagcatggactacaaaggggcgtttgcagatgcccgagtgggctacaactacagcgataacggcagtcaacaacaactgaactacgctctttcaggcagtttagttgcccattcacagggcattaccctggggcaatcactgggggaaactaacgttctgattgcagcaccaggcgcagagaatactcgtgtggcgaacagcaccgggctgaaaactgactggcgcggatataccgttgttccttatgccacttcttatcgtgaaaatcgaatcgcacttgatgcggcgtcgttaaaacgtaacgtggatcttgaaaatgcagtagtcaacgtggttcccaccaaaggggcgttggttctggcggagttcaatgcccatgcgggagcaagggtattaatgaaaacatcaaagcagggtatatcgctgcgttttggcgcgatagcgacgctggacggcgtacagactaatagcggcataattgatgatgatggctcgctctatatggcgggtttaccggcgaagggaacaataaccgtgcgctggggcgaagctcccgatcaaatttgtcatatcagttacgagcttaccgaacaacaaattaactctgcgattacgcgaatggatgccatatgcagataatctttggagaaaaatgcgtgtcattactacgactattttttgccgccgtcttaatgctatggtgcgctcaaaccgctgcttatagcgggcagtgtcataccactcaggggaatccgtatattggcgtcaattttggcgttaaaaccctggaggaagaagaaaatacgactggggtagtaaaagacaaattttatcagtggaacgaatcgaatgattattatgtttcctgtgattgcgataaagacaatgtcagaagtggccgatgggcattcgccgcggattcaccgttagtctatttaggcgacaactggtacaaaattaatgactatcttgccgccaaagttttattgcaggttaaaggcagttctcctacagcggttcctttcgaaaacgtggggactggggcagatacccggtggcatatttgtgaccccggcggtcaacgtttaggcggccagggagctagcggtaatagcggtagcttttccctgaaaatattgcagccgttcgttggttcggtcgtcattcctcctatggcgctggcgcgattatttgaatgctacaacatacccgcaggtgattcctgcacgactacaggcacaccggttttagtgtattacctgtctggtactatcaattcacttggctcatgttccgtcaatgccggagaaacaatcgaggtcgatctgggcgacgtatttgcggctaactttcgtgttgtagggcataagcctcttggggccagaacggcagaacttgcaattccagtcaggtgtaacacgggaaacgcggggttagttaacgtcaacctgagtctgacggcaaccacagaccccagctatccccaggcgattaagacgtcacgtcctggcgtgggcgtggtggtgaccgatagccagaacaacattatttcccctgctggtggaacattaccgctctctattcctgatgatgcagacagtatcgcgcgaatgaatgtctatccagtcagcacgacaggtgtaccaccagaaatcgggcgatttgaagccacggcaacggtgagaataaattttgattaacgcgtgaacgtatgaagaaaaaaaacgatatttcagtgcgttatcttgttctttagcattcttaacatccatgtcgggatggctgggcctgaacaagttagtatgcatatttatgggaatgtggtcgatcagggctgtgatgtcgccaccaaaagtgcattacaaaatattcanattggtgattttaatatcagtgattttcaggccgcgaataccgtaagcactgctgctgatttgaatatcgatatcaccggttgtgccgctggtattactggcgcggacgtcctttttagcggcgaggctgacacccttgcgccgacactgctcaaactaactgacacaggcggaagcggtggtatggcaacggggattgccgtgcaaattcttgatgcgcaaagtcagcaagaaatcccgctcaatcaggtccagcctcttacgcctttaaaagccggggataacacactcaaatatcaacttcgttataagtccacaaaggcgggagcaacgggcggtaatgcgacggcggttctctattttgatctggtttaccagtgaaggagtgatgttgaaacggataatctggattctgttcttactgggattaacgggggggggtgagctatttgcccatgatggcacggtcaacattagcggatcgtttcgccgtaatacatgcgtgctggcacaggatagcaagcaaatcaatgtgcagttaggcgatgtctcactgacacgtttttctcatgggaattatggcccggagaaatctttcatcattaatttgcaggattgcggaacagatgtcagcacggttgacgtcaccttttcaggaacccccgacggagtgcagagcgaaatgttgtccattgaaagtggtacggatgcagccagcgggctggcaattgcgattctggatgatgcgaagatattgattccgcttaaccaggcgagtaaagactacagcctacatagcggtaaggtgccattaactttttatgcgcaattgcgacctgtcaatagcgatgtgcagtcgggtnaagtgaatgccagcgcgacatttgtacttcattatgactaatacgtggaacagattggcgctcttgattttcgccgttttatcgctgctggtggcgggtgaattgcaggcaggagtggtggtcggcggaacgcgatttatctttccggcagacagagaatcgatatctattttactgactaataccagtcaggaatcctggcttattaacagtaaaatcaaccgcccaacgcgttgggccgggggtgaagcgtcgacagtgccagcaccattactggccgctccgccacttattctcctgaagcccggtacgacaggcacgttgcgcttgctgagaacggaaagcgacatcttgcctgtggatcgcgaaacgctatttgagttaagcattgccagcgtgccatccggcaaagttgaaaatcagagcgtaaaagtggcgatgcgctcggtatttaaactgttctggcgacccgaaggttgccgggcgacccgctggaagcttatcaacaattacgctggacacggaagtcgcagggtgtacaactcactaacccaacgccttattacattaacctgattcaggtgagcgtaaatggtaaagcgttaagtaatgtgggagttgtgccgcctaaaagccagcgtcagacaagctggtgtcaggcaatagcaccgtgtcatgttgcctggcgggcgataaatgattacggcgggttgagtgcaaagaaggagcaaaatctgccctgaaacaggttcggaaaacgtttgcgttttttttgccgcaggtcaattcccttttggtccgaactcgcacataatacgcccccggtttgcacaccgggaatccaggagagttcatgtactaccccttcgttcgtaaagcccttttccagctcgatccagagngcgctcatgagtttacttttcagcaattacgccgcattaccggaacaccgtttgaagcactggtgcggcagaaagtgcctgcaaaacctgttaactgcatgggcctgacgtttaaaaatccgcttggtctggcagccggtcttgacaaagacggggagtgcattgatgcgttaggcgcgatggaatttggatcgatagagatcggtaccgtcacgccacgtccacagccaggtaatgacaagccgcgtctctttcgtctggtagatgccgaaggtttgatcaaccgtatgggctttaataatcttggcgttgataacctcgtagagaacgtaaaaaaagcccattatgacggcgtcctgggtattaacatcggcaaaaataaagatacgccagtagagcagggcaaagatgactatctgatttgtatggaaaaaatctatgcctatgcgggatatatcgccatcaatatttcatcgccaaataccccaggattacgcacactgcaatatggtgaagcgctggatgatctcttaactgcgattaaaaataaacaaaatgatttgcaagcgatgcaccataaatatgtgccgatcgcagtgaagatcgcgccggatctttctgaagaagaattgatccaggttgccgatagtttagttcgccataatattgatggcgttattgcaaccaataccacactcgatcgttctctggttcagggaatgaaaaattgcgatcaaaccggtggcttaagtggtcgtccgcttcagttaaaaagcaccgaaattattcgccgcttgtcactggaattaaacggtcgcttaccgatcatcggtgttggcggcatcgactcggttatcgctgcgcgtgaaaagattgctgcgggtgcctcactggtgcaaatttattctggttttatttttaaaggtccgccgctgattaaagaaatcgttacccatatctaattatttcttcgaattcctctttataagataatcagggctttattttcagccctggttgttttatattcattgctgttgcttatttagacattttgtacttttattgttgaggttattaagcgaagcgacaatggattgtgttgctgcggttttatagggtaggggagaggcagatgcgaattaaaccagacgataactggcgttggtattacgatgaagagcacgatcgtatgatgctcgatttagccaatggtatgctatttcgctcacgttttgcgcgcaaaatgttgactccagatgccttttctcccgcaggcttttgcgttgacgacgccgcgctctatttctcttttgaagaaaagtgccgcgattttaatttatctaaagaacaaaaagccgaactggtgctgaatgcactggtagcaattcgctatctcaaaccgcaaatgccgaaaagctggcattttgtttcccatggtgaaatgtgggtgcccatgccgggcgatgcggcctgcgtttggttgagcgacactaacgagcaagtgaatttactggtcgttgaatctggcgagaatgccgcgctatgcctgctggcacaaccctgcgttgttattgcgggtcgcgcgatgcagttgggcgacgccattaaaatcatgaacgacaggctgaaaccgcaggttaatgttgacagcttcagcctcgaacaggcagtctaacgcgccaacttaagtgcagtcttcggtacacagctacagcaaagaatggtgccatcatcgcccattgctgattttttcagcggcgtgacttcgccttctaaaagctgaacacggcaacttccacaaatgcccnnnnggcaagaataagggatacgaattccctgattttctaattgctccagcaacacctgttggttatttccacgaaatgcctgtccctgccagtcaatatctacattggcgttcggttgttgcgtgatgttggcagtatcatcagcggcagctgcgccgtaaatttttgccggagccgttgtcagaatttccacctcatcgccaacgcgaatcacgccgctattacgggcaattaaattctgaccaaaatcgacatcgccgttatcctgggcagtgcggaaagattgcaatgtttttaatggttcgcctgccggatgtttttgccctttttctgggctgacggtggtgaaaatacagcggctacaaggtttaaccacatcaaacaccacatcaccaatgcgaatcactttccaactatcttcttcccaggctgacgcgccggaaaccaccagattggggcggaattgctccatttttacactggccggacaacgttgttggagatcacgtaacgaggcttcgttagcaagaaggtaaggatagccatcagcaaatgacaggggtacagtgttgtggcgtttcacgcgccgggtcatttgtggccccacccagcgtaattgcacttcgcgggagaaaaatccacttaaccatttgttgatcgcttctggcgcaattcgcgcggtaaaatgtgtgccccaaacttcggttggtgcgtcttgtgtggcgaaatcagcaaaacgaacatatgcgctactgctatctggtgcggtgagatgcaagccatcatgcacgggtgaaggagtaaatcgtaccatctggggaaactggcgagcggtgataaacgtaccgtcaggttccgtgatcataaagatgcgatcgaaggccagaccactgacatctgccagagcatgtgtaagaccaatgccgcgcatcgatttaacaggatgaataaaaagccgggttaatgtcgccacggtgcggtcctcaaatgaaaataagccctcaactttatgacatgacgcgcttattagctataatgcgcaacaattttcttagcgcctgtcccattaggctattttatttgtcagtttggtcctgggttgtgctcgaaatcctcacgtacttgtgtacgctccggtttctccgcgctgtccatgtccagactgactgcaacaattacgcctactgcggtaggctcttagagtaaaagtgacgatatgaattctctgtttgccagtacggcccgtgggctggaagagctgttaaaaactgaactggaaaacctgggggccgttgaatgccaggtggttcagggtggggtccatttcaagggcgacacacggcttgtttaccagagcctgatgtggagccgcctggcctcgcgtattatgttgccgctgggcgagtgtaaggtttacagcgatttagacctctatctcggtgttcaggcgatcaactggacagagatgtttaatcctggcgcgaccttcgctgtccacttcagtggtttgaatgacactatccgcaacagtcagtacggcgcgatgaaagtgaaagacgcgatcgtcgatgctttcacgcggaaaaatctgccgcgtccaaatgttgatcgcgatgcgccggatatccgcgttaacgtctggctgcataaagaaaccgccagtatcgcccttgatctcagtggtgatggtttacatctgcgtggctatcgcgatcgtgctggtattgcgccgatcaaagaaaccctggcagccgctattgtgatgcgatccggctggcagccaggaacaccgttgctcgatccgatgtgtggttccggtacgttgctgattgaagcggcgatgctggcgaccgatcgcgcaccaggcttgcaccgtgggcgttggggctttagcggctgggcgcagcatgatgaagctatctggcaggaagtgaaagcggaagcgcaaactcgcgcccgtaaaggcctggctgagtatagctctcatttttacggttcggacagcgacgcacgggtgattcaacgtgcacgcactaacgcccgtcttgcggggattggtgaactgatcacctttgaggtgaaagatgtcgcgcaactgaccaatccgctgccgaaagagccgtacggcacagtgttaagcaacccgccatacggggaacgtctggacagcgaaccggcgctgattgcgctgcatagcctgctgggtcggatcatgaaaaaccagtttggtggctggaatctctctttgtttagtgcctcgccggatctgctaagctgcttgcagctgcgtgcagacaaacagtacaaggcgaaaaacggcccgctggactgcgtacagaaaaattaccacgttgccgaaagcactccagacagcaaaccggcgatggtagcggaagactacgccaaccgcctgcgtaagaacctcaaaaaattcgagaagtgggctcgtcaggaagggattgaatgttaccgcctgtatgacgccgatctgccggaatataacgttgccgttgaccgttatgccgactgggtggtggtgcaggagtatgcgccnccaaaaactattgatgcgcacaaagcgcgtcagcgtctgttcgatattatcgctgcaaccatttcggtactggggattgcgccaaacaaactggtgctgaaaacccgtgaacgtcagaagggcaaaaatcagtaccagaaactgggcgagaagggcgagtttctggaagttaccgaatataacgctcacttgtgggtgaacctgacggattatctcgatactggtctgttcctcgatcaccgtatcgcccgtcgtatgctcggccagatgagcaaaggcaaagatttcctcaacctgttctcttataccggcagcgccaccgtgcatgcgggattaggcggtgcacgcagcaccaccaccgtggatatgtcgcgtacttatctggagtgggcagaacgcaacctgcgtctgaatggcctaaccgggcgtgcgcatcgcctgattcaggccgattgcctggcgtggctgcgtgaggcaaatgaacagttcgatctgatctttatcgatccgccaaccttctctaactcaaaacgaatggaagatgcgtttgatgttcagcgcgatcatctggcgctgatgaaagatttgaaacgtctgctgcgtgcaggtgggacgatcatgttctcgaacaacaaacgtggcttccgtatggatctcgacggcctggcaaaactgggactgaaagcacaagaaattacgcaaaaaacgctctcccaggatttcgcccgtaaccgccagatccacaactgctggctgattaccgcagcctgaaaggaatagtaatgtcattaatcagtatgcatggcgcatggctgtcgttcagcgacgcgccgcttctcgataacgcagaactgcatatcgaagataacgaacgtgtttgtctggtgggccgcaacggcgcaggcaaatcgacgttaatgaaaatcctcaaccgtgaacaagggctggatgacggtcgcattatttacgagcaggatttgattgtagcgcgtctgcaacaggatccgccgcgtaacgttgagggtagtgtttatgatttcgttgccgaaggcattgaagaacaagcggaatacctgaaacgctatcacgatatttcgcgcctggtgatgaacgacccgagcgagaaaaatctcaacgaactggcgaaggttcaggaacagctggatcaccacaacctgtggcagctggaaaaccgcatcaacgaagtgctggcgcaactggggttagatcctaacgttgcgctgtcgtcgctttccggcggctggttgcgtanagcggcattaggacgcgcgctggtgagcaatccgcgcgtattgctgctggacgaaccgactaaccacctggatatcgaaaccatcgactggctggaagggttcctcaaaaccttcaatgggacgattattttcatctcccacgaccgttcgtttatccgcaatatggcgacgcgcattgttgatctcgatcgcggcaagctggtgacctatccgggcaattacgatcagtacctgctggaaaaagaagaagccctgcgcgtggaagaactacaaaatgccgagttcgatcgcaaactggcgcaggaagaagtgtggattcgccaggggatcaaagcacgccgtacccgtaatgaaggccgcgtacgcgccctgaaagcgatgcgtcgcgagcgtggcgaacgtcgcgaagtgatgggtaccgcaaagatgcaggtggaagaggccagccgctccggtaagatcgttttcgaaatggaagacgtttgctaccaggttgacggaaagcaactggtgaaagatttttctgcccaggttctacgtggcgacaaaattgccctgattgggccgaatggctgcggcaaaaccacgctgctgaaactgatgctcggtcancttcaagcggacagcgggcgtattcacgttggcaccaaactggaagtggcttatttcgatcancaccgcgcggaactggatcccgataaaacggtgatggataaccttgccgaaggtaagcaagaggtgatggttaacggcaagccacgccacgttttgggctatttgcaggacttcctgttccatccgaaacgggcgatgacgccagtacgtgcgctttctggcggtgagcggaaccgcttgctgctggcgcgtttgttcctcaaaccaagcaacttattgattcttgacgaaccgaccaacgatcttgatgtcgaaacgctggaactgctggaagaactgatcgacagctaccagggcacggtattgctggtaagccacgatcgtcagtttgtcgataacaccgttacagaatgctggatcttcgaaggcggcggtaaaattggtcgttatgtcggcggttatcatgatgcccgtggtcagcaagagcagtatgtggcgctcaaacagcctgcggtgaaaaaaaacgaagaacccgccgcgccaaaagcagaaactgtaaaacgcagcagtagcaaactaagctataaattgcagcgcgaactggagcagctaccgcaattgctcgaagatctggaggcgaagctggaagccctacagacgcaggtggcggatgcttccttcttcagtcagccgcatgagcagacacaaaaagtgctcgccgatatggctgctgcagagcaggagctggagcaagcctttgaacgctgggagtatcttgaagcgttaaaaaatggtggctgatcgcaaaatagtcgatttaaacagagacagctgacaacggtaaaattgcctgatgaactgggtttatcaggcatgaaaacaaacactttgttagtcatctgtaaaatagcgcatcattaaggagtaccaatgtgcgaacatcatcatgccgcgaagcacatcctatgctcgcagtgtgacatgctggtggcgttaccgcgccttgagcatggtcagaaagcggcatgtccccggtgtggcacaacgttaaccgtggcgtgggatgccccccggcagcgtccgaccgcctatgcgttggctgcactgttcatgctgttgctgtccaacttgtttccttttgtgaatatgaacgttgcaggagttaccagtgaaattacattactggaaattcccggcgtgcttttttctgaggactacgccagcctcggcacctttttcctgttgtttgtgcaactggttcccgcgttttgtctgataaccattctgttactggtgaatcgcgcggaattaccggtccgtttaaaagagcaactggcacgggtgctttttcaactcaaaacctggggaatggcggagattttcctcgcgggtgtgctggtcagtttcgttaaactgatggcttacggcagcattggcgtaggcagcagctttctcccctggtgtttattttgtgtcctgcaactgcgcgcttttcagtgcgttgatcgtcgctggttatgggacgatatcgccccgatgccagaactgcgccagccgctaaaaccaggcgtcacggggatacgtcaggggctgcgttcgtgctcctgttgtacggcaatccttcctgctgatgaacccgtgtgcccgcgctgtggtactaaagggtacgttcgacgtagaaacagcctgcaatggacactcgcgctgcttgttacgtccatcatgctgtatcttccggctaatattttgcccatcatggtgacggatttattaggctcgaagatgccatcgacgattctcgctggggtcatcctgttatggagcgaaggctcttatcccgtcgctgcggtgatctttctggccagtattatggtgccaacgttaaagatgatcgccatcgcgtggctgtgttgggatgccaaagggcatggcaagcgcgacagtgaaagaatgcatttgatttatgaagttgttgagtttgtaggccgctggtcgatgattgacgttttcgttatcgcggtgctctcggcgctggtgcgtatgggaggtttaatgagtatttatccggcaatgggtgcattaatgtttgctttagtcgtcataatgacaatgttttctgctatgacgtttgacccgcgtttgtcgtgggatcgtcaacctgaatcagagcatgaggagtcctgacagtatggaatctaataatggggaagccaaaatccagaaagtgaagaactggtctcccgtgtggatatttcctatcgtcacggcgctcattggggcctgggttcttttttatcattacagccatcagggaccggaagtgaccctgatcaccgcgaatgcggaaggaattgaaggtggcaaaaccaccattaaaagccgtagcgttgacgtcggcgtggttgaaagcgccacactggctgatgatttgacacacgttgaaatcaaagcgcggctgaattccggtatggaaaaattgctgcataaagataccgtcttttgggtggtgaaaccgcagattggtcgagaagggattagcggtctgggaaccctgctgtctggggtttatatcgaactgcagccaggcgcgaaaggcagcaaaatggataaatacgatttgctggactcgccaccgttggccccgcctgatgcgaaaggtatccgtgtgattctcgatagcaaaaaagccgggcagctctcgccaggagatccggtgctgttccgtggctatcgggtaggttcggttgaaaccagcaccttcgatacgcaaaaacgcaatatcagttatcaactgttcatcaatgcaccttatgaccgactggtgaccagcaatgttcgcttctggaaagatagtggcattgcggttgatctgacgtcagcgggaatgcgtgtggagatgggctcattgacaacgctgctgagtggcggtgtcagctttgatgtgccggaaggtctggatttagggcagccagtggcaccgaaaacagctttcgttttgtatgatgatcagaagagcattcaggattcgttgtacaccgatcacattgattatctgatgttctttaaagattcggtacgcggtctgcaaccgggagctccggtagaattccggggtattcgcctcggtaccgtaagcaaagtgccattctttgcgccgaatatgcgtcagacatttaacgatgattaccgtattccggtgctgattcgtatcgagccagagcggctgaaaatgcagcttggcgaaaatgcggatgttgttgagcaccttggcgaattgttgaaacgtggtttacgcggatcgctgaaaaccggaaacctggtcactggcgcactgtatgttgatctcgatttctatccaaatacgcctgcaataaccggtattcgtgaatttaatggttatcagattatcccgaccgttagcggcggcctggcgcaaatccagcaacgactgatggaagcgttggataagatcaacaaactgccattgaatccgatgattgaacaggcaaccagtacgctttctgaaagtcagcgcacaatgaaaaacctgcaaacgacgctggatagcatgaacaagatcctcgccagccagtcgatgcagcagttgccgacggatatgcagtcaacgttgcgtgaattgaatcgcagcatgcagggcttccagcccggctccgcagcctacaacaagatggtggcggatatgcagcgccttgatcaggtgttgcgagaactgcaaccggtgctgaaaacgctcaatgagaagagtaacgcgctggtatttgaagcgaaggacaaaaaagatccagagccgaagagggcgaaacaatgaaaaagtggctagtgacgattgcagcactgtggctggccggatgcagctccggcgaaattaataaaaactattaccagttacctgtggtgcagagcggtacacaaagtaccgccagccagggcaatcgcctgttatgggtagagcaggtcgctgtacctgactatctggcggggaatggtgtggtttatcaaaccagtgatgtgaagtatgtgattgccaacaacaacttgtgggccagcccgttggatcaacagttgcgcaacaccctggtagccaacctgagcacgcaactgcccggctgggtggttgcctcccagcctctgggaagcgcccaggacacgctcaatgttaccgtaacggagtttaacggtcgctatgatggcaaggtcattgtcagtggtgagtggctgttgaaccaccagggacaactgatcaaacgtccgttccgtctggaaggagtgcaaactcaggatggttacgatgagatggttaaagtgctggccggtgtctggagtcaggaagccgcttctattgcacaagagataaagcgtctaccttaattataaagatttgtaaatataaccgtctccggtatgttgcctgaggcggtttttttgtttctaacgtgcggaaaaatttgttcctcttcacattttttgtacaaccgacatgcccgtgtagctcacaaatatgacagtggcgtgaattttgcgcattgacggcagttatgattcgcggtattgcttaactgtgattgcacatttagtaatcactgttttcttttccaccagaaaccagtatgagggaaacgaggcatgaagagacaaaaacgagatcgcctggaacgggcacatcaacgtggttatcaggccggcatcgccggacgctcaaaagaaatgtgtccctatcagacgctgaatcaaaggtcacaatggctgggaggctggcgagaagccatggcggacagggtagtaatggcctgattctgtctctttaaaaagaaacct

SEQ ID NO: 220 - DNA, 12184 bp, Escherichia coli
  Strain O55:H7
  modified_base (2)..(2): a, c, g or t
  modified_base (4423)..(4423): a, c, g or t
  modified_base (4545)..(4545): a, c, g or t
  modified_base (6600)..(6600): a, c, g or t
  modified_base (6889)..(6889): a, c, g or t
  modified_base (11524)..(11524): a, c, g or t
tngcggaggtttcgccttttgatactctgtctgattataatcagaaggcagacgtatcctggaacagaccgactttcaggtcgctggcggtatagatcagacgaccatcaaccagcacttcgccatccgccaggcccataatcagacgacggttaacaatgcgtttaaagtgaatacggtaggtcacttttttcgctgtcggcagtacctgaccagtgaatttcacttcgccaacgcccagcgcgcggcctttaccttcgccgcccagccagccgaggtagaaccctaccagctgccacattgcgtccaggcccaggcatcccggcataaccggatcgccaataaagtggcatccgaagaaccacagatccggattgatatccagttctgcttcaacataccctttgtcgaagttaccacccgtttcggtcattttgaccacacggtccatcatcagcatgttcggtgctggcaattgcgggcctttagcgccaaacagttcaccgcgaccagaggcaagaaggtcttcttttgtataggattcgcgtttatctaccatgttctctgtaagccttattttattgaagcacgcaggatagctaacacgtgtacgctgaacaagtccgatcagttcggaataaaccagttcagccaacgtaatggccatggaaaacggtgacgtccttcctgttgcgatgcttgcgcgatacgttcctggatggtttgcatcagcgtcgtttggccttcgccatcccacaccagatttaataataacggcagtgcgtcagtcacatcgtctactgcccagatggtgaatttgccttcttctaccgctttcaccagttcactgtgaagacttaaatggcgaacgttagctgtggggataatgacaccttgtttcccggttaactcacgttgctggcaaatagcaaagaagccttcgattttctcatttaaaccaccgaccggctgggcgcgaccgaactgatcgactgaacctgtgatagcgatactctgattcaccggcacatcggcgagggcgcttatcagggcgcagagttcagccatcgaggcactatctccatcaacttcactgtatgactgctcaaatgtcagcgatgctgagaaggggatctgttgctcaagctgtagttccgacatcaggaacgcttgcatgatcatcatccctttcgcatggatattgccgccaagctccgctttgcgttcgatgtcggtgaattcaccatcgccaatatgcacaacgcagctaatgcgagaaggttcgccaaaagcgcgtggatgacccggaaattcaatgaccgaaagggcgttaatttgcccgatgcgttcgccttcggtttcaatcaggatttgctcctgaaggatctcatcctgcatacgttcagcgaggaaaccttcgcgccattcacgctgctgcagcattaagtttagctgctcgccggagaaggtgtcgccatcacacagggaggcgacctctttacactggcggaggatccactgcgggctaagcggaagtgtttcttgttcaccggtgtagcgtgctgcttcgcggataagtaccggccaggcatccgctcccggggcaggtaagtgattatgtctggcggtaaatgtcacccagcgacaccactgggttactgactccgcatcgacaatctgcagagtatcttcaaattcgctataaatagcctgctctgaaagctctggctccatctcctggaaatcagccaatgattcgcgttcgcctaccagaatgactttcagcttcaatggcatcgaaggcacagagacggggagagggcgcgactcatcaaacgcaacccagtcaaaacgctcgcggttaacgatatttttcagccgcatccacagcagaggttgcgccagcagtgtacgcaaagagatgatgagaataccgccatttgcctgatgcaccagaccaggctgcagggtaatgtcgccattaaactggcgcaggcagccaaagagttgctccgcttctacccagtcggcagcgacaacttgcgttaaagtcgcaaaattatcatctgcactcactgcgtgacgtaagcggatggagtggccggaaacctcatagtgaccgcccaccagttggcctgcatcgctttgtagcgtacgcgcggcattggcaataagattcagatactcagactcttccggggccttcgccagcataaaagaggaggatgctcgcgtatgcagcaactgctccagcgcaaattgcagccgcggttgagtatcactgaataaaggatcgttttcgtcaatcaaatgtggctgagcaaatatttcctgatagctatcggtatcaggaaccaggtcacgccatgcaagtttcgtaatggtcaaagttgatgttttttagtctgttgtcaaagccgcgattataccgtaaccggcactacagcacacgtagaaagcaccgacaatactcctggcatgggcgttaaagctcacaggatggagattcttttcttcactggcctaaaaagctgatattctgtaaagagttacacggtaacattgagatcgctatgaaatatcaacaacttgaaaatcttgaaagcggttggaaatggaagtatctggtgaagaagcatcgcgaaggggagttaatcacccgttacatagaagccagtgccgcccaggaagccgtcgatgtgttgctctcgctggaaaatgaacccgtgctggtaaatggctggattgacaagcatatgaatccggaactggtcaatcgcatgaagcaaaccattcgggcaagacgaaagcgccattttaatgcggaacaccagcatacgcgcaaaaaatcgatcgatctggaatttattgtctggcaacgtctggctggtcttgcgcagcgtcgcggtaaaacgctttctgaaacgattgttcagctgattgaagatgcggaaaacaaagagaaatacgcgaataaaatgtcttctctgaagcaggatctgcaggcattgctgggtaaggaataactgacgaaagtcagttcaatttactaaaggcaaaaaaaaccccgcagcagcggggtttttctaccagacgagaacttaagcttgcggctgagttacaacgtctttgatacctttaacttcgatctctacgcgacgatccggagccaggcagtcgatcagtgcagcacgctgtttcacgttgtcacaggtgttgccagtaaccgggttggattcgcccataccacgtgcggagatcttgtctgccgggatacctttggagatcaggtaatcaacaacagactgagcacggcgctcggacagaccctggttgtaagcgtcagaaccgatgcggtcggtgtaacccagaacaactacggaaccgtctttcggatccaggttgctcagctggctgtacagctgatccagagcagcctgaccttccggtttcagggttgctttgttgaagttgaacagaacgtcagacttcagagtgaagtgcttggtctgtacttccggtgccggagctggagccggagcaactactggagctgcttcgccctgaccgaaacggtaggaaacacccaggctcagcatgccgttgtccggacgagtgccgatggtgtgtgcgtcaccgatgttgttggtccactggtattccagacgggtagcgatttcaggagtgatcgcgtactcaacaccgccagcgaagaccggagaaacgccggtgtcgtggtttttaccataaacgttggatttagtgtctgcacgccataccataccacccagacgagtgtagatgtccaggtcgtcagtgattgggtaacccagtttagcggtcagttgaacgccctgagctttgtatgcaccgttttcaacgctgcctttgtacggcatacgacctaaccagtcgtaacccatttcaaagccaacatacgggttaacctggtaaccaccaaaagcaccagcgcccagttggttttcatgggtcgggccattgttgttgatgaaaccagtgtcatggtactgggaccagcccagtttagcaccagtgtaccaggtgttatctttcggagcggcctgcgctacggtagcgaaaccagccagtgccactgcaatcgcgatagctgtctttttcattttttgcgcctcgttatcatccaaaatacgccatgaatatctccaacgagataacacggttaaatccttcaccgggggatctgctcaatattaactctaccgatatcttcggcttatgccgagcacccctggcgatgtaaagtctacaacgtagttgaaaacttacaagtgtgaactccgtcaggcatatgaaaaaaaagtcttgtataaggtatgtttaatcttttttgtcagcgacaatttacagaagagaatcgcggaaaccgcttcagacaagcctncgcaaggaaaattagtcacgactgaaagcattggctgggcgacaaaaaaagttccaggattaatcctaaatttacttaatgatacaaattagagtgaatttttagcccggaaagttgtctcntggcgtgagaggatgcgcttaccggacgcataataaaccccatagcgttaccttcatttgccgcatcaacaagttcagcatgctcttcttcagtcaaatcatctgccaaccaaccgatcaccacactgtaattgcccgtgcgtaaagcgcgaaccattgactccacagtgtggcaaggggagagctggctaatctgcattactttcgttaagggtagcccagatgcctgaacccattcccgactcagtttttgttgcggtgttaaccagagttgccagcgcgattgctgaccgagttgctgtaacaatggcaacagtagaagttgcgtcatcatgggctgatcttcgcgatagacaacttcactgataagcccggctgtagtgttttccgtagagacacgcgcaattttacttgctgcggatgagaacgacgaagaacgatgtgcatagcctgaagtgtacataatcaatccagcccctgtgagttactgtatggatgtacagtacatccagtgacaacaaagatcaaccctattttcggaaagagcctcgcaaattttgtcgttggtgacgggaaaacataaattaatcttgccccttaagaataagttgcctattttcgtagttaacggatccgttaatgtgaatcattcttttatgttatgattttaaaaggaattttatgaaaagcctctcctataagcggatctataaatcacaagaatacctggcaacgttgggcacaattgaataccgatcattgtttggcagttacagcctgaccgttgacgacacggtgtttgcgatggtttctgatggtgagttgtatcttcgggcttgtgagcaaagtgcacagtactgtgtaaaacatccgcctgtctggctgacatataaaaagtgtggccgatccgttaccctcaattactatcgggttgatgaaagtctatggcgaaatcaactgaagctggtgcgtctgtcgaaatattctctcgatgcagcgctgaaagagaaaagcacgcgcaatacccgggaaagactgaaagatttgcccaatatgtcttttcatctggaagcgattctcggggaggtggggattaaggatgtacgggcgttacgtatacttggggcaaaaatgtgttggttgcgactgcggcagcaaaacagtctggtgacagaaaagattctgtttatgcttgaaggtgccattatcggcattcatgaagctgcgctcccggtggcacgccgccaggagcttgcagaatgggctgactctcttacgccgaaacaggagtttcctgcggaacttgagtaatctggcgttgcagacgaccaatctcaggcagtaatgcaatcaataatccaacttgttgtacgaccagaggttctttgctgtctgcccgtggttcaagttgctgcatccgctgtttcaggctagctaatgcctcattgacgcgttcttcatcagcaggttgatgatgtaacgcgtcatcaacatagcaaactgcgtcatcaagaaacgccagaatttcaggattagttaactgctcccggtgagcaccgagggctgagatatagctggtaaacgtatggttaaggcacagcaaccgaaacgcggcttcgcgaatttgcggggtaacgttcggctcgctggacatatttgataccaccgacgccagctcagcatcacggttgtgtgcatcgcggcgggcaatacgatacgccagacggttatcacgcccctgatggtattgctccagtatggcatcgagataccgacagttggcctctgtggcgcgttcgagcatgcgcggcagattgcgaaactgccagtcaggccagatgtagctcactgccgcccacgcaatggcacaaccaatcagcgtatcgattacgcgaggtaacgctacttcaaaaccttcacccagtaagttaaaacacagtagcaccaaaagtgtgatgaacatcgttgcatgagcgtattgcacgttacggaaggcaaaaaagagcacgccggtaataaccagcagcaccagctgcccttccagtgatggcacanaccacagcacaggaatgccaatggcgatacctaccagcgtaccaataatccttaacttcaggcggtggcgcgtggcgttatagtttggctggcagacaaacaaacttgtcagcaagatccaatacccgtgatgcattccggttatctgaatgatggcgtagccgaagcacaacaccagcgacattcttaccgcatgacggaagagggcggattccggcgtgaagtgacggctaagacgcagccagatatcactcaacccgtgcgggctgtcatcagcgagctcattttngtcattattatggggtagtgcctgggcctgttctgattcaattgttgccagttgggcatcaatggcgcgtaaattgttcagcaaaaatcccagtgttttgagtaaatcggcgggtgcgccgttatcgcgcatccgctccagcgcagcatcaatatgcgtaaaagcgcgctcaaaatgcggatcatgttgataaggctgacgcaacaaaatacagcgtgacagttgctggcacgcctggccctgcatcgacatcagccgctgaaaacggaacagcacgtcgctgtggcgaaaatgttcacgcaatgtttgatactgaatatgagaagagctggcacgctcgtgaatatcctgtgcgacaaagtaataatgcagcgtgcgacgcgttccccgttgaccacgatcgccacgtaagcgggtcagcagcgagagtttcgtctgattcaatgtcgccatcagcagaccgttggcgagagccaaatcgtacagcggtgcctggctttcatcttcaatatcaggatcaaacatgcgcgacttgagctcaagataacgcgccagttgttcatagcaacgcgccaggttgtcctgcagcgggcggaccgggaacagcagatgaccaataagtgtcaggacgttgtaccagacggcaccggccagcagatacatcggctgctgataccagtgctcatacagtgatgttcccaacatagtgtaaatggcgatcagcaatgcaccgaaggcaattgttgcatagcgttgacccagaccgccgagcaaaatgaagccgctggtagagagcgttaagccaatcgcaaatagccagggccagggaaacagcaattctactgaggccgaggcgataaaaaagcagaacagcgtaatgatgaggttacgcaaacgtcccgccagtcggtcatcgagatcggtcagcgccgctgccaccatccccagcgttagcggaatcgtcagttttacatcacccagccaccacggaaacgctgtggttccacaaagcgcaataaaaatacgcgcgtaatacagccaggcgctgttccaggtatagcgtttgagcaaaggacttagcataaaggccatattagtggattattcaaaacgacgacgtgcattggcttcacgcgcagcttgcgctgtttctaccgataccacgcgacgaccaaccggccatagtgcaatagcggcaattttaaagttcgcaatgccgacaggaatgccaatgattgaaatacattgtgcgatgcccgttgcaatgtgcatcaggcataaccaccagccaaagaaaatcagccagaaaatattcaataccgtaccgccagtattcagcagcacatttttgccagccgggttcagttcatcgacatgaatagcttcattgccataaggcaccagagacagtttagtgatctcccagcaggatcgtgtcagcggtaaggtaaaaatcagcgcaatactgaccagagtcgccaacagccagcccagagtggtggcaaatccgccaagcacaaagttcagaatgttcaaaacggtacgcataaaacctcgctttactgtggttttcagtaatgggcggcaattgtaacgtttttttgggctggagcacgttttctctgacggttacactgataagaaataatttcgtgtggatctacagagtcatggaactgaaagcgacaacgcttggaaaacgtctggcacagcacccttacgatcgggcggtgatcctcaatgccgggattaaagtctccggcgatcgccacgaataccttattcctttcaatcaattactggcgattcactgtaagcgcggtctggtatggggcgagctggaatttgtactgccggacgaaaaagtggtgcgtctgcacggtaccgaatggggcgagacgcagcgtttttaccatcatcttgatgctcactggcggcggtggagtggcgagatgagcgaaattgcgtctggtgttttacgccagcaactggatttgattgccacgcgcactggagaaaataaatggatgacgcgtgagcaaacctctggcgttcagcaacaaatccgccaggctttgtcggcgttgccgttgccggttaaccgactggaagaattcgataactgccgtgaggcgtggcgtaaatgtcaggcctggttgaaagatattgaaagcgctcggttgcagcataaccaggcgtataccgaagccatgcttaccgagtatgcggattttttccgccaggtcgagtcttcaccgctgaatccggcgcaggcccgggcagtcgttaatggcgagcattctctgttagtgctggcaggtgcaggaagcggaaaaacgtcggtgctggtggcccgtgcaggctggttgctggcgcgtggtgaagcgtcccctgagcaaattttattgctggcgtttggtcgcaaagccgctgaagagatggacgagcgtattcgcgaacggctacataccgaagacattaccgcacgcacgtttcatgcgctggcgctgcatattattcagcagggcagcaaaaaagttccgatagtcagcaaactggaaaatgataccgctgcccgtcatgaactctttattgctgagtggcgcaagcaatgcagcgaaaagaaagcgcaggcgaagggctggcggcaatggctgacggaagaaatgcagtggtcagtgccagaaggtaacttctgggatgatgaaaaattacagcgtcgtcttgcctcacgcctcgatcgttgggtaagtctgatgcggatgcacggtggtgcacaggcagaaatgattgccagtgcacccgaagagattcgcgatctgttcagtaaacgtatcaagttgatggccccgttattaaaagcctggaaaggtgcgctgaaggcagaaaacgctgtcgatttttcgggccttattcatcaggcgattgtgattctggagaaaggtcgctttatcagcccgtggaagcatattctggttgatgaatttcaggatatctcgccgcagcgggcagcgttgttagcggcattacgcaagcaaaacagtcagacgacgttgttcgccgttggtgatgactggcaggcgatttaccgattcagcggtgcgcaaatgtcgctcaccaccgctttccatgaaaactttggtgaaggcgaacgctgtgatttagacacgacttaccgttttaacagtcgtatcggtgaggtggcaaaccggtttattcagcagaacccaggccagctgaaaaagccgctaaacagcttaaccaatggagacaaaaaagccgtcacgttattggatgagagtcaacttgacgctttgctggataagctctctggttatgccaaaccggaagagcgcattctgatcctggcgcgttaccatcacatgaggcctgccagcctggaaaaagcggcaacacgctggccgaagttgcaaatcgactttatgaccattcatgccagcaaagggcaacaggcggattacgtcctcatcgttggcttgcaggagggaagtgatggttttccggctgcggcgcgggagtcgattatggaagaggcgctactgccaccggttgaggatttcccggacgctgaagaacggcggttaatgtacgtggcgctgacccgggcacgtcatcgggtatgggcactgtttaacaaagagaatccctctccctttgtggaaatactgaaaaatctggatgtgccggtggcgagaaaaccgtaagaaacaggtggcgtttgccacctgtgcaatattacttcagacggtccgcgagataacgctgataatcggggatcagaatatcgaccgcgtcgttgaaatgcggcgactggataatgaagtctgccgttgccacgttggtggcgaccggaatgttccataccgtcgccagacgcagcaaggctttcacgtcaggatcgtgcggcacggcatttagtggatcccagaagaaaatcaatacatcaattttcccttctgagatcaatgcgccaacctgctggtcaccccccattgggccactcaacatcgcgttgacgttcatgccggtcgcgcgggaaattaagttaccggtagtgcctgttgcatacagtacgtgttgttccagtaacggttgatgccgttccacccagctcatcagcatttgtttgcagtgatcgtgtgccaccagcgcaatatgtttccgcgcaggtaaagtgcgagtcgtcagttccataatgtacatccgtagttaactttcctacagattactgtaagcacttatcgctgcaagataaagaccgaaaaagcctgcgcacaggcacaaaaatctcaggaagatggttgtttttccgcccattgcaggaaagtatttcgcgtttgtgggtcagccagtttaaaccaatacttcagccgttgttctgtgagcacctgagactgcggtggaatagcatccagctcggaaacacccgaaagcagcgtactgtcatctgccatcatcgtggcaaattgcggtagtgaagcgcgtttcgcggatttgttatagcgttcaacctcgacctcataatcaatcgtttttgccgttgaggtaatggcgagaatatccagctttaccggaatcggcgtcgcatcgccatccaacaattcaaggcgcggngcggcatcaaaatggttagcttcccgctcattctccaggcgaggcaggcgaaaattgacctggttgatgagctgggtattaaaactgaccaccagcggtggggagatatacagccgttcttcactattggaaagatgaatcgtcttctcaacgcgaaacactaactgatgcggtccattatccagttcaatgctgtccgcaccgcgcagcagagagctggaaaccttcttgccgtcgagtaccagaagatcgacatcggttgaaagccgcagcgtggtggcaaaaacggataccggcaaacataatgcaatcaaggtggtcacgatgccggttttcataggtagctcctgtcaaaagaccgcccgaataataatgtgtcaaaatttttctttaatcatacttactaacatatagacatatttcccgcttttgctctcattcattcgtattagctgcatggttggcatgtcggctttgtcgtacactttgtgaaacagtctggaggaaataatgaaagaaaccgatattgcaggcattttaacgtccactcacaccattgcgctggtgggggcaagcgacaaacccgatcgtcccagctatcgcgtgatgaaatatctactcgaccaggggtatcacgtcattccggtttcgccaaaagtt

SEQ ID NO: 221 - DNA, 22382 bp, Escherichia coli
  Strain O55:H7
  modified_base (3)..(6): a, c, g or t
  modified_base (253)..(253): a, c, g or t
  modified_base (3109)..(3109): a, c, g or t
  modified_base (6698)..(6698): a, c, g or t
  modified_base (8641)..(8641): a, c, g or t
  modified_base (17116)..(17116): a, c, g or t
  modified_base (17860)..(17860): a, c, g or t
  modified_base (19173)..(19173): a, c, g or t
  modified_base (22380)..(22381): a, c, g or t
acnnnnctgggccagcaggggtacggcacgctggcagacgttccggaaaaagtcgatatggtcgatgttttccgtaattcagaagcggcgtggggcgtagcgcaggaagctatcgccattggcgcgaaaaccctctggatgcaactgggggtgattaatgagcaagcggcagtactggcacgggatgccgggttgaatgtggtgatggatcgctgcccggctattgagatccctcgcctgggcctggccaaanaaaaaatccccggaaggcaaaaaccttccggggatctgttcagggattagttacgcagacgcggggcctggagttgtttgcggatggtctgcgccagctcatccatggatggctgttcaggatgttcatcctgcaattcgctacttagctgggcttcagccaggtaggtatgaaccggtaggccgttatcgtcctccatcaccacgtgataccacggagcggcgcgaagctcgtcattcaccgccagctcatcaggcgacggttcagagagcgaataaaccgggtcgatatccacgaccactccgagataacctaacagggaatggcggacctgctggccgataccgaatttgctggcaatcatagtcacctcccgggaaatctttacctttgatataagggtaaaattccacatttcaagttacatgacgcgacaggcaaaccctttcagatatagcccttccggataggtagcgatcaccggatgatcggccgcctgacggaactgctctataaattgtacatcacgaccggcatcaattgcggcatccgcgatgattttctgaaataaatcgctggtcatcagaccggaacaggagaaagtcaggagaataccgccttcattcagcagctgaatcgccagcatgttgatatctttatagccacgacacgcgcccatcaactggcttttattctcaacaaacttcggcgggtccatcacgataacgtcaaatttttcaccgcgatcgcgataggtacgcagcaatttaaagacatcatcacggacaaactcagccttgctcagatccagtttgttcagctcaacgttctgccgtgcaatatccagtgcttcctgggaggtatcaacgctgacaacctggctgcaaccgcccatcagtgccgatacggcgaaaccaccggtataggagaaacagttcagtacgcgtttattttcaacgtagcggcgggtagccaggcggctgtctcgctggtccaggtagtagcccgttttgtgtccgtgctgtatgtccaccagcagcttcatgccatgttcttcaatcggcagcagggcaggcggcaactcaccggtgacgaggccctgggtcagctccatcccttcttttttacgtaccgcaacatcgctgcgatcgtaaatcgcacattccgggtacagcgtttgcagggcactaattaatgccgcgcgctgatattctgcgccagcactcagcagttgcagcaccagaaaattaccgaaacgatcgatagtaatacccggcaggccatcagattctccggcgattaaacgatagctgtcgaggccatctttttgcgccagccagtcacgccatttttgtgcttgttgcaaacggcgggaaaaaaaagcaatgtcgatagactcagacgggtcaaacgtccagacgcgcgcccggatttgcgaagctggcgaataagcgccgcgtgctaaccattttccctgatgatcaacaatatcgatggtttcaccgaggctggctttaccttccatacgggcaacggccccggaaaagacccacggatggcgacgaagtaatgatttttcgcgccctttggctaacactaaacgtacactcataatttacttttctgtcgatgcaaagaaatgggcgtcattgtccggagttttccatggatttgcaacgcgtccattaaggataaggagagcagcaatgtcgaaagtctgcataattgcctgggtttacgggcgagttcagggcgtaggatttcgctacaccacacagtacgaagcgaaaagactgggcttaaccgggtacgccaaaaatcttgacgatggcagcgtggaagtggttgcctgcggtgaagaagggctggtagaaaaattaatgcagtggttaaagagtggcggcccgcgttctgcgcgtgtagaacgggtgctcagcgagccgcatcatccctcgggggaattaaccgattttcgtatccgttaaatacattttaccggttttggcaggccagcaattttggtggcttgcttagccggacctttcggaaacagtcggtataaatagcggctgttacctttttcttcgccaaatttattcgccatcgcttttaccagcatacgaatcgccggagaagtattgaattccagatagaaatcacgcacaaaacgcaccacttcccagtgttctggcgacagcgaaatcccttcgttctctgcaatcaccactgccagcggctcactccactggctgctttctttgagatagccttcggtatccgtttctatctctttaccttcgaagatcagcataattattactaccttaatcagactgccggcagtgtaacaaaaaacaaagccccgcataaagcgaggctatgaaagtgttagcgggtgagattaatcgcggctggcgaagcccagaatgctcagcaggctgacgaagatgttgtacagcgaaacatacaggctaaccgtggcacgaatatagttcgtttcaccgccatgaatgatgttgctggtttcaaacaaaatagcgccagaggagatcaaaatgaagaccgcgctgatcgccagatgcagagcaggcagctgcaggaagatattagcaaccataccaatcagcaccaccacaatacccgccatcagcataccgccgaggaacgacatatctttgcgggtggtcagcacatatgcagagcagcagaagaacactaacgccgttccgcccagtgccatagcgattacgtcacccattccggcagacagataggtattcagaattggtccgaggatataacccagaaaaccggtaaaggcgaatgcggagataatcccggtcggcttattcgccnttttataggtcaagaacatcaaaccatacatacccaccagcgtcagaatcagacccggagatggcagcatcagcaccgtactggcagttgcggtaatcgccgaaaaggccagcgtcaggctcagcagaaaataggtattacgcagcactttatgggtgctaagcagtgatgtacggtcatgtgaagaactaacaatacgatccattgagtcactctctatgacagatgtaattaattaagcagcataatgataatgcgtaagggcacccagtagttttacccatctttacgcatttgatctggaacaggtttaacagcggattatcaggtcattaagcaaatataacgccctgagaatttcgacaggcaaaagaaaaaggggttagcatttagctaaccccttatcttatctggcggaagcgcagagattcgaactctggaaccctttcgggtcgccggttttcaagaccggtgccttcaaccgctcggccacacttccggaatgacgcgcactataaacatcccgatgcggcgtgtaaacccctaatctgtttgtttgcctaaaaaacagccaaaagtgcattgatagcgtgaaataaaagcagattgatcatttcatcaccataaattccttctcttttactcgtttagcaactggctaaacatcccaccgcccggcaaaaagaaaaataggtccatttttatcgctaaaagataaatccacacagtttgtattgttttgtgcaaaagtttcactacgctttattaacaatactttctggcgacgtgcgccagtgcagaaggatgagctttcgttttcagcatctcacgtgaagcgatggtttgccttgctacagggacgtcgcttgccgaccataagcgcccggtgtcctgccggtgtcgcaaggagaagagacgtgcgatatgaataacgaggaaacattttaccaggccatgcggcgtcagggcgttacccggcgcagctttctcaaatattgtagtctggctgccacgtcgctgggattaggcgcgggaatggcaccaaagattgcctgggcgctggagaacaaaccgcgcattccggtggtatggatccacggtctggaatgcacctgctgtaccgaatcttttatccgctccgctcacccgctggcaaaggacgtcatcctttccctgatttccctcgattacgacgatactttgatggctgccgccggaacccaggcggaagaagtctttgaagacatcatcacgcaatacaatggcaaatatatcctcgcagtagaaggtaatccgccgctgggcgagcaggggatgttctgtatcagcagcggtcgaccgtttattgagaaactcaaacgtgccgctgccggagccagcgcgattatcgcctggggaacctgtgcgtcctggggctgcgtgcaggccgcgcgacctaatccgacacaggcaacgtctatcgacaaagtcatcaccgacaaacccattatcaaagtacctggctgcccgccgatcccggatgtgatgagcgccatcattacttacatggtgacctttgatcgcttgccagatgtcgacagaatgggtcgtccactgatgttttatggtcagcgtatccacgataaatgctatcgccgcgctcacttcgacgccggagagttcgtccagagttgggatgatgacgctgcccgcaaaggttattgcctgtacaaaatgggctgcaaagggcctaccacctataacgcctgttcctccacacgctggaatgatggcgtttctttcccaatccagtctggtcacggctgcctgggctgtgcggaaaatggtttctgggatcgcggttcgttctacagccgcgtggtcgatattccacaaatgggtactcattcctccgccgataccgtcggtttaaccgcgcttggtgtggtggcagcggctgttggtgtgcacgcagtcgccagcgccgttgaccagcgcagacgtcataatcagcaacctacagaaaccgaacatcagccaggcaatgaggataaacaggcatgagcactcagtacgaaactcagggatacaccatcaataatgccggacgccgcctggtggtcgacccgattacgcgcattgaaggccacatgcgctgcgaagtgaatattaacgatcagaatgtaatcaccaatgccgtctcctgcggcaccatgtttcgcgggctggagatcatcctgcaagggcgcgacccgcgcgatgcgtgggcgttcgttgaacgtatctgcggcgtctgtactggcgtacacgctctggcttcggtttacgccatcgaagatgccatcggtattaaagtgccggacaacgccaatatcatccgcaacattatgctggcaacgctctggtgccacgatcatctggtgcacttctatcagcttgccgggatggactggatcgatgtgttggatgcgctgaaagccgacccgcggaaaacctccgaactggcgcaaagtctctcctcttggccgaaatcatcccctggctatttcttcgacgtacaaaaccgcctgaagaaattcgttgaaggcgggcagttggggatcttccgcaatggctactgggggcacccgcagtacaagttgccgccagaagccaacctgatgggctttgcccactatctcgaagctctcgatttccagcgtgaaattgtcaaaatccacgcggtctttggcggtaaaaacccgcatccaaactggattgtcggcgggatgccttgcgccattaacattgacgaaagcggcgcggtcggggcggtcaatatggaacgcctgaacctggtgcagtcgattatcacccgcacggcagacttcattaacaacgtgatgatccccgacgccttagccatcggtcagttcaacaaaccgtggagcgaaatcggcacgggtctttctgataaatgtgtcctcagctacggcgcattcccggatattgccaacgactttggtgagaaaagtctgctgatgcctggcggcgcggtgattaacggcgacttcaacaatgtgctgccagtggatttggttgatccgcagcaggtgcaggagtttgtcgatcacgcctggtatcgttatcccaacgatcaggtcgggcgtcatccgttcgatggcatcaccgacccgtggtacaaccccggcgatgtcaaaggcagcgataccaacattcagcagctgaatgaacaggaacgctactcgtggatcaaagcgccgcgctggcgcggtaacgcgatggaagtggggccgctggcacgcacgttaatcgcttatcacaaaggcgatgctgcgaccgttgagtcggtcgatcgcatgatgtcggcgctgaacctgccgctttccggtatccagtcaacgttgggccgcattttgtgccgcgcgcacgaagcacagtgggccgcaggtaagttgcagtatttcttcaacaagctgatgactaacctgaaaaacggcaatcttgccaccgcctccacggaaaaatgggaacccacaacctggccgacagagtgccgtggtgtcggttttaccgaagcgccgcgcggggcgttaggccactgggccgncattcgcgatggcaagattgatctctaccagtgcgtggtgccgaccacctggaacgccagcccgcgcgatcccaaagggcagattggcgcttatgaagcggcgctgatgaacaccaaaatggcgatccccgagcaaccgctggagatcctgcgtactctgcacagctttgatccgtgcctcgcctgttcaacacacgtgctgggcgacgacggtagcgagctgatctccgtgcaggtgcgttaacagcgaaggagaatcatcatgcaacagaaaagcgacaacgttgtcagccactatgtctttgaagcgccagtgcgtatctggcactggctgacggtgttatgcatggcggtgttgatggtcaccggttactttatcggcaaaccgctaccttccgtcagcggcgaggcgacgtatctgttctatatgggctacatcaggttaattcacttcagcgccgggatggtttttaccgtggtcttgctgatgcggatctactgggcttttgttggcaatcgatactcccgcgagctgtttatcgtgccagtatggcgtaaaagctggtggcagggcgtgtggtatgaaatccgctggtatctgtttctggcaaaacgtccgagtgccgatataggccataaccccatcgcccaggcggcgatgtttggctatttcctgatgtcggtctttatgatcatcaccggctttgcgctgtacagcgaacacagccagtacgctatttttgcgccgttccgttatgtggtggaatttttctactggacgggaggcaactcaatggacattcacagctggcatcggctggggatgtggctgattggcgcgtttgtgatcggtcatgtctatatggcgctgcgtgaagacatcatgtccgacgacacggtgatctccaccatggtcaacggctaccgtagccacaaatttggcaaaataagtaacaaggagcgttcatgagcgagcaacgcgtggtggtaatggggctgggcaacctgctgtgggccgatgaaggtttcggcgtgcgggtggcggaacggttgtatgcccattaccactggcccgagtctgtggagattgtcgatggcggtactcagggactgaacttgctggggtatgtcgaaagcgccagccatctgttgattctcgatgccattgactacgggctggaaccaggaacgctgcgaacctatgccggagaacgtattccggcttatctcagcgcgaagaaaatgagcctgcaccagaacagtttctccgaagtgctggcgctggcagatatccgcggacatctgccagcacatattgccctcgtcggtctgcaacccgcaatgctcgacgactacggcggcagcctgagcgaactggcacgggagcaactgcccgcagcggaacaggcggcgctggcgcagctggctgcatggggaattgtgccgcaaccggctaatgaatcgcgctgtctcaattatgactgtctgtcgatggaaaattacgaaggcgttcgcttgcgccagtacaggatgacactggaggagcagggatgagcaacgacacgccatttgatgcgttgtggcaacgaatgctggcgcgcggctggacgccggttagtgaattccgtcttgacgactggcttacgcaagcgccagacggcgtggtgttattaagcagtgacccgaaacgcacgccagaggtcagcgataatccggtaatgattggcgaattactgcgcgagtttcccgactacacatggcaggtggcgattgctgaccttgaacagagcgaagccatcggagatcgctttggcgtctttcgctttcccgccacattagtgtttaccggcggaaactatcgcggcgtgctgaatggtattcacccgtgggcggaactgataaacctgatgcgtgggcttgtcgaaccacagcaggagcgtgcntcatgagcgaaacttttttccatctgctggggccaagaacgcaaccgaacgatgacagtttcagcatgaatccactgccgatcacctgtcaggtgaatgatgaaccgagtatggcggccctggagcaatgtgctcacagcccgcaggtgattgtgctgttaaacgagttacaacatcaactaagtcaacgccagccgccgttgggcgaggtgctggcagtcgatctgttaaatctcaacgccgacgatcgtcactttatcaatacgcttctcggggaaggtgaagtgtcagtgcgcattcagcaggctgacgacagcgaaagtgaaatacaggaggcgatcttctgcggattatggcgggtgcgcagacgtcgcggcgaaaagttgctggaggacaaactggaggctggctgcgcgccgctggcgttgtggcaggcggcaacgcaaaatctcttgccgacagattcgctgttaccgccgcccattgatggcctgatgaatggcctaccgttggcgcatgagttactggcgcatgtacgtaaccccgacgcgcagccgcacagcattaatctgacgcaattacccatcagcgaggctgatcggctttttctctcacgtctctgtgggccgggaaatattcagattcgtaccattggctatggcgagagctatatcaacgccacggggttacgccatgtctggcatttacgctgtacggacaccttaaaaggcccgttactggaaagttatgaaatctgcccaataccggaagtggtgctggcagcgccagaagatttggtcgactctgcgcagcggcttagtgaggtatgtcagtggctggcggaagctgcaccgacgtaaaaagacggtaagtatcgctttcaggcttatgaatatcgcaatcggcgaatacctctggtcgtagagtttcaggataaagagggagatctaccattaacgggttatttttctctcttcgcctacaggagtgcgcatgtgggatgtcattgatttatcgcgctggcagtttgctctgaccgcgctgtatcactttttatttgtaccccttaccctggggctgatttttttgctggctatcatggaaaccatttacgtggtcaccggcaaaacaatctaccgcgatatgacgcgcttctggggtaagctcttcggtatcaactttgctcttggcgtggctaccggcctgaccatggagtttcagtttggtactaactggtcattctattccaactatgtgggcgatatttttggcgcaccgctggcgatggaagcattaatggccttcttcctcgaatccacctttgtcgggcttttcttcttcggctggcagcggctgaataaataccagcacctgctggtgacgtggctggtggcgttcggttcaaatctctctgcattgtggatattgaatgccaacggttggatgcaatacccgaccggtgcgcattttgatatcgacaccctgcgtatggagatgaccagcttcagcgagctggtctttaacccggtcagccaggtgaaatttgtgcacaccgtaatggcgggctacgtgaccggggccatgtttattatggcgatcagcgcctggtatttactgcgcggacgggagcgcgatgtcgcattacgctcgtttgccatcggttccgtcttcggtactctggcgattatcggtaccctgcaactcggagacagttctgcgtatgaagtcgcgcaagtacaaccggtaaaactggcggcgatggaaggggagtggcaaacggaacctgctcctgcaccgttccatgtggttgcctggccggaacaggatcaagagcgtaacgcctttgccatcaaaattcccgtgctgttagggatcctcgccactcactcattagataaacccgtgccgggtctgaagaatttgatggctgaaacctacccacgcttgcaacgcggacgtatggcctggctgttaatgcaggaaatatcgcaaggcaatcgtgagccgcatgtgttgcaggcattccgggagctggaaggcgacctgggctacggcatgttgctctcccgctatgcgccggatatgaatcatgtcacagccgcacagtaccaggcggcgatgcgtggcgcgatacctcaggttgcgccggtattctggagtttccgcatcatggtgggctgtggttccctgctgctactggtgatgctgattgcgcttgtccagacgctgcgtggcaaaatcgaccagcatcgctgggtgctgaaaatggcgctctggagtttgccgttgccgtggattgcgattgaagccgggtggtttatgaccgagtttggtcgtcagccgtgggcgatacaggacatcttaccgacatactccgcgcactccgctttaaccacaggacaactggctttctcactgatcatgatcgtagggctttacaccctgttcttaatcgccgaagtctacctgatgcagaaatatgcccgtctggggccgagcgcgatgcagagtgaacaaccgacgcagcaacaggggtaaaggagaaaatcatgtttgattatgaaacattgcgcttcatctggtggctgctgattggcgtgatcctggtggtctttatgatctccgacggatttgacatggggattggctgtttgctgccgctggtggcgcgtgatgatgatgaacgccggatagtgattaatagcgttggtgcgcactgggaaggcaatcaggtctggttgatcctcgcaggtggggcattatttgccgcctggcccagagtgtatgcagcggcgttttccggcttttatgtggcgatgatcctggtgctgtgctcgctgttcttccgcccgctggcctttgattatcgcggaaaaatcgccgatgcacgctggcgtaaaatgtgggatgccggtctggtcatcggcagtctagtgccgccggtagtcttcggtatcgccttcggcaacttgttgctcggcgtgccgtttgccttcactccgcaattacgcgtggagtatctcggcagcttctggcaactgctgacgccattccctttattgtgcggattgctcagccttgggatggtgattttgcaaggtggcgtctggttacaactgaaaactgttggtgtgattcatctgcgttcacagctgtcgactaaacgcgctgcactgttggtgatgctgtgctttttgctggcgggttactggctgtgggtcggtattgatggctttgtactgctcgcccaggatgctaacggtccttccaatccgttaatgaaactggtggcagtgctacctggtgcctggatgaataattttgtcgagtcgcccgttttgtggatcttcccgctgctggggttcttctgcccattgctgacggtgatggcgatttatcgtggccgcccgggttggggatttttgatggcgtcattgatgcaatttggcgtgattttcacggcaggcatcacgctgttcccctttgtcatgccgtcaagcgtgagtccaatctccagcctgacgttgtgggacagcacttccagtcagctgacgctgagtattatgttggtaatcgtgctgatatttttgcccattgtgttgctctacactctctggagctactacaaaatgtgggggcgcatgacgacagaaactctccgccgtaacgaaaacgagctgtactaaggagcaggaacaatgtggtatttactttggttcgtcggcattttgttgatgtgttcgctctccacccttgtgttggtatggctggacccgcgattgaaaagttaacgaacgtaagtctgatgcggcgcattagcgtcgtatcaggcaatcaataatgtcggatatgaaaagcggaaacatatcgatgaaagcgatcttgatcccatttttatctcttctgattccgttaaccccgcaatctgcattcgctcagagtgagccggagccggagctgaagctggaaagtgtggtgattgtcagtcgtcatggtgtgcgtgccccaaccaaggccacgcaactgatgcaggatgtcaccccagacgcatggccaaactggccggtaaaactgggttggctgacaccgcgcggtggtgagctaatcgcttatctcggacattaccaacgccagcgtctggtagccgacggattgctgacgaaaaagggctgcccgcagcctggtcaggtcgcgattattgctgatgtcgacgagcgtacccgtaaaacaggcgaagccttcgccgccgggctggcacctgactgtgcaataaccgtacatacccaggcagatacgtccagtcccgatccgttatttaatcctctaaaaactggcgtttgccaactggataacgcgaacgtgactgacgcgatcctcagcagggcaggagggtcaattgctgactttaccgggcatcggcaaacggcgtttcgcgaactggaacgggtgcttaattttccgcaatcaaacttgtgccttaaccgtgagaaacaggacgaaagctgttcattaacgcaggcattaccatcggaactcaaggtgagcgccgacaatgtctcattaaccggtgcggtaagcctcgcatcaatgctgacggaaatatttctcctgcaacaggcacagggaatgccggagccggggtggggaaggatcactgattcacaccagtggaacacgttgctaagtttgcataacgcgcaattttatttactacaacgcacgccagaggttgcccgcagccgcgccaccccgttgttggatttgatcatgatagcgttgactccccatccaccgcaaaaacaggcgtatggtgtgacattacccacttcagtgctgtttatcgccggacacgatactaatctggcaaatctcggcggcgcactggagctcaactggacgcttccaggtcagccggataacacgccgccaggtggtgaactggtgtttgaacgctggcgtcggctaagcgataacagccagtggattcaggtttcgctggtcttccagactttacagcagatgcgtgataaaactccgctgtcattaaatacgccgcccggagaggtgaaactgaccctggcaggatgtgaagagcgaaatgcgcagggcatgtgttcgttggccggttttacgcaaatcgtgaatgaagcacgcataccggcgtgcagtttgtaatgtataaaaaagagcattcagctacctgaatgctctgaggctgatgacaaacgaagaactgtctaatgcgtagaccggaaaaggcgttcacgccgcatccggtcactttaccttcagttttactctttctcggagtaactataaccgtaatagttatagccgtaactgtaagcggtgctggcgcgtttaatcacaccattgaggattgcgcctttaatattaacgccagcctgttccagacgctgcattgacaagctcacctctttggcggtgttcaagccaaaacgcgcaaccagcaggctggtgccgacagagcgccccacgaccgcagcatcgctcaccgccagcatcggcggcgtatcaacaatcaccagatcgtaatggtcgttcgcccattccagtaattgacgcatccgatcgcgcatcagcagttcagatgggttaggtggcacctgaccgcgagtaatcacatcaaagcctcctttgccaaaatgctggatcactttgttgagctcatctttacctgccagatattccgacaagccatgttcattactcacggtaaacaggttatgcgaataaccacggcgtaagtcggcatcaataaataacactttttgatcggactgggcgatcaccgctgccagagttgaactgacaaacgttttaccactgtctggcgtcgcaccggtgatcatcagaatgttattctcagtctccatcatagcgaaatgcagactggttcgtagcgcacgtacggcttccacagcagaatccgccgggttatccaccgccaggaaggggatatttttagtacgatggcgctgctgattagaaaataaatttttcttacgcagacgggtacgtttatccagccactcggacatcgggatggtggcataaacgctgatgccgtgctcttccagttgttccggggcttctacaccacgacgcaacatcgcacgcgccagcacggcacccaccgaaataaacaggccaagaataaaaccaagcaccacattcaacgcttttttcggtttcactggctgcggctgagtgactgccgggtcgataatccgcacgttaccaatggcactggatttcgaaatactcaactcctgctggcggttaagtaattgcagatataccgcacggcccgcttctacgtcacgacttaaacgcaacacttcctgttgggtggaaggcatagccgatacccgcttattcaggcgtttgcgttcttgctccagcgtctggcgtttttccagcagcgcacgataagttgggtgatctttcttatacagctgggagatctctgcctcgcggaaggtcagctcattgagttgattatcaacgttcacaatctgctcaagaacggctttggcttccaggttaaggtcaaccgaatcgcgctgctggcgataaacgttgagtttttcttccgcctggtccagctcgctgcgcacttctggcaactggcgctgtaagaattcaaggctttgtgaatcctgcgccgcctggcgagcgatattctgttgcaaatagttgttagcgatgctgttcagaatacgagtaatcaactggggatcatcaccagtcatggtaagttccagcatcccgctttctttactgcgttcgctaacggtaaaggtttcctgcaacgcgttaatcgcttccagttcggtacgttggctcaggacaaactgtgttcctggtttggccttaatatccgcgatagtcagcgcaacgccatctttttccagacgctggccgaccgtaccattgacggtgaactcttcaccttccagcgtatagtggccgttttccccaaccgtgagtgtcagttgctgatcctgaccattcagttgtggaatatgcatccagctgatcgccagctcacctggtttctctttggttaatctcgcccagccgcgacccacaatcggaaaatacttctgctcaaccatgtcgcgcagattcagttcagcaatggttttaccgagaatcatgcgcgattgcagcagttggatctccggtgcagactcgggcgatgagttagggatcatatcactcaggccgctgagaatggcgttgccctgtttttgctcaacctggaccagagtatctgcctgataaattggtgtgcttaacagcgagtaagcgacagcgatcagcgtgaataacgcggtcacgctgataataaacttacggtgatcccataactcgccgaccagacgaagcagatcgatctcattttcctgagtgctgcctggtggcgtattcatatttttagttgtcatcgtattttataaactcaaattaccggctgaggcgcttcgcccattcctgactggcgcgctccaacattccgtagacatgttcaaatgcatcctgacttttacgatagggatccgggatctctttctgttccagccattgcccaaacagcattgtcttcccgcggacctcgggagcgattgcggtaacctgagcaatatgttccgactccattgccagaatcagatcgtaatttcgtgccatctcagcagtgagcttacgtccggcatgtccttcaagagatacgccatgattagcggcaacatctgccgctgtcgcatctgcagggtgttttaccagaccatgaacacctgccgatttgacttttacgcccggcagacgtttacgcagcaagcgctcgccaatgggcgaacggcaaatgttgccggtacaaaccaccaggattgagttaaattttagttgggccatgtttgaatccaccgtgaagtctctgtcaggtcatgcaccccggaaatcgtcggtaccagcagggaaatcacacggttccaacgagccagaggcgcggtagtgacataaacaatgtcgtaaggttcaagctggaattccgttccgagtatcattgccgatgcgtccttcgcattcagctgataaatattggcgattttgccattctgcttgttttgcgttgcacgaataacaaaaatccccgtcgcatcagcgacatcctgattcataccctcagcgttacccagcgcttccgccagggtcataccgctgcggtccattttcagcgtgctctgtttacccacttcacccatcacgaagactttcagatcatcgttgcgcggaataaataaaatatctcccgggtgcagcagtttgttctggcgcaagtcgccacgctgcatcagcgcatagaggttcactttggtctttacgccattctgggtgagcaccacattgcgccagtctgcatctgcggtcagaccgcccgcggcgttnatcgcatccatgatggtcagaggaatattggtaatcggctgctgacccgatttgctgacttcaccggtgacgtacgctttttgcgagcggaacgccgcgacgctgacatcgacttgcgggctttcaatgactgaatccagacgcgctgtaatctcgttgcgtacctgggtaagtgttttcccggccactttcaggcgaccaatataggggtagaaaatcgcaccatcggcgttaacccagttgccggtatcactggcgctacggtattgccctgcgggggtggttagttccgggtgatcccagaccgtaaccatcaacacatcaccaatgccgatacgatattcatagttcgcgatttgctgctccagctccgggttagcctgcgacataatcggtttggcgcgcaactgatcaatcaatcctggcgtgacgggatagatattgaccattttgtccaggtcatactgattgtcaggtagttcaatgacatccttgttactggtcgataaattctgaccaggaacaagggtacatgctgtcaaagacagaacagccaatgtcagtaccgaaaacttaaaaatgttctttttcattggtttatatttatcagtcaatgtaatgttatgaattacgtcaggttattgtccaaccggtacttctcgctctgccgtcattggatagagctggtatttgcgtgacagcatttgtccaccatcacgcgtcaatggtgtccacgaaaccacngcgcggttgcggttaggtccaatggtcatcaagtcgaacggaatcgagatataaaaacctttactaaagccgccttcgccgtagtcatctttagatacgttactgattgccgcccatacccctaccgccacgccgctgtcaaagcgtttggcgacgtcgatcgttgcccctttatcttttgccagatattgcccaacgctaagtttcatcagtacgccattgagcgtcggcgggttccagtaagccgtcacgaaaccagttggcgtggaataatcggtgaagcgcatcatgttgtcccagtcacgctgcttcacgtagttaacgtccacacccagcgcccagctggcatctagcgggcgataaagcagctcggaaccgacaccggcatacatcgtttccagataaccgccatacacctggccatagaaaccattgcctaagtcggcaaagtaattcgcttgcaagttgttgagataaacgtcattgcgaacgtaatcacggatatgcgtgcgcacgcggggcagggtagagtccgcgggcaacagcgaagacttaaacttgtcgtagttgttgtaaatattggtgaaaataccgccatcaagcagcaggtggtcggtaaaccagtagcgggcgctggacatcagccccagctggaacatatagaaatcttccgggccgcccagcgactgtgaaagtgttgggttgaaagagtagctaaagcgatcttcacgaatacggtagccccgaccaaaggcagaaagatcttcagcttcaacacgttgttgttgcagtggctctgattgaccaggcgctgtacctgccagctgtttgcgcaggctggctacgtcggtttcggtagtcaccatcgccatatgctcgcgcttttgcgtcacgctaatcttctcaacgccttgcggcaggttattcaccagaatccggttggcacgatcgaccgcttcacgagagtcacggtatttgtattgctgaccagacatatacagcgtcttatcgcgtagctgaatttctggcgcgtcaaagcccgcgttatacttcagggcggtaagttggtttgctaccgtggtgtactgcaatccttcagattcaggcgcaggttgatatgccggttttggcgtatcgcgcagggcagggcgcagatcgttgaaattggtccgtaaagtgaaaccaaacatcaacgtgttaccgcgttcataactcaggttgaggtctgcccagctggcagcgcgataaactgcaccgacgttgaaatggcttgcctgaggcagtttgccagcgaaatcattctggtaattgtngccgtcgtattcgagtttcagacgcaggggattccacggcgtttgatactcaatgccgccaaagatggaagccgggccacgaaagatatcgctaaagctgatatcgcccgcatcgtgagactctgcgcgatgacaatatttatcgctcacccggcaaaacgggttggtaatattgcccgcattaccggcgtagccccatgccatcccgagggtgaaatcaaatggccccgcttgcttgctggccaccagatactcaccgtcaaacagacccgtaccagcaatatcacgtttaccaaacgccacttgcggtagccagtaaccttcttcccacaggcgaagtttaaaatcgaatgatttgtctttgtatgactgatcgccgctgaaatcttcccactggctatatttacgtgtgcgcacatccgtataacgaatggtgccttccagccatgggaacagcgccacggaggtggagtagaaacggtattgatcgttatcccggtagttgacgctgaattcaccttccggtgcgatgcgcgcatttggcatctgcaacaatcctgtgccgccaaagtccgattgcgacgaacccagcggatccgggtaggttaatacttcagcatgacaggcactggagacggcaatggccaggcagcttaaaagataagaattcttcttcatcagtcaggaacacgttgcgttaaaacagacacaatctggtcatttaaatcagcatatttttcgggcagtacatgcgcagaaaagcctaaccaaagctggctgccaggcggtggttccacatgtcttttattccacagggcaacaggggcgacgacagtctcaccctcaggcgtaatcacgataacgttattcttgtccgcgcctgcaagacgggggtgatcttgcagataatcggtaacgctacggcctgcctgccagggcaattgcccagccccagaaaccgcacccagaagagtaatagtcaccgggcgctgtacggtatagagcgtatagttcccgaccagcgggggattgctgttctcatccactcgtacaaaatcagggtccagtttgaccggtaagcgaccagtaatattgagattgagtaactgctggcgcacggatttaatcgttgccgccacatcgtcgtcagcttctgcttcccaggaagcaagctgtgccatgacatgttggtagtctttaagcgctttagctttcaccgcggagtcggtcagcagggtaccaggccaccagaggcgatcgcgcagttgcggttgtgtcactaactgggcaacattctccacggggccaacggaaagtgtctgttgttcgccaggcagataaatagtcaccgttccttgcgcaaaggcatggggtgtcattacgtaaagtacgctggcaatgaaatacgactgtaatttattcatggtgcgggtttaagaaacgtcatttctacgggaataacccctgcgcctaacatttgccgactttgacgaacctggccagtagccgaatcgacccagaatgtgttttgccactgtttttctggtagcgtggaagtcacctcttcctgccagacattacacagcacatcgcgacccgcaatatgcagcgtctctaatccagcaaaggaaaaagtggaactcagggtcgcagagcgaaaatggttgtctttactccagagaatatcgcgcgtccagcggctgccgtcttttattgccagcgcgttacgcagagggtcctgcccggaatttgtcacttccagcagattattattaagtttgacggtctttaaaagacgtccattgtgggtaaccagcatggcgttatcctgggataaccatttgctttgttcttgttctatatatcccagtaccacaaagattcgttgcccttcattaaggcgtaaatacatcgtggaataaggcaacgcctggatctgctgatccgctacggtgatatcctgattatcgaaaaggctggcgcgaaatgtatcgaccatactttgctggctgtgcgtacatcccgcaagaaatagtgcgaaaatcgataaaataagagggcgcacctttaatccttgaaaggttaattaaaaaaatgcaaatctctaaagcccggtacgaatatcgcaaccgggtattatttaactttaatttcgacgcgtttaagcagaattagcgcgtagtggacgtggtggttgaggtgttatgagaaccgccatcgccactgtcatttgctgcaactactgccaacgtcgccacaccaacagccgttgccacaccgacaactgtcgccgtgccgacagcgccagcagccacgccaccagtggtagcagccgtcgtggttgcaccggtagtggtcgttgtggtgccagtagtacccgtcgttgcctcggtcccgtttgctgcttcaggggcagcaaacgcagctggcgtcgtcaacatgaaggccataaggattgcagaaagcttgtgtttcataacttttcctttattcatcgcatggacaatacgtacgcttgagatcaggattgtctactttgagtataacatccttgtgaaatctccctttcctcataccacttgcactatatacagcgggtgagaaaggcgcgcagagggaaatataagattgttaactattcccctctggaaatacgacctgtgagcataagataaatcttagcaaaatacaaattaaagataagaaaattgttaagaaagctattaactattattggcaatatagtttcaagtggtactataactcgctgttaagtggcatttataactattagttgtagagatattcggttaaatggattagttttccggtgaaaaagtaacttgtgttataatacatggtgttgactattgaactatgccaataaaaccagtcagctttaaacaagcagcgtcatattaagagagataaacatttgccgctgttggtcctcgcaggccatttacgcggcaaaattccacgcgtaatcctggtataagcacttctgcgtcgcggggagtgaatgcggaaatatggacctgaacttctttacgaccgtcggaggggataatgaatcctttgccgcttttgcgatcaaaggttttgacaattcctgtcattttacgggacaaacaaattccttactgaaaatactgcgctgcactatacggggttaataaaataaagccagcgatatttaagaccgcnng

SEQ ID NO: 222 - DNA, 15965 bp, Escherichia coli
  Strain O55:H7
  modified_base (403)..(403): a, c, g or t
  modified_base (415)..(415): a, c, g or t
  modified_base (472)..(472): a, c, g or t
  modified_base (1989)..(1989): a, c, g or t
  modified_base (3274)..(3277): a, c, g or t
  modified_base (8000)..(8000): a, c, g or t
  modified_base (8138)..(8138): a, c, g or t
  modified_base (8595)..(8595): a, c, g or t
  modified_base (8676)..(8676): a, c, g or t
  modified_base (10294)..(10294): a, c, g or t
  modified_base (10307)..(10307): a, c, g or t
  modified_base (11465)..(11465): a, c, g or t
  modified_base (11479)..(11479): a, c, g or t
  modified_base (12735)..(12735): a, c, g or t
  modified_base (12804)..(12806): a, c, g or t
  modified_base (12875)..(12875): a, c, g or t
  modified_base (13095)..(13095): a, c, g or t
  modified_base (13652)..(13653): a, c, g or t
  modified_base (14003)..(14003): a, c, g or t
  modified_base (14475)..(14475): a, c, g or t
  modified_base (15717)..(15717): a, c, g or t
aaatttgcttaatctcaattatcatgcgttaatagctgcgtcggttggaaagacagacagcatacaaagtagtttactaaagcagttctcattatcaggcattatccccttcttttgagtctctctcctgaacactaagtagtttctgtattaaagccctgtttgccgaaaggcccaaaatgaaggaagtaaaatatgtctaataaaatgactggtttagtaaaatggtttaacgcagataaaggttttggctttatcactcctgatgatggcagcaaagacgttttcgtccatttcaccgccatccagagcaatgaattccgcacgctgaacgaaaatcagaaagttgaattttctattgagcagggtcaacgtggccccgcggcagcgaacgtagttacgntctaaggttgcngttattactcaacatctccattttcgctgtccatgttgtcatggttcacagtaccgnacatcggcattcgatgtgacggagcgaaaccctttgggcgctaagtgtattttttgtaaatcgacgatgatcacctttgataacgtcgcgctgcaaatacgcactgaccatgcaccgctggatttcacaaaataatatcaggctcccttgtggagccttttttatatctgtcttattttttttcaacgctgtatgtatagtaagcgataacctgttgattattgaatctttcggggagatggcttataacatttcttacctgaccagggtaccgggaaccaacaccttactggcgtgttgctgtcttttaagaccagaagaggttaacagtgaatattgaagagttaaaaaacaagccgaaacggaaatcgccgactttatcgcgcaaaaaatcgccgagctgaacaagaatacagggaaagaagtctctgaaattcgcttcaccgcgcgagaaaaaatgaccgggcttgaaagttatgatgtcaaaatcaaaataatgtgattttgtgaacatcaccccgtgcgaggtgatgttccgcttgttgctaatttagtgaccaatcattggcgcttgcggaattaagcgtcggtacaattcctccggcactgggctttgccatactcctgcatacattgcgtaaccaatcaccgtaaacataatccccagaaccagtagcgtcattaaccagccagacaacgcaaaggcttttttatttgccgcaggtttttgcagtgaaaaggtcaatgttgaggctaccggacatgactctacgcaagtcatacagccggtacattccactgttcgtacctgaattaatttatcgaccgggatccgtgatgggcaattttttgcgcatttgccacaatcgatacaactttcggcattgcgacgaatcttaaatggcgataatagcgaaaccacgcccatcagcgcgccatatgggcaaagataacgacaccaggcatggcgaataaacaggctggcaatcagcaaaacggtcacgctgattaatgtcgcggtccccatatgacgaaagaaatcgagcattttaacgtccatcaccacgctgtagggcgacaacataaaatagtgaatcgcctgagcaggcatcaataacgcgatatagagaaaaaaactcaacagcaaatactttacaccgcgcagaggaatatccagccagcggggaaggacacattgccgaccaaacagtttgttaccgagagcgccgattaattcagaaagcgtaccaaccgggcataaccatgagcaaaaggcctttttgagtaatagactgatgacgataaaagcgaccaataacagcatcgcggcggcgtggacggacggtaactgacctgttgcaaggctatatttcagattcatcagaccggcaatcggtagccagccttcgatacctcccggtctggcgacaaatatcgtactacctgccgtttcgtaatagcgcacccaataccagaacgtgatggcaatataaatattcattgccaacagcaataantgcgtcgctttacgccaggtcgtggcattgtgccagtcattccacggtaatttgccgcccgtcgtgcctggccgccgctgccagcgggttctttttttctctgccatgattttgccagtccgttaagttgcataccagatgccactattctagttattcttaactggctgatattgattcaaatcgcgttcaggtctttcttattcaaccatgcttccagagcggcaacactgcgtgtaatttcttcgtgtggaaggggggcagataatggctgctgctccagttgtgcgcagagctggctggcgctacgcattcccagactcgagcaactgctttttagctgatgcgcggcacgctttattttctcgctatcctgagtggcgcgggcaatgtcgatttcatcgagaagcggcagggcatgttgtgtaaataatgccagccattcgtggatcttctccgtccccattaactgagcgtcttcattgagttgcgatacatccagtggtagatcgttattggcttgcagttggagatagtgcgccagtaactgaccgagcacttcacgcggcaccggtttagggataatcccgcgaaatagtgaactggtacgctggcgcagcgtttcgtcaatgacatgggcgctaaagccaatcaaaaccagcgacggatattgtcgtgccagttgtcgggcaagcgtaatgccgttgacatccggcagatcaaaatccaccagtgcggcagcaaacggttcgctattttgcagtgtctctaaagcctgcgcggcattgccaatagcaacaacctgcgcaccactggtgttcagcatctcaacggtaattcgctgggttagcgggttatcttcaattaacagcaaacgtaaaccgtcaagacgcaccgcctgattgactgtttttggcacgggtgccgtggcaacacgtaacggcaagcgtaaacaaaaacagcttccaacctccggcgtgctggtggcgctcagttcgccgcccatcgcctgggccagacggctactgatagtcagccccagcccggtgccgccgcgtttgccacttacctgaataaatggctggaagatttctgccagtttcgcgggatcaataccgcagccgctgtcttccacttcgaccagccattgctcaccatcagtacggctacgtaaaacgatctgcccttcgtcagtaaaacgcagggcgttgctcaacaggttggtaatgacctgacgaatacgccgcggatcgcccattaacgcagtcggtacatcgtcggcaannnncgttgccaggcgaatcgggcgacctttcacccgtccactcattaattgcagggtactttccagcagcggtcgcggttcaaagggttcatcgctgaccgaaacattcttgccacctgcttcgatagcggaataatcgagaatatcgttgaggatggtcagcaacgattcgccggagtcggtaattgcccgcaaatcatcacgctgggcgttaagtgcggggttatctgccagtagctgtgcggtgccgagaataccgtacagcggtgtgcggatctcatggctcatcgccgccagaaacgccgattttgcctggctggctttttctgcttccgcccgtgcttgtcggtgttctatcaccagttcctgcaattcagctgtacgcgctttgacctgcgccgccagctgttcgcggtggcgattcagtgcatgaacactgctgcgaaacgcatccatcagccgcccgatggtgtccagctcccgtacgccagcggtttccgggaaaggggagtcaatatcaccgtccagcagccgttgcagcgcctgcgtttgttcggcaagtggacgcgtgactgagcgataaaccacgcgccagaggatcagaatcagtgcgcaaagtgaaacaatccccagcaataacaggctgtattgcccgcgtgcactggctttttccagatgcgccagtccgtgctgattacgcagctcaatggtgtcgaccagctgactgacttcgctgctaaactgcgcgaactgggcgatgttattttgtgcgagagtttgtaggtgattgctgatttcactgtcctgctggaacagcgccagcaaatcgctatattggctaacggtagttaacgttgttgcgacctgagcacgaactcccggatcttcaatgcgtatttgccgacgttgcagaattttcaccgcattattgagctgcttttccagcgttggcgcatttttctggatctgctccagccccagattcatcaccatttgctgcacccgcagagcgctaaggcgcagttcattcatctggttaacatactcaagatcgatatcaatcagccgatcgagtgcactttcagcagcctgacgctgatcttgttcgatcaaatcgtaaatcccggcctgggtcgctccggcggaggttgccgcattattcgcctgaccttgcgccaggcgtgcgatctcatcggcggcagcgactatctgctgactgagtcgctgttgttgctggcgcagttgcagacgccgccccaccagttccccttgctgacgtaacgaacgggagatctcctgctcctgttgttcaatagcggtggtatcaaaaccttgttcccgtaacgcttgcagcaacgcattaatcttcaggctttgtgcggtgagcattcgcccctgcgcctgccacatcttttcgttatcggcactggtcaggttctgcgcggcgaaaagttcccaggcgctggcttcgctcaactggcgcgccatattcatggtaggaatcaatgcctgagtattgtctttttccacctggctgataaagcgcaggttgtaccatcccaccagggtactggtcagggttaacagcgccatcagggcaaagcccatccagagtcttcgggtcagggttaaattcacggtcggtgcacttaaggtgaaaaatgttgagtcgcaaagcggaatgcatctagcataaagccttattattgatgaggctatcatgcgcgtgctgctatttttacttctttcccttttcatgttgccggcattttcggctgataacctgttgcgctggcatgatgcgcagcatttcacggtgcaagcctctatgccgctaaaagccaaacgcgtatggaaactgtgcgcgctttatcccagcctgaaagattcatattggttatcgttgaactatggtatgcaggaggctgctcgccgctacggtgtggatttaaaagtgctggaggcaggcggctacagccagttggctacccagcaagcacaaatcgaccagtgtaaacagtggggcgcagaggccattttgctcggtagtagcacgacgtcatttcccgatctgcaaaagcaagtagcaaatctgccggtgatcgagctggtaaatgctattgatgctccccaggtgaaaagccgcgttggtgtgccctggtttcagatgggctatcaacctgggcgatatctggtgcaatgggcgcacggtaaaccactgaatgtgctgttgatgcccggacccgataacgccgggggcagtaaggagatggtcgagggttttcgcgcagccattgccggaagcccggtgcgtattgttgatattgcgcttggtgataacgatattgaaatccagcgtaacctgttgcaggagatgctggaacgccatccagaaatcgacgtcgttgccggaacggccattgcggcagaggcggcaatgggggaagggcgtaacctgaaaacgccgcttaccgtggtgtcgttttatctttcacatcaggtgtatcgcgggctgaagcggggaagagtgattatggctgccagcgatcaaatggtctggcagggggaactggcagttgagcaggccatcaggcaattacaggggcaatcggtgtctgataatgtcagcccaccgattttagttctgacgccgaaaaatgccgaccgcgaacatatccgccgctcgctgtcgcctgggggatttcgtccggtctatttttatcagcacacatcagcggctaagaaataaccttcgccatgttgcgtcaccagtaaatccgcgctgagtttatggcgtaaacgacgaattaacacatcgacggtgcgcaggtcagggttttccacccgacgcgcagagagcatacgcagcagacgttcacggctgagaatttcgcccggattggtcacaaatgccaccaacatttcatactctgcgcgggtcagtttaatcggctcaccatcccgctccagcgtatggcgcgacacattcaggcaataacccgcaaagcgatagcagttgtcctgagtgtacggttgagcttgtcgcgcgaggtcgattcgccagagcagattttttacccgtactaccagttcgcgcagttccagcggtttggtgacgtaatcgtctgcgcccatttccagcccaacaatacggtcaatccgatcgctgcgtccggtaaccagaataatccccaccgttgagcgttctcgcagggcgcgggttaacatcaggccattttcatcgggcaagttgatatccagcagaattaaatccaccggctgattctgcataatttcccgtagcccggcaccgctcgccgtaacggaaacggtatacccctcctgagtgaagtaggattgtaatcgcgcctgggtaaccggctcatcttcaacaataacaatgtgatgtggcatcagagggttttactcattctgttcatatctgttcatattctgccgtaagccgttcatcctgaccagtgccgctgttcatatttactcattaagatcgcttcactaaaccataattttacaggggctattatgcggaaactctggaacgcgctacgccgacccagtgctcgttggtcggtactggcgctggtcgctattgggattgtgattggcattgcgctgattgtattgccacacgttgggatcaaagtcaccagcacaaccgaattttgtgtcagttgccacagtatgcaaccagtgtatgaagaatataaacagtcggtgcatttccagaacgcctccggcgtgcgagctgaatgccatgactgtcatatcccgccggatattccaggcatggtgaagcgcaaactggaagcgagcaacgatatctaccagacctttattgcccactccattgatacacctgaaaaatttgaagccaaacgcgcggaacttgccgagcgtgaatgggcgcgaatgaaagaaaacaactcggcaacctgtcgctcctgccataactacgatgcgatggatcatgcgaagcagcatcctgaagcggcacgtcagatgaaggtggcagcgaaagataatcaatcctgcatcgactgtcataaaggtattgcccaccagttaccggatatgagtagcggcttccgtaagcagttcgatgagctgcgcgccggtgctaatgacagtggtgacacgctgtactctattgatattaagccaatttatgcggcgaaaggcgataaagaagcctctggttctctgctgcctgcctcggaagtgaaagtccttaaacgtgacggcgactggctgcaaattgaaattaccggctggacagaaagcgccggacgtcagcgtgtactcacccaattcccaggtaaacgcatctttgttgcctcgattcgtggtgatgtgcagcagcaggtaaaaacgctggagaaaaccaccgttgccgacaccaataccgagtggagcaagttgcaggccaccgcgtggatgaagaaaggtgacatggtgaacgatatcaaaccgatctgggcttatgcggattcgttgtacaacggcacctgtaaccagtgccacggcgcaccggaaatctctcactttgacgctaacggctggattggcacgctcaacggcatgatcggctttaccagcctcgataaacgtgaagaacgcaccttgttgaaatatctgcaaatgaatgcgtctgacaccgcaggtaaggctcacggcgataagaaggaagaaaaataatgaacaatancgatctctttcaggcatcacgtcggcgttttctggcacaactcggcggcttaaccgtcgccgggatgctggggccgtcattgttaacgtcgcgccgtgcgactgcggcgcaagcggcgactgaggctgtcatctcganagagggcattcttaccgggtcgcactggggggctatccgcgcgacggtgaaggatggtcgctttgtggcggcaaaaccgttcgaactggataaatatccgtcgaaaatgattgccggattgccggatcatgtacacaacgcggcgcgtattcgttatccgatggtacgcgtggactggctgcgtaagcgccatctgagcgacacctcccagcgcggtgataaccgttttgtgcgtgtgagctgggatgaagccctcgacatgttctatgaagaactggaacgcgtacagaaaactcacgggccgagtgccttgctgaccgccagtggttggcaatcgacggggatgttccataacgcttcggggatgctggcgaaagctattgccttgcatggtaatagcgttggtacgggcggagattactctactggtgctgcgcaggtgatcctgccgcgcgtngtcggttcgatggaagtgtatgaacagcaaacctcctggccgctggtattgcagaacagcaaaaccattgtgctgtggggntccgatttgctgaaaaaccagcaagcgaactggtggtgcccggatcacgatgtttatgaatattacgcgcagttgaaagcgaaagtcgccgccggtgaaattgaggtcattagcatcgatccggttgttacatccacccatgagtatctggggcgcgagcatgtgaagcacattgcggttaacccgcaaactgacgtgccgctgcaactggcgctggcgcatacgctgtacagtgaaaacctgtacgacaaaaacttcctcgctaactactgtgtgggttttgagcagttcctgccgtatctgctgggtgagaaagacggtcagccgaaagatgccgcatgggctgaaaaactgaccggcattgatgccgaaaccattcgtggactggcgcggcagatggcggcgaacagaacgcagattattgctggctggtgcgtacagcgtatgcagcacggtgaacagtgggcgtggatgattgtggttctggcggcgatgctggggcaaattggcctgccaggtggtggctttggttttggctggcactataacggcgcaggcacgccggggcgtaaaggcgttattctgagtggtttctccggctctacgtcgattccgcctgttcacgacaacagtgattacaaaggctacagcagcaccattccgattgcccgttttatcgatgcgatcctcgaaccggggaaagtaatcaactggaacggtaaatcggtaaaactgccgccgctgaaaatgtgtatttttgccggaactaaccccttccatcgccatcagcagatcaaccgcattattgaaggctggcgcaagctggaaacggttatcgccatagataaccagtggacctcaacctgccgctttgccgatatcgtgctgcctgcgaccacgcagtttgagcgtaacgatctcgaccagtacggcaaccactccaaccgtggcattatcgccatgaaacaggtcgtgccgccgcagttcgaggcgcgcaacgactttgatattttccgcgagctgtgccgccgctttaatcgcgaagaagcctttaccgaagggctggacgaaatgggctggctgaaacgcatctggcaggaaggtgttcagcaaggcaaaggacgcggcgttcatttgccagcgtttgatgacttctggaataacaaagagtacgtcgagtttgaccatccgcagatgtttgttcgccaccaggcattccgcgaagatccagatctcgaaccgctgggcacgccgagtggcctgattgagatctattcgaaaaccatcgccgatatgaactacgacgattgtcaggggcatccgatgtggtttgagaaaatcgaacgctcccacggtgggcccggctcgcagacgtatccgttgcatctgcaatctgtgcatccggatttccgacttcactcgcagttatgtgagtcggaaactctgcgtcagcaatatacggtagcgggtaaagagccagtgttcattaacccgcaggatgccagcgcgcgcggtattcgtaacggtgatgtggtacgcgtctttaacgctcgcggtcaggtgttggcaggggcagtagtttctgaccgctatgcacccggcgtggcgcgaattcacnaaggggcatggtncgatccagataaaggcggcgagcctggtgcgctgtgcaaatacggtaaccccaacgtgttgaccattgacatcggtacttcgcagctggcgcaggcgaccagtgcgcacactacgctggtggaaattgagaagtacaacggaacagtggagcaggtaacggcgtttaacggccccgtggagatggtggcgcagtgcgaatatgttcccgcgtcgcaggtgaaattatgaccacgctgacagcacaacagatagcctgtgtttacgcctggctggcgcagttgttctcccgtgaactggacgatgaacaactgacgcaaatcgccagtgcgcagatggctgaatggttttcgttgctgaaaagcgaaccgccgctcactgcggcggtggatgagctggaaaaccgtgttgccactctgacagtacgtgacgatgcccgtctggaactggccgctgacttttgcggcctgtttctgatgactgacaaacaagcggcgctgccgtatgcatcggcctacaaacaggacgagcaagagattaaacgcttgttagttgaggcagggatggaaaccagcggcaatttcaacgaaccgacagatcatctggcgatctatctcgagttgttgagtcatctgcatttttcgctgggagaggggacggttcctgcgcgaagaatcgacagtttacggcaaaaaacactcacggcgttgcggcaatggttaccagagtttgttgcgcgttgccatcagtatgacagctttggtttttacgcggcactaagccagttattgctggtgttagttgagggcgaccaccaaaacagataacgtcgtttgttagcctgataagacgcgtttagcgtcgcatcaggcattagggcaccgccgccggatgcggcgtgaacacgccttatccggcccacaggaaaagtactctttgcaggcaggctaagatgcgtcatcacatccggcaaacacacatcacggatgagctacaaaccgggaaagccgctggcgcagcaggcggttttcctgcttcaggtgcgcaatatcatccattaacgtcagcgccaccgcgatccccggccagtccagagccagttcatgacgcaggcgcaccgcgcgttgcaccacgatggcggcatggtcgtcaaatacccnggttgtttcctggntctcacgcggttcaaccacccccaaaccgacaatttcattcaattcctcttcagagatgccggtatgcaggcaaaattcggtaatagtaaaagtcaccgtaacattagccattatgctttcccccaatctttacgtggatcaaaagacgactgggcgtctgccagttgctgccacagcgcggcagtgttttcatccggtttcggcggcatcacgattttcagtaccgcatacagatcgccggtctgttttttgctcaccagacctttgcctttaacgcgcaatcgttgcccggcctggctgccaggcgggatagtcagcaaaatgctttctttcagtgttggaacggtgactttagcacccagcgccgcttcccacgggctaaccggcaccacaatttccagatcctggccgacaatatcaaacagcggatgtggcgcaatatgaatcaccagccacaaatcgccatttggaccgccgttttcgcccggcgtcccctggcctttcaggcggatgcgttgaccattgccgacgcctgccgggatcttcacattcagcgttttcgggatttcctgttcgatcatgccaaaggcgttataaaccggcaggttatagctgatggtacgcttatgctcagtaagcgtttcttcgaggaataccgccacttcgatttcaatatcgtggccgcgtgcggcggggcgttgacggctctggcgggcatgctgaccgaaaattgacgagaagatatcgtcaaaatcttcggcgttaaaactctgaccgtcgccatgctgaaactgacggctaaattgcggatcgttgcgatgttgccacatctgatcatactcagcgcgacgttgttcatcacttaacacttcccaggcttcagcgacctctttgaagcgggcttcggcatccggttctttgctgacatcaggatggtatttgcgggcaagtcgacgataggcggtcttgattgtcttgagatcgtccgtcggtttcacgcccatgatggcgtaataatcctttaattccatagcgttatctcgcgtaaatcaacacaaattgaaggaacccctgtaaggtaactcctataagtgtagggtaatcctcaaaatttcatatgccaacacagaatatgttattgaaatcatcgcggagaggaggtcgcctcaaggtggggcgctgaacatattttaaacaggtgaaaaagggtgagcgatttttgatagttgaaacaggcactttaagttttactagngcgtcattatttattaaattttataggcgctatatatgggtaatatacatggaattagttgcactgcannnaattatttgaagcaagcctggaacgatataaaaaatgagtacgaaaaaaataaaacatattcaatcacnctttttgaaaacacactggtgtgttttatgcggttgtataaagaaatcagacgtcaacaagctgaagactacattccatgcctggaatgcgattcactagaaaaagaatttgaggaaatacagaatgataatgatttatcattatttatgaaaacattgcgtactaatgataaacaaatttattcagggggttcaggaggtattacatatactatacaanatgttgaagatgttgatattgttagagtatccttgccgggtagaggttcagagtctatcacagattttaaaggttattattggtatggctttatggaatatattgaaaacattaatgcgtgtgatgatgtttattctgattattgttttgataatgatgaaaatatgagtatccagccagaatggataaatacgccgggaatatctgatttagattctggtattgatttgtctggtatatcttttattcagagtgaaattaataaaacttatggattaaaatacgctccagtagatggcgatggctattgtctgttaagggccatactggttttaaaagaacatgagtattcatgggcgctgggcagccataagacgcaaaagcaagtatacgaagagtttattaaaattgttgataaacaaacgatcgaggctcttgttgatacggcattctataatctcagggaagatgtaaagacgttatttggcgttgatctacaatctgacaacaaaattcaggggcagggtagtcttatgtcatggaactttctgtttttnnaaaaaagaatttattgatagttgcttgaatgacaaaaaatgcatactgcatttacccgagtttatatttaatgataacaaggcgcgccttgttttagacaccgacccagagaagaggattaatgaggtgaaaaatttcctcactgctctttcagatagcatttgctcattatttattgttaatagtaatgtggcatcaatctccttagggaatgaatccttttcaacagatgaagatcttgagtatggttatttaataaacactggcaatcattatgacgtttacctccctcctgaactttttgctcaggcttacgagttaaacaataaggaaaggaatgcgcaaattgnttttttaactcgttatgcaatttaatgacagaggcatatgctaaaaaccattgttattagtctcacacttttttattggtaaatattgcctctgtattggtaacgccgccgatattctgtttagccacaggtgcaatcatcagcggcgtacgcgaggcaggggctaatcaggcatagtttgcgtcaaaccttgcctgtttttaaagatgaatataaaaacagccgttcaacaagccattttgcgaacctgttcccggaaaaaagtcatatttctgtcacactctttagtgattgataacaaaagaggtgccaggaatgaacaaaacgctaatcgccgcagctgtggcaggggtagttttactcgcttcaaacgctcaggcacaaaccgtaccggaaggctatcagctacagcaagtgctcatgatgagccgccataacttacgtgcgccgctggcgaacaatggcagtgtgntggagcagtcgacgccgaataaatggcccgaatgggacgtccccggtgggcaactcaccaccaaaggtggcgtactcgaagtgtatatgggccattacatgcgtgaatggctggcagagcaggggatggtaaaatcgggggaatgcccgccgccggacaccgtttatgcctatgccaatagtctgcaacgtaccgttgcgaccgcacagttctttattaccggcgcattcccggggtgtgatattcctgtgcatcaccaggaaaaaatgggcactatggacccaacctttaacccggtgatcaccgatgattccgccgcattcagtgaacaggcggtggcggcaatggagaaagagctcagcaaactccagcttaccgacagctaccagctactggaaaaaatcgttaactataaagattcccctgcctgtaaagagaaacaacagtgttcgctggtggatggcaaaaatacctttagcgccaagtatcaacaagaaccaggtgtttccgggccgctgaaagtcggcaactcgctggtagatgcgtttactttgcaatactacgaaggttttccgatggatcaggtggcctggggagaaatcaaatctgaccagcagtggaaggtgttgtcgaagctgaaaaacggttaccaggacagcctgtttacctcaccggaagtggcgcgcaatgttgcgaaaccgctggtcagttatatcgacaaagccctggtcaccgatcgcaccagtgctccaaaaatcacggtgttagttgggcatgactccaacattgcctctctgttaacggcgctggatttcaaaccgtatcagttgcatgaccagaacgaacgcacgccgattggcggcaaaatcgttttccagcgttggcgtgacagcaaagccaatcgcgatttgatgaaaattgaatatgtgtaccagagtgcggaacagttacgtaatgccgatgcgttaaccctgcaggcacctgcgcagcgcgtgacgctggaattaagcggttgcccgatagacgctgatggtttctgcccgatggataagtttgatagcgtgttgaatgaagcggtgaaataacagaaaactcccccgttcgctacgggggagtcgctggttaaacgtttttacgttcgatggtctgttcgccccaaaaaagcgaatctttgtcggtcttagcaaaggctttgactaacacttcatcgctaccttcttcccaaatcttttccgccatttnttcgtcgtacccggcgacttcgaaaatggcctcggctatttccggcgacgtattgcgcagagatgcccattcaccgacgtgatgagctttcgcttcttgagttggcatgcgtatcctcctgttgaagattagccattaagtttaactgccagacctgcgacatattccccttgataacgagcaatagacagttcttcctggctgggctggcgtgaaccgtcaccgcctgcgatggtggttgcgccgta

SEQ ID NO: 223 - DNA, 610 bp, Escherichia coli
  Strain O55:H7
  modified_base (175)..(175): a, c, g or t
  modified_base (271)..(271): a, c, g or t
taccgccgcgaacctgtgaaacgtcaaataattcctgcgctgcgtagccaatggggacaatcaccatgccgtgatgcgcaagggtcgtccaggtggatgtgatggtttgttcctgaccgccgccagtaccggtggaactaaagacgctcgccagttttccgtatagtgcgccggnagcccacaggccgcccgtctggtcgaggaaggtacgcatttgaccggacatgttgccaaagcgggtaggtgtaccaaaaataatggcgtcgtaatnggccagttcttgcggggttgcaaccggtgcagtttgcgttttaccgcctgctttttcaaataattgcggcgacatggtttccggtacacgcttaacgacaacttcagcgccatccactttgcttgcaccctcagcgactgcgcgtgccatcgtttcaatatgtccgtacatggaataataaagcaccagaactttagccatttctaaccactcctcgtgttatctctattccgtagcgattcgctaccacttatttaaagataagacgtccttttcagagtgcaaatttcacaaccacttatttgatttataacaactttcacaagcacgcaattttgt

SEQ ID NO: 224 - DNA, 2228 bp, Escherichia coli
  Strain O55:H7
  modified_base (458)..(459): a, c, g or t
  modified_base (1521)..(1521): a, c, g or t
  modified_base (1823)..(1823): a, c, g or t
cacatttttatctcatcgcgtttttttaatcataagagcggcttatggataattattggagatgatatctattctcgctaagaagctgttgcaggatattaccaaacgcgggtagaaacacgtcagttcactaagcttagtcccacgtagcgaaaatatggcagccgccatacgccgcgttaattctatgcaatatgatgtctatacccagacggaggtcagtaatggcaaaccatcgaggcggttccggcaattttgcagaagaccgcgaaagagcatcagaagcaggtaaaaaaggtggacagcacagcgggggtaatttcaagaatgacccgcagcgcgcatctgaagcaggtaaaaaaggtggcaagagcagtcacggcaaaagcgacaactagccgggctaatcaatgacgaatgcatttttttcttaagctcgtcaaaaagccatcaccgcnngtaaccccggcggttttctgtttatggctcctgatgaacaacttctggcggtggaacgtcaaccaaccttctgcttaataacgcattgagtaaaatcgcgccaaaggttgctgtaccgattcctcccaacgtaaaaccgcccagcgtgagagcaaaatcacccgcgcccagcactaaggttactgcgaccataatcaaattaccgttctggcttaaatcgacacggttttgtacccatatccttgcgcctgcgacggcaatcagcccgaacacaacaattgatgcaccaccaatcaccgcggccggaatggtatgaatcagcgcgccaaatttcggtgaaaagcccaacagcatggcgatgacggcagcagcaacaaacaccagcgtcgagtagacttttgtcacggccatcacaccgatattttcagcataggtggtgacgccgctactgccgacagaaccagaaagcatcgttgccagaccatcgcctacgaatgctcgccccatatacgggtccatattgcgtccggtcatcccggcgaccgccttgagatgacctaagttttccgccaccagaatcaccgccacgggcgcaatcagcatcattgcctgaccattaaaagcaggagtggaaaaatgtggcagaccgaaccaggcagcatggctgacgagagtaaaatcgacggcttttcccagccctaaaacgttggtcatcacgccatacagcagacaggcgacaattaatcctacaagaatcaataaccgctggatcatgccacgggtaaacaccgccaccagcccaatacacagcaccgtcattaccgccatccagctatcaaagcctgaagccgatacactttttaccgcgataggcgctaagttcaggccaatcgccatcaccaccgcacccgtcaccaccggcggcattagccgttcaatccagcgcgtaccgattttcatcaccaccaggccaatgacggtataaaccagcccacaggcgataatcccgcccagcgcaatgctgatattcgggttaatgccctgaccgttaaagcccgttgnggcgatcaccacgccgacaaaagccgcgctggagccgagataactgggcacgcgcccgccggtaataaagaaaaacagtaacgtgccgatccctgacattaaaatggaaagattgggatccagccccatcagaatcggcattaacaccgtcgcgccaaacatcgccaccgcgtgttgaacgcccattactgccgtctgagcaaacggcaatcgttcatccggcgcgaccacgccgctctctgtagaggtcgattttaactgccagtgaggaagaccgaacattgccatcagctgtctccttnaggaggttaacaagcagggcgcatcagcgcgtgataactgcgatcgaaccacaccagcccgtagggggtggcgtgacgatgaatcgcttcgatggcgcaaaacaaaatgtcgtgggtgccgacgctcaccacctggctgatacggcagtcaaacgaaaccagcgcctcttccagttgcgggcatccggtcacaccagtctgccagcgggcggcggcaaagcggtgttccatgggcgttttgccgccaaaaaggtttgaaagcggctcctgcccggcgctaagtgtatttacacacagcgttcgattttcattgaataccggccagacggacgccccacgattcaggcacaccagtaatgtgggaggcgtgtcggtcacgctgcagacggcgctggcggtgaaccc

SEQ ID NO: 225 - DNA, 15077 bp, Escherichia coli
  Strain O55:H7
  modified_base (1118)..(1121): a, c, g or t
  modified_base (1123)..(1126): a, c, g or t
  modified_base (3024)..(3025): a, c, g or t
  modified_base (3701)..(3701): a, c, g or t
  modified_base (3915)..(3915): a, c, g or t
  modified_base (4344)..(4344): a, c, g or t
  modified_base (7281)..(7284): a, c, g or t
  modified_base (8098)..(8098): a, c, g or t
  modified_base (12002)..(12004): a, c, g or t
ccggctggaccgtccgtggtgatgatattgaccgccgcgcccatgcaggacatcgcatcgcgaaaagtttgttgatcgacaatgttcatagtttgctccttacaacagcccgcaggcttcttcaaaggacagacgtggcaggcgcgcaaaaagtttgctgctatcgccatagccgatattaatcagcagattgctcttcagcgtgctgcctgcaaaaaaagcgtcgtctacgtgttgacgatcaaaacccgacatcgggccggtatccagccccagcgcacggcaggcgatgatcagataagccgcctgcatggaactgttgcgaaacgctgcttcttcggcaagttgtgggctggaggtaaaccaactgcgggcatcgccgtgaggaaacagttgcggtaaccgttcataaaattcactgtcccatgcgacgatagcggtgacgggcgcggtcagggttttttgcagattgccgctggaaagcgccgggcgcagacgttcttttccctctgcagtgcggataaacacgatacgtgccggagaacagttagctgatgtcggcccccatttcatcagggcataaagctcccgtaacgtctcatcgctgacgggtgtctcccgccagccgttgtgagtgcgggcatcggtgaacagggtgctaagcgcacctgggctaacggcttcgttcatagcaattccttacagggcggcttcacggtgatgtaacaggctggcaagcccgttgagtaacagagcattaaacgtttcgggatcggtcacgttgcaggcgtgtccgccatagcgcatcaccattttctggctatcgggcagggcggcatgaagttcactggaacatgctgatggcaccagcagatcatcactggcgcagatgatttgcaccgggcagcggatgcgatccgcatggtgactaaagtcagcgcgtttgagggcgttaagtcgacgcagtaaattatttttgccctgaaaatgcgccagtgccagcgcgtcttctgcctcaaggcgaggtgcgcgggccgccatccagtcggcgggatagaggaacaacggctgcgcttccacccatgcctgcgcgccaccgctatacagtaatcgttcgnnnncnnnnaaacagcggcgcgtatgggcgtttattcgtagccagccgttaacgcagaccagcacagttaccgacgcgggatgatccagcgccagctgcattcccaccagcgcaccgagcgcatggccgaccactgcgtaatgctcaatccctgcggctaccagcgcctgatgcagttccgctgccatctgggtgatactgtaatcttctgccagcgtgtcgggattattgccggtgccgcgctggtcgtaacagactacctgatactcctgctccagcaccgccagttgcggtaaccagtaactgccgctaccgccaagacccgaaatcaacaccactacgggcgcatcagcataagggggaggtgagagtgaaagtttcatcgcggcctcacttggcgatatgcgcaattgtggcgatttccaccagcgcgtcaggttttaccagtccgcactgaatgcagaatcgcgccggtttatcacctggaaaaaactcggcgtaggtttcgttaatcgcggcgtaatttttccagtcggtaataaagatgctgttgaaggtcacatccgccatcgtgccacccgctgtctcgattaccttgcggatagtttccagaacgtggcgggtttgcgcctttgggtcatcggcaaacagcacgttattgtgttgatcaaaagccagcgtaccggagacatacaccacgccatcagccagcgtgccgggaacgaagggggccagcggtgcgctgctgccagcgggaataattacggattttggcatcgttaaactccttaagcgatacgagcaaaggacgtgggagaaagcgcgtcgcagaacgtttcgacgtcgctgacccagccaaaaaaggtttcgatattgaacaacgcggctttctgtacaaattccggccccgcctggtgtgttgcgtcttccagcaccacgccgaaatactccagaaaaaagccatcgcgtagcgtcgattcgacgcagacgttggtagcgatgccggtgaaaaccagatggcgtattccgcggctgcgcaaaatgctgtccagcggcgtattgaagaaaccgctgtagcgcggcttcggcagcacaatatcgccaggctgcggcaccagttcatccaccagttgataatcccaggagcctttcgccagcaatttcccctgcagctgcggctgtttacgcatggttttcagggcgttcgatttatgaaaattcggtgagccagggccgccagcctcgacatactgttcatcccagccattttgaaaccagatgatcaacatccctgccgctcgcgctgcggtcacggcggtttgaatgttggcaatgaccgggcgagtggttgagacatcaaacccggcgagatctaagtagccgcctggcgtggcataggcgttttgcatatccaccacgatcagcgcactttgctgcggatcgaaggtaatggcttccggtcgagcggttaatgtcgtcatcatgccacctcctgagtcagcacagggagatgggcgcggcactgcatcagtggttgaatgcgctcgccgaaggtttcgattcccgacagaaaatcgtcgaaggttaacagcacgccttcggcaccaggcacgcttgcgacttcatctaacatgcgcgcgacactggcgtaagaaccgactaacgtccccatattgatgtttaccgccgaagtgggatcggccatctgacggacgttggtgtcagtaccggagcgggtatctttctgactttgttcggttagccagcttaacgcctcttcatccgcgcccgctttgtagtgttcccatttggcgcgagcggcatcgtcggtttcatcggcaatcaccataaacaatacataagagccaacgtcgcgcccggtttgctctgcggcctgtttcatccgnncagcggtcggggcgaaagccgtgggtgtatttacgcctttgccgaaacagaagttgaaatcggcatactgagcggagaacgccatgccagcgtcgctttgcccggcgcagatcactttcatggggacactcggttgcggactgacgcgacaatcattcatggtgaaaaaatcgcctttaaaatcgctttttcccgtgccccacaggtcgcgcagcacctgaacatactcggtgagatagtcgtaacgacgggagaaatagtcatcgccaggccagatacccatctgctcatactcgggcttttgccagccagtcacgaggttgacgccaaaacgcccgccagagatggagtcgatggttgcggccatacgggcgacgattgccggaggtaacgttaaggtggcggcggtggcgtaaatctgaatgcgcgaggtcacggccgccagccccgccatcaaggtgaacgactcaaggttgtgatcccagaactcagttttgccgccaaagccacgcagtttgatcatcgacagggcgaaatcgaaatggtagtgctccgctttttgcacgatggctttattcagttcaaaggtcggcatgtactgcggcgcgtgggtcgaaatgagccagccgttgttgccaataggtacgaatacgccaattttcatcatcaacctctnttcgtctcgtaaagtgaaagtcagacggggcgctgcatcctgcatatccttttcagccgcgtattggcttgtttgcaaagcggatgccagtttttaaaaagggagtgttattaatgtgttaacatcgcgttatctaaaatgtctggtaaaaagtggactaaacggtcaaaacagttgcacataaaacatgcatctgtgcgcgatgagagtgcanaaggtcgaggccgggcgggggttttgctatcctgttgccaatctacaagaggggagagcgcatgacgcaaggcgcagtgaaaacaacgggtaaacgttcgcgcgcagtaagcgcgaagaaaaaagcgattcttagcgcagcactggacactttttcacaattcggttttcacggcacacggctggagcaaattgcagagttggcgggtgtttcaaaaaccaatctgctgtattactttccgtcaaaagaggcgctgtatattgccgtgctgcggcagattctcgatatctggctggcaccgttaaaagcgtttcgtgaagatttcgccccgctggcggcgatcaaagagtacatccgtctgaagctggaagtctcacgcgattatccgcaggcttcgcgcctgttctgtatggagatgctggcaggcgngccgctgttaatggatgaactgacgggcgatttgaagtcattaattgatgagaaatcggcgctgattgccggttgggtcaaaagcggcaaactcgcgccgattgatccgcagcatttgatttttatgatttgggcttccactcaacattacgccgatttcgcccctcaggtggaggcggtgacaggcgcaacgttgcgcgatgaggtatttttcaatcaaacggttgaaaacgtgcagcggattattattgaggggattcgaccacgctaatgatgccggaggagggtgtaacatcctccggctacctgtttaaccgatcgtcattaagctggcgttaccgccagcggcagcggtattcacactcagcgaacgctcgatatacagccgttccagcaggatattgctttcgccacgggcaaaaccctgcaccgaaacaattgcgccatcccgcgcggcaactgcttcacacaatgcgcgaagctgatccgaatcaccgtggaagatcaccgcatcaaacggttgagcggtaatattttccgctttcgccagttgaatacgctcgctgacagtcgatggcaatgccttcactaactgacgatgcagcgcgtcatctggccacagcacctggctgcccaccgccagcacggcggcgagctgagtcagcgcatcctgttcatcatccgcgatacacaatacgcgctcacgcggcagcagcgtccaggtgttgcgctcacccgtcggccctggcagcaatcgttgtgttcctgcctgcgccagctcgccatattgcgtacataacgcctgcaattctggacgatttgctgcccattcccgcagtgcatttagcggctgagtcaatgcggctttcaactgcgcatcgaccggatactctgcatcctgacgcgcgagtgtcaccgccagcgcactttccgggcgattcgccagcagacggtagagatagagcggaccgcctgctttcggcccggtaccggacaacccttcgccgccgaatggctgcaccccaaccactgcgcccaccatattacggttaacatacaggttaccaacatgggctgagccagtgacctgggcgatggtttcatcaatacgcgtatgaacgccaagcgtcagaccatagccggaagcgttaatctgctcgatcagctccggcagctgattacggttataacgcaccacatgcagcaccggaccaaagacctctttttgcaattcggcaaagtcatccagttcgatcagcgtcggggcgacaaaggtgccgctttgccattcacgggcatcttcgctgttttcccgcaccgcctggaacaccggacggcctttgctacgcatggtctgaatatggcgctcaatattggctttcgcttcgctatcaatcaccggaccgatatcggtggtcagacgacccggattacccatccggcattcggccattgcgccgcgcagcattttcaacgtgtggtcggcaatctcatcttgcaggcacagcacgcgcagcgccgaacaacgctgacccgcactgtcgaacgccgaggccagcacatctattacgacttgttcggtcagtgctgaagaatcgacaatcatcgcgttcatgccgccggtttcagcgatgagcggaatagggcgaccctgagcgtcgaggcggctggcgatattgcgctgcagtaacgtagcgacttcggttgaaccggtaaacatcaccccgcgtacgcgatcatcacccgtcagttgcgcgcccacggtttcaccccgacctggcagcaattgcaccacgcctggcggtacgcccgcttccagcaaaatggcgatcccttgcgcggcaatcagtggcgtttgttctgccggttttgccagtacgctgttacctgccgccagtgcggcagcgatctgcccggtgaaaatcgccagcgggaagttccacgggctgatacataccacaggccctaatggacgatgggtttcgttagcgaaatcatcccgcacctgtccggcgtagtagtggagaaaatcgaccgcttcacgcacttcggcaatggcgttactgaaggtttttccggcttcacgcaccagaataccaatcagttgctgcatctggctttccatcagcacggcagcgcgatgcaaaatcgccgcgcgttcagccggaggagtggcaaaccagattggcgcgttattaaccgcactttccagcgcctgctctacttcacgcggcgtggcttcacgtacatagcccacaatatctttcggttccgccgggttaataacgggcgacatctcacctgccgctaccggttgttccagcattggcaaggcctgccatttttgcagtgcactattgagcagggcagaagagagggatgccagacggtgttcgttagcgagatccagccctgccgagttgtcgcgcccgtgaccgtaaagatcgcgcggcaggggaattttcggatgcggtaatccagtttgcccttcctgttgtgccagtttttctacagcagtgaccggatcggcgaccagttcatccagtggcaaagaggtatcggcaatacggttaacaaacgaggtgttagcaccgttttccagcaggcggcgcaccagatacgccagcagcgtttcatgtgtgccgaccggggcataaatacgacacggacggttaagtttgccgtcggcaactttcccggtgacctgctcatacagcggctcgcccataccatgcaggcactggaactcgtactgacccggatagtagttctgacctgccagttgataaatcgccgccagcgtgtgggcgttgtgcgttgcgaactgcgggtagattagattcggcaccgccagcagctttttcgcacaggcgagataagaaacgtcggtatataccttgcgggtataaaccggataaccttcaaggccgtccatcnnnncgcgcttgatttcactatcccagtacgcgcctttcaccaggcgaatcataagacggcgacggctgcgggtggcgagatcaatcaggtaatcaatcaccagcgggcagcgtttttgataagcctgaataacaaaaccgatgccgttccagcctgccagctctggctcgaaacagagtttttccagcagatcgagggagatctccagacgatcggcctcttcggcgtcaatgttgataccaatatcgtactgacgcgccagcagggtgagtgatttcagacgcgggtaaagctcttccattacccggtcatactgggcgcggctgtaacgcggatgcagcgccgacagcttgattgaaatgcccggaccttcatagatgccacgaccgttagacgctttaccaatggcgtgaatcgcctgctgataggaaaccatgtacgcctgtgcgtctgcggcagtcagtgcagcttcgccgagcatatcgtaagagtaacggaaacctttctcttccagcttgcgggcattggctaacgcttccgcgatggtttcgcccgtgacgaactgctcgcccatcaggcgcattgccatatccacacctttgcggatcagcggttcaccgctcttaccgataatgcggttcagcgagcgggagaggctggcttcgttatgggtggaaaccagtttgccagtaaacaacagcccccaggtagcggcattaacaaacagtgacgggctacgaccaatgtgtgactgccagttaccgttgctgattttgtcgcgaattaacgcatcacgggtggctttgtcgggaatacncaacaacgcttctgccagacacatcagcgccacgccttcctgcgatgacagcgaaaactcctgcaataacccctggaccatacctgcgcggccactggcatttttttgattacgcagtttatcggccagttgatacgccagtttgtgtgcctgttcagcaactggttgcggcaggcgggcttgttccagcagcatagaaaccgcttcggtttccgggcggcgataggccgcggtgatcgcagcgcgggaaaccgactggggcaaaatttgctcggcaaagtcgaggaatggctggtgtggttcctctgccggagtcggtgcttcatcgctctcattggcagcgccagaaagcagcacaggtagctctggcagagtatcgctgttttccagttgttcgagataagaaaaaatcgcctgcttaattaaccagtgtggcgtgcgatcgatacgtgtcgcggcagacttaatacgctcacgcgtcgcgtcgtccagcttaacccccatggtggtggttcccatgccattactcctgttgttctgaaaggtgcaacttaacgttatcgtgaaatatccatgatgttgcaactttgtgcaaccatgttaaatgtgacctgcgtagcaagcttaaaaatgaatgaaatgttaataaaagaaatcgatatgacagggattaaaaaaataactcagactttttctctgcggcagttaacatttttgaaaggtgcaaccgcaaaaaatgtgagagagtgcaacctgatgaaaaatagtgtcgctgagcactaaaatttaatgtaaatggtgtgttaaatcgattgtgaataaccagcgcttccggcaggatacggtcgccctggtaaaacataaactctgttaccccgttccggtggcagatataacggcaagtttcgacattgccgataataattttttggagactttagatggctattagcacaccgatgttggtgacattttgtgtctatatctttggcatgatattgattgggtttatcgcctggcgatcaacgaaaaactttgacgactatattctgggcggacgtagccttgggccattcgtgacggcattatcggcgggtgcatcggatatgagcggctggctgttaatggggttgccgggcgcggtttttctttccgggatttccgaaagttggatcgccattggcctgacattaggcgcgtggattaactggaagctggtggccgggcggttgcgtgtgcataccgaatacaacaataacgccttaacattaccggattatttcaccgggcgttttgaagataaaagccgcattttgcgcattatctccgcgctggtgattttgctgttcttcaccatttattgcgcttcgggcattgtggcaggcgcgcgtctgtttgaaagtacctttggcatgagctacgaaacggctctgtgggcgggagctgcggcgacgatcctttacacctttattggcggtttcctcgcggtgagctggactgacactgtacaggccagcctgatgatttttgccctgatcctgacgccggttatcgtcattatcagtgtcggtggctttggtgactcgctggaagtgatcaaacaaaagagcatcgaaaacgtggatatgctcaaagggctgaactttgtcgccattatctcgctgatggggtgggggctgggttacttcgggcagccgcacatcctggcgcgttttatggcggcggattctcaccacagcatcgtccatgcgcgtcgtatcagtatgacctggatgatcctctgcctggcaggggcggtggctgtcggcttctttggtatcgcttactttaacgagcacccgtcggtagctggtgcggtaaaccagaacgccgagcgcgtgtttatcgaactggcgcaaattctgtttaacccgtggattgctgggattctgctgtcggcgattctggcggcggtaatgtcaacgttaagttgccagctgctggtatgttccagtgcgattaccgaagatttgtacaaagcgtttctgcgtaaacatgccagccagaaagaactggtgtgggtagggcgtgtgatggtgctggtggtggcgctggtggcgattgcgttggcagcgaacccggaaaaccgcgtgctgggcttagtgagctacgcgtgggcaggctttggcgcggcgtttggtccggtggtgctgttttcggtgatgtggtcacgcatgacgcgcaacggtgcgctggcggggatgatcatcggtgcgctgacggtgatcgtctggaaacagttcggctggctgggactgtacgaaattattccgggctttatctttggcagtattgggattgtagtgtttagtttgctgggtaaagcgccgtcagcggcgatgcaaaaacgctttgccgaggccgatgcgcactatcattcggctccgccgtcacggttgcaggaaggctaagctgaagagtaattagttatcttttgctttttaacccgaatgttccctgccatgcggtataagttgcctggcagggagtgttcgggggcaattgctatttgcccacccggcacagatgaacaaaattgccgctatcggtaccttcagcttatgtcctgcggctggttggttgggcgagatagaatggattcgacatattcccgctgttttttaaccacgccagttttctcgcaccttgcttggtcactccgctcgatttcaggtaggatctggcagtagaccactggaagccgcgttttttactccacttttcggctccccctgcgctgttacgctcctcctgggtcatattcgcccattgtacgatgtctccgaaggtgaacgtgacccatttctgcggccctgtcagcttcaactcacccagggcggtaagcccgtcgttcttcaggtaattcctggcagtagttggcgcgaggtttctttccttacaccacttttctaaataaccaaccggttttcgcacatgcttgtttaaggctgcccactggcggatatgttcaagggtgaatttggcatattcatgcggcctgtttacctttacctgtcccgcgtagttcaggccgtgatcggtcaggtaatttctggcatttttgatattaaaatgattgcgcgtacaccatcctgaaactccctgtagagcgtttcgcgcctgctggtccatagccgcccattttcgcatgtcgtctacagtcaatttaacatattgctgtggctcgtccgcctctggctggtcctcgatggtctgcctggtgttgtttatgtcgtcatttgcagcatttggtgggatgttgcttgtattacacgattgctgtaattccacatcgttacgccacgccagcggagacatatttccaaattctcgcatgccattgttggtaaagtgtgtttcttctcttccgtattgctgggccggggagtagcgagctgcttcatgcaccctgttttgactttcatccgtgagtattggccgtacggaccagagatcaaaggttccatattgactgcgtgacatcagggttgtgacaatggagtgaaacagctcaagagtaatatttgtactggtgcacacaccgctcttgctgactgcaattttcatgagattgcccgtgttgtcatgctcttgcgtcttcgtgaaggtgatggtgaaaccggcaacatcgaaggtgaacggttcaggaagttgcagatcatttgcacttaccaccggttggaactgatgtcgatgcagttcggttgtcatcgcagcagccagcaagtgaacctcttcaggaaccagtggagctacagccatgcccgtgctgtagtccgcatcccttttgatataattattcatctgcaccagaagcgtcaaagtttccagacaactactcgggagttgttgcggtggaatatannntgctgcgctcgtattgaggttggatattggtctcatgtaatgctctccgtatccttacagggttaatgattcgtattaagtcgtagccatccgcatggctccgggcgattcagtcgccgcaccaggatgtacacttcggatgcgttcttgatgtagtaaacaatccgctcattctggtgttaatggaaacacccgtaaaaagcaggaggaatgccagttattggcgaatttacaatgctgccatcggggtgagtttcatgaagattattattttttttacgccttttatcatcgcgttaaataataatttcttcctgtgtttcataaagtatatagttacaattactcgtgaattttatcgataactcgacgttagccttcagccagagaaaaattaactcgcaaattttttaatttatcgttaggggaatgggtaaattatattctcgaccctaattacagggttcatctgaaagcagtggcgtctcatcttattacttctctttctgtattcatgctagtgggtttgtgataatgtcatagtagaaaaatcgtgagaaaaaagccctgaacaattattaaattattgatttttgtgtgttggtgtttttggtgattgattttcacgatgatctattacttctggttaagatttctatttttattatgtgtgactttattaatgcgcatcctgcttcgttttatcgtgatttagaattgtatgtagcattagccataaaatgatatcactgggaatataataaggggaattataattttgggggataattaggcactatcaaaaatcgctcattccagacttaaatacacgttttctcctgtttaggttgtgggcaaaaaattcgatgaggagatgaggtataatttcattcacaaccttatcactatctattaataagcaaaaaacaacgttcttttgtgaaacgactaactgaaaattcaacccttcgggcacgctgcagcgagtttgtcgccaccaacattcgtacaagcttcatctgccgggcgaaacgtcagctaaataccttaaaataatcgcttttttctccggatttgatctcctcatttttacattccaacatcattttataaatattccgcttgtatttttctttagcgtaatgataatcgctatcactacgatttacttttctttgcatagattgactcagaaaaacgtttaagggtgggtggcatgtttgttccgtttctcattatgttgcgcgaaggacttgaagccgcgctgattgtcagtttgattgccagctatcttaagcgtacccagcgaggccgatggattggtgtgatgtggattggcgtgttgcttgccgctgcgttgtgcctgggcttggggatcttcattaacgaaaccaccggcgaatttccgcaaaaagagcaggaactgtttgaaggtatcgtggcggtgatcgccgtggtgatccttacctggatggttttctggatgcgcaaagtgtcgcgcaacgtcaaagtacaactggagcaggctgtcgatagcgcattgcagcgtggaaatcatcatggctgggcgctggtgatgatggtcttttttgccgttgcaagggaagggctggagtcggtctttttcctgctggcggcatttcaacaagatgtcgggatctggccgccgctgggtgcaatgctcggtcttgctactgccgtggtgctaggcttcctgctctactggggcggtattcgcctcaatcttggtgcattttttaaatggaccagcctgtttattctcttcgtcgccgcagggctggcagctggtgccattcgcgcatttcatgaagccggattgtggaaccactttcaggaaatcgccttcgatatgagtgcggtgctctcaactcactcgctgtttggcacgctgatggaagggatttttggctatcaggaagcgccgagcgtcagcgaagtcgccgtctggtttatttatctcatcccggcgctggtggcatttgctctgccaccacgcgcaggggcgacagcgtctcgctccgcgtaacaaatacgacgcaaactcttgcttagttacaacatactttaaagggatagtctcgtcatgaccattaacttccgccgtaacgcattgcagttgagcgtggctgcgctgttttcttctgcttttatggctaacgccgctgatgtgccgcaggtcaaagtgaccgtgacggataagcagtgcgaaccgatgaccattacggttaacgccgggaaaacacagttcattattcagaaccacagccagaaggcgctggaatgggagatcctcaaaggcgtgatggtggtggaagagcgggaaaatatcgcccctggctttagccagaaaatgacggcgaatttacagcctggcgaatacgatatgacctgcggtctgctgactaacccgaaagggaagttgatcgtcaaaggtgaggcaacggcggatgcggcgcaaagtgatgcgctgttaagtcttggtggtgcaattactgcatataaagcgtatgtcatggcggaaaccacacagctggtgaccgacaccaaagcctttaccgacgcgattaaagcaggcgatatcgaaaaagcgaaagcactgtatgcgccgacgcgccagcactatgagcgcattgaaccgattgctgaactgttctccgatctggatggcagcattgacgcccgtgaagatgattacgagcaaaaagccgctgatccaaaattcaccggtttccaccgtctggaaaaagcattgtttggcgacaacaccaccaaaggcatggatcagtacgctgaccagctttataccgatgtggtcgatttgcaaaaacgcatcagtgaactggctttcccaccttcaaaagtggtcggcggtgcagccggactgattgaggaagtggcagccagcaaaatcagcggtgaagaagatcgctacagccacaccgatctgtgggatttccaggctaacgttgaaggctcgcagaaaattgtcgatctgctgcgtccacaactgcaaaaagctaacccggaactgttggcaaaagtcgatgccaac

SEQ ID NO: 226 - DNA, 10456 bp, Escherichia coli
  Strain O55:H7
  modified_base (2089)..(2089): a, c, g or t
  modified_base (5027)..(5027): a, c, g or t
  modified_base (5029)..(5030): a, c, g or t
  modified_base (8125)..(8125): a, c, g or t
  modified_base (8798)..(8798): a, c, g or t
  modified_base (8810)..(8810): a, c, g or t
  modified_base (10048)..(10048): a, c, g or t
gataccattctggcgaaataccgtactaaagacggttttgaaacctacgacaaattgaccgatgccgaccggaatgcactgaaaggaccgattactgcgctggcggaagatctggcgcaacttcgcggtgtgctgggattggattaagcattatgcagtatgaagataaaaacggcgtgaatgaaccgtcacgccgacgtttactgaaaggcattggtgcgctggcgctggcgggaagttgtccggtcgctcatgcacaaaaaacgcaaagtgcgccgggtacgctttcaccggttgcacgcaatgagaaacagccgttttatggtgagcatcaggcagggatcctgacgccacaacaggccgcaatgatgctggtggcgtttgatgtgcttgccagcgataaagccgatcttgaacggttgtttcgcttgttgactcagcgttttgcttttctgactcagggcggagcggcaccagaaacgccaaatccgcgcctgccaccactcgattccggcattcttggcggctacattgcgcccgataatctcaccatcacgttatcggtgggtcactcattgtttgatgagcgctttggccttgcgccacagatgccgaaaaagttgcagaagatgacgcgttttcccaacgactcgctggatgcggcgttatgtcatggtgatgtgttgctacaaatttgcgccaacacccaggacacggtgatccatgcactgcgcgatatcatcaaacatacgccggatttgctcagcgtgcgctggaagcgggaagggtttatttccgatcacgcggcgcgtagtaaaggcaaagagacgccgattaatttgctgggtttcaaagacggcactgccaatcccgatagccagaatgataagttgatgcaaaaagtggtgtgggtaacggcagatcagcaggagcctgcgtggacaatcggtggcagctatcaggcagtacgcttgattcagtttcgagtggaattttgggacagaacgccgctgaaagaacagcagacgatttttggccgtgataagcaaaccggtgcgccgctgggaatgcagcatgagcatgatgtgcctgattacgccagcgacccggaagggaaggtgattgcgctggacagccatatccggctggcgaatccccgcacggcggagagtgagtccagcctgatgctgcgtcgtggctacagttattcactgggcgtcaccaactccgggcaactggatatggggctactgtttgtctgttaccaacacgatctggaaaaaggcttcctgacagtacaaaaaaggctcaatggcgaagcgctggaggaatacgttaaacctatcggcggcggttatttttttgcgctgccgggagtgaaggacgcgaacgattatctcggaagcgcgttattgcgggtttaatgtttttagacggataaggcgttcacgccgcatacggcgatcgtgcactgatgcctgatgcaaatcctgctgaaagcacacagcttttttcatatctgtcatcactctgtcatctttccagtagaaactaatgtcactgaaatggtgttttatagttaaatataagtaaatatattgttgcaataaatgcgagatctgttgtacttattaagtagcagcggaagttcccggcagtgatagtcagtcactatggagatcgcggatggtaacgtcctgtactggacatgttttagataatcaacgcgccaccactcgcggagttttctcctccggtagtcatctcgtcactttgcattttcaacctcatcctttcttttcatgtgttaccgacgccgtaaacggtgcgcgtagccgtttttcggcattttatccaaaagcaaactatggcttacaaggaagccaaccctctgatgttcgtgcgcataatcgcgctgccaacggcgcgtgtgatgaatacaaacaactcaaggtgctctccatgggaagacaaaaagcagtgatcaaagctcgtcgcgaggcaaaacgtgtgctgagacgggattcgcgcagccataagcagcgtgaagaagaatcggtcacctcgcttgtgcagatgggcggcgtanaagccattggtatggcccgcgacagtcgcgatacttcgcccatcctcgcgcgaaatgaagcgcaattgcactatctgaaggctattgagagtaagcagctgatattcgccacgggcgaagccgggtgcggaaaaacctggatcagcgcagcaaaagcggcagaggccctgatacataaggatgtcgacaggattatcgtcacccgtccagttctgcaagccgatgaagatcttggcttcttacctggagatatcgcagaaaagtttgctccctattttcgcccggtctacgacgtgctggtccggcgcttaggggcttcctttatgcagtactgcctgcgaccggaaatagggaaggtggaaattgcgccgttcgcctatatgcgtggacgtacctttgaaaatgcagtcgtcattcttgacgaggcgcagaatgtgactgccgcgcaaatgaaaatgtttttaacccgcctcggggagaacgtgacggttatcgtcaacggtgatatcacgcaatgcgatttgcctcgcggcgtgtgctccggattaagtgacgcgctggaacgtttcgaagaagatgaaatggttgggatcgtccggttcggaaaagaggattgcgtacgttcggcactttgccaacgtacgctgcatgcatacagttaagtgtattatcggtgcagagcccgggcgaaccgggctttgttttgggtgtttatgccctgactagcgctttttctgaaacaaccatttttatttgcccctggctggtgaagtgtacgctcatcctgtggcttttttgtagttgctgatagagctcatcaggtattgctaagctctctgcatattcttgcggcgtatattggtaggctgcatgatgctgctgtttttgaaaacgcagcttattgtacagcgcccagacaattaacacgacggcattcgccactgccagcaaaaaatagaactgaagtcggcttctggcctcgctttgccagtaataacccgtcagcagatccatggcgaataagaatatgaacaacgcaaataatgtccacaagatggttgtggcaacataatcaaccagtaaacgtactggtgattgtcgggtcgtaataattaaattgttcatattaacctctcagaatcccgcgatcgggacttacccaacgggcgcgttgctttttaggcatcaacatgactcgtgtaaatgataccaatgtcgttgccaggctcagcatccagaaaataaccgggaaccaaataatccagaaaagcgatgaagtcagattatgctcatagcgattctcgatcatcaggctgacaataaattgcagtaaacataacgtacacaataatattccggcagtatgtgtcgcagcgatatgtgtcaattcaatatttaacggtacaccggcaagttggactgcgtaaataatgaaaccgaccaggcaggtgaaggcccatattgtcgtcaggctgtattcaaaaaacagcggccacattcgaaagttttctttgcgccacaaccttgtcatatttttgaggaatacttctgcaccgccctgagcccagcgcaggcgctgtttccacagcccttttaacgtttcaggcattaatatccagcacagtgcccgtggctcgtaaaaaatcgtccactgattcaactgcagcttccagctaatatcaatatcttcggtgatcatatcgtcactccagtaacccacttctgccagggcgctgcgacgaaatgcggcaataacaccggaaacggtaaatacgtttccatagatacgctgggttcgcttgatcaaaccaataattgaggaatactcgccaacctgaattttacccaccagggtagaacgtgttcgaatacgaggattaccggttacggcacccacacgcgggttgtacaacatcggttccacaatatatgccgccgcatcgcggtctaataacgcatcgccatcaatgcacaccagatattcacttttcgccgcggcagctccggttttaagcgcaatggctttcccctggttttgcgccagatgaatgacccgcaaatggggaatttgtgcagccatgcgatccaggatggcacgggttttatctgttgaaccgtcatttacggcaataacttcaatgttctcataacgctgtgctaaagcggcgtgtatggtttcctcaacgtttttctcctcattaaaacagggaatgataatggagatagacggattatctttcaactggggagctggtgcgttttctccccacggccagtggcgttcacgatagacccagaaatagacgccgccaacaatccacataatggacataaaaaacggccagaagaaaacgaacctcatcatcagttcaccagagtgaaagtacgctacgcataggggtatgcataacaccagacataatataaaaaacgatacgatgcgattaatcatttttcggataccaggctgttgaaaactcaggacgaataaggtctatttcaggttggttatgcagaaaattgtcgggataataaccatagtttttcactccattcagttgtaataggctcatccagtgagcgagttgttgcgaagaaatagcctgatgctgaccatttttctgccagttttgtgcctgtaattctaaaatagatttgtctttagcctgagggatgtttttaatttgattggtcaattgtattaaccattggtcagccgatttttctgcgacaccttccagataaggcatagccataatagcggtccagtcatagctttttaggaaatcagcataattctgtgcaaaccaggcttcactttcaggttgtattaccggaagtgcaaaaatatttcgtgcagttttaatatgtggaccgcgaatggcttttacgcgcgcactaagttctaaagtgaagtcagttaacgcacgacttttananngggcccactgtttaaattgctccgggttttgtcgaatttcgctcagactcccgctaaagcctgcttgctgataagccgtgatagccggtgcactggcatcttcataatctgaaagcaaagcatcatcgtggaacaatatgccatcaaaagcagcatgtccggcaagatcttcatataacatgccaacttgtgctctgactctgtcatcgaaaggagagagacggtgatattgttcaggatgaatttgtgcttttttctcccctgttggtaagtattttactcgcgttaatgtgggatctaaatcccagcttaataccggcatccacgcatagatgtttacacctgagcgggtacgtaattgccaggcaacccgactaaaaatatctgctttcattggtagcaaacgatttggaaaccagacctctttgaccagcccatcaccatcgggatcagcaaatgcctgcaaatacacggttgatatttgcatatctttcacccgctgaattagcacatcaatattgcgatccatttgctggaggttttcgtcataaacgtaatcaagatcgatatgcattatccgttgtggtgatttttcctgtacggtaataatttgctgggcaaactcttttaatgagggattattggcgattaatacccgcggaatggaatccaattgcgacgcatttgccaaacctgattcaagggtgaagaacatgtcataaccgagtttttttaattcctctatcgctatgccattcgcttcgccataaggccaaataaaaacgtgtggatttacctcaacctttgtacgcaggtattccgtcatttttacagcatccagacgaattctttcccggtattctgctgcggtttcataccgtgcgtggtcagtaaaatatgcacgatttacatatacaggcaataagctgccggtggcattagcctgaataccgtagtgagaattccatgtatgagaagcgagctcaacgagccgggaacgcgcaacttctcgcacttgttgccacgtggcaaaatattctcgatcgaccaactcatcgccaaattttacttgtttatccgctggcgtatcgacccaactgccgacgggggcccatacagcaggccactggaaggcctgaagaattgggaagacgcgggtataaaaactctggtagccgtcatcaaaagtcagcactacagctttttccggtagcggttttcctcctcgatgtgcttcacgaatttgagcaatactgaccggttgataaccgttctcgcgcagccaggcaaattgttcacgcagtgctgatgtccgcactgacataaaacgctggtcggcagcttcgtcttcaacgttatgccatgaaatcgctacaaaaccattatgcggccacggttgctcggcgagtaaagattcgcgatcctgtggcggtataaatgatgttcttgactggctaatgcacgcggtgagcataattatactcaccagcatcaggagatatttatttccattacgtaacatatttatccttaaaatctgaatgtcatatcgaattcaacgtataagttgtgttctctgtcaccgtcataaggtcgtttttcccagcgtagcgttgcgccagcatcaatcacgtcattccagctaatgcgttgcccgtagccgagttgggtgacgacatccgtgccataatgtttttgccaggaggcaccaacacctgcgctgaatatttgctcccagctattttcatagcttcgccataacaaatggcttgcctcaaatgccggaacaatatcgaacgtttttatagggttgtagtatggggtatcgtgttctgtattttgttcgtaatacagactgggtaggaaatcgacaatcaaatatggtgaagaccagatgcgttcctgaccctcaagtgagacttcatgacgctggttactgtcggaaaaatcagtgaaagcccaggagacaccgtacttacgccgctcattttgataccagcgaacataagcctgagcactgttgcctgtaacaccatttttcattgcccgtaatggaacgcggtgagagaggcgttccagttgcgaaccaatacgccagttatcattaaaatcataccagccagacaggcgcgcgccgggtttatgctcatgattgaaaacgcgttcagcgtactctgcctcgagccagatattacgtgaccgccactcaacacccgcaagccagtcgcgaacaatcccttttccttcgctaaattgtccatcggcataaccgaatccagcaaaaccgcgccagttatccttcagcggtggtgaataaacgatggtggttaagtcgacatcatgtttaccactatccgggccttcggcatcaattcctgttgagccagcgatacgaagctctgcaagattatgtacatcaaccgcacgttttaatcgtacaacgccgggatcttgcggttcacgttcgacaacatcgtgcgttaagacagctgcctgctgccattcttgtaacgttaatgctgtccaggcttgttcaacctccagattaatattacgtggctcgatcacttctgctttttttaattcattttctgctgcacgaggccaaccgcgggcttgtaacacactcgcgtaatcaatgcgcagtccctgatttcctggtgcgttataagcaagctctctggctgtcatttcagcctgaggaagatcattactatattttgttacggttgagagaaacgaatgcccctgtaaccaggtatcattcgggatgctcgtaggcgtgcccattaaccgaaggaaaggcggcgaagtattaatggtatgttgggtgacagttagcgcgcccggataattttcactctccaggtggctgtaaaagagatccgcaagttcttcatcggataaatccggggcaatggtctccttgtgataaaagagctcggtcattattgactgtgcttttttcggctgatgatctttgagataagccgatgcaacccaatattgcccccagggcggaataatttgccccgtcttttttaatcgctgatagtgagaaataacgtctttataacgatcgcgagttaataacncgccaagatgatcaacctgaatacgctggtactgggcagtacggtctgggttatcgtgccacagaatttctaatgcagcgtattgggcgagggcgcgatcggcaatggcataacgttcactttcactgcgcgtaggcataaacgacagtctgaccagttcggcatgaatatcagcgcgaatatctggcgttaaattggcatcgtcaatcgcggcagcaagttgattattacgtaatgcctgcacgtattctgtgggatattgttgcgtagatgcattttcaggtaatgactctgtcatcgcccgtaattcatcctgatgacgccccgccagtttatagatataggcttctgcgagtaaattggctttgtccggtgctccagagttaagctgcttaagtttaaccagcgcagtatcatagtgaccagcatctgccagggttaaaatttgtccccgttgataatccttattttgcggctccagagagagcgccttttgccacagtgtaagcgagttttgccattgttgcaggttacgataagcgacggcgacagctgcataaccacgcgctggtaattgctgatgacggtagcggttgtaaacggtaataacctgtttatcttgcccggcccataaggcaatctgtaaccagtcagcaatttggttattgctgantgctgattttantgcaaaccatgacaaagctggctgagtattacccttgcgagcttcaataatcaatgcatcataggcgttattaacagcactcttcgccgcgggactcgctgctaaaaatgcggcagtaagaagtttcaaagcccatttggttttcgggcacctttttctgctacttgaatacatcctgtattactccatgtattgccaaaatctctctctgtatctaattacaggtaactgaaaagaaagatatttttgcacctcataatccgttattaaacgcggaagagagacgtgaattgttgatgatgagaagaagaaatgatgagcagagtgtccatataaaatccttttctcgcccgaaaatccattccaatgatgaggatcttcaggaatacggcataaatcccaatgcctttttcaaaataaattaggattaaaataattaaatcagtaaattccgatgcatgatttcggatttttcgaaagtcctgatgaaaggctgcgctacggcactcacggatttaattgttattcctaatgtatctatgaattaatgttttataaggattttctataaccatttataagtattttcaagcctggcttgttgcaaacaatgtataaagcacttaggtaataataattacattcagcaactatcatcatcggtattgtttgtgggcggaatttcatattgacaacagtacagttcttatatctattaataatagaaagggatctacaacctacagattggtgtagctttatggaaaaagactatttgagaattagtagtactgtattagtgagcttattgtttgggcttgctttggttttggtgaatagttggtttaatcagccaggcgttgaggaagttgttccacgatcaacctatctgatggtaatgattgctttattttttatcgatactgttgcatttatttttatgcagttgtatttcatttatgaccgtaggcaattttcaaactgtatacttagtttggcttttctgagttgtttgatttactttgttaaaaccgtcattatcattcagcaaattattgaggggcgtttgacaagcagtgttgtccaaaatgacattgcaatctattatttgtttcgtcagatgagtttgtgcatattaatatttctggtattggtgaataaagttagtgaaaacacaaaacagcgcaatttattttccaaaaaaatgactttgtgcataagtttgttttttgtttttnggggggcgatagttgctcacataatttctagtcattatgagagctacaatttacacattgccgagttaaccaatgaaaatggtcaggtggtttggaaagcctcatatgttaccataatgattttcatgtggttaaccttgctttcggttaatctatactttaatggtttacgctatgatatctggaatggagtgacggtgattgctttttgtgccgtactgtacaatatctctctgttatttatgagtaggtatagcgtgtccacttggtatattagtcgcactattgaagtagtcagtaagttaaccgttatggtaatatttatgtgccatatattcagtgcgctacgagtaacaaagaacattgcacatcgcgatcccttaaccaatatatttaacagaaattatt

SEQ ID NO: 227 - DNA, 2597 bp, Escherichia coli
  Strain O55:H7
  modified_base (179)..(180): a, c, g or t
  modified_base (2352)..(2355): a, c, g or t
aactgacagttcaatcagcatcagccaaaaaaacgccttattgcgtcatgattatggatatcgaccacttcaaaaaagtcaacgacacctgggggcatccggttggcgatcaggtgataaaaacagtggtgaatatcattgggaaaagcatacgaccagatgaccttttagcgcgcgtnngcggcgaagagtttggcgtcttgctgacggacatcgatactgaacgtgcgaaagctttagcggaaaggattcgggaaaatgttgagcgtttaactggcgataatcctgaatacgctataccacaaaaagtgacgattagtattggcgctgttgtgactcagggaaatgcgttaaacccgaatgagatctatcgactggctgataacgcactatacgaggcgaaagagaccgggcgtaataaggtggttgtgagggatgtggtgaatttttgtgagtcaccataaagcggcattttagcgggtgattttggtaagcgctaaatagctattcgcagacatgcgtaacaattttcagaaatatcatagtactatatgatcttaaatgcttatcattgatcagtctgctatcacccgcttttactggcaattgtactataatttcttgggttgcatcaccctgatgcgtggggaaacatgtatggtattcaacaaaaaaatgtttgtactcattataataccaggcattctgggggtgttactgtcgtttgctatgtcagtatttcaaatgaatcgagatacgacaattaccgccggtattctgttaaaacagcttgataatgttacgcaaattgtcaaacatacgacaaagcttacttctattctggtgatgaaaccctgcaaagatatcctggaacaattgattgctaacggagcattgaccccctatgttcgaacaacgggtcttatagaaaataatttccaaatatgttcttcagttagcggtttcaaaaaaatgaatgttaacgatgtttacggtacgagctttcacaataaaaataaagaatcacgcatagtatcaattagcggtacaagttttgtaccaggtaaaacagccatagtgttccttatgccaatagggaatgatatgacagcttttagtattgtagagtcacgatatatctatgatctgatggatgttcttgatgatgagaatgatgattcattttctcttcgctttactgaagggcctgcaattattagtggtgtaaataataatgacaggttatatatgttaaaaaaagattttaattctgcgatcagtcaggctagtcttacagttactacgccgatgatttcattatatccctatgtcattagtaatgtattttacattcttccattatctattcttctttcttttatcctgtacttcttatggcagcgctggatatctcggaaaatgtccctggcagaagaaattaagaaaggaatgtcatccggagaattttctgtgcattatcaaccagtatgtgacacgacaaccaaagcgtgtctgggggttgaggcgttaatgcgttggcaacgcgaagatggtaaaaatatatctccggtagtttttatccgcgctgcagaagaggaaaatttaattataccgttaactaagcatctctttgaactgattattcaggatgtacaaagctggaaagtgaaaaagccgtttcaccttgggataaatattgccgctgaacatcttgcacatcctgattttgttgctgatgttttacatataaaaaatgcaatatctgataaatttaacattgtccttgagattaccgaacgcaatctggttgaagatactgatcatgcattacagaaaataaatgaattaaggagccatggctgtgaatttgcagttgatgattttggcacgggatattgttcccttggccttctgcaaaagttgtctgttgattatcttaaaatagataaaagctttatagacacgctcactacagcggaagacgaaacgcctgttttagatattattattaagctgagtaatcgactcaatttgataacgattgcagaaggtgtcagtacctctcaccaggcggaatatcttattcataataacgtgacattagttcagggatacttatatgcaaaaccaatgaaagcgacagagttttatcaatggtatgtaaacagataaataattaaccaatattggaatggttttttattgccttaaaatataaacaaagccatcagaaggttattaactggtgacaaacgccaggagcaacaatgctgttagtgggaaatacatatgaagcgtggtgtcctgcctgtagagaatacgtagttgtaatcattttgacgtgtaacatannnnttaattgaggtgtcaacttttatgaaaaaatcagaagtgatattttcaaggatttcatcactaatgttatcatctttttgtattttttgtattttaacagtggtgaagtaaacggtatcacggaatttcttgtatgtaaaactcacatatcggcggatgaagcccatcttttttccatctaccgtgtatgcgcccgtgagatacatgtttcctgtgttattttcagaaatcatatttaacga

SEQ ID NO: 228 - DNA, 15878 bp, Escherichia coli
  Strain O55:H7
  modified_base (236)..(236): a, c, g or t
  modified_base (1064)..(1064): a, c, g or t
  modified_base (1596)..(1596): a, c, g or t
  modified_base (4721)..(4721): a, c, g or t
  modified_base (7183)..(7183): a, c, g or t
  modified_base (8927)..(8927): a, c, g or t
  modified_base (9643)..(9643): a, c, g or t
  modified_base (9786)..(9786): a, c, g or t
  modified_base (9967)..(9967): a, c, g or t
  modified_base (10198)..(10198): a, c, g or t
  modified_base (13535)..(13535): a, c, g or t
  modified_base (14631)..(14634): a, c, g or t
gatccatttttgtatgatcggtgaaattaataacatgggcattacatgatatgttttgctctgctggttcattggcatgatgaaacgcaatatggctcagaattgctgcaataaaagcacataaaattattcccgcaaacagaaaatatctttgagtcatatgattactccgctttataatagagagagttgcaattatttggtgattcagagtttaacatctgactacaggtganagcataaaatccgctcatgctatcatttgttgcaatgtaaatgtaaggatgtattttgcagttaatttccatcttctgcaatttttcaataatcggtgataacatgtctacggaattaaagtatttattatcatagaaataactgcatccttcctgagtagggtgttgagcataatttgagaaagcatctattttttttatagtgtgggatttgctttgaaaagccatatcgaaaaaataagaagatatatacactatcccccatgccgcaaaaaaacaaactataagtaatgtattctttgtggtaaatataccttttgcaatgtgatttttatttatattttcagtgtgggtaccattctcttcactctcaacactttcattctcattgtgattattgtcgagaacagttatgctgatttcttcattgattttgaagcctttacggggcaccgttctgataacatcattaaatatcgtcgctgagctgatttcacgaaaagaacgtcttatcatcgatatattttgatataaagtgttggttgcgacatcggcactgctatcgctccagactttttcaaagaattgattgtgtgacacgacactataagcgttatctaaaagtaactttaagcattttcccgcaggataagtgagtatcacttcctctgatgtaaggagtgatgttaacttattagatgatgagttgaatcttacttcatcatttataatgtagatcattacattttataccttagttgtgtattacaaatccagtattactcagaaaataaaggcaagaacattaagtgcactatagtataattncctaaaaatgcaaatctgaattatctgatttttaagaataatcttgatttaattgaaattcttaaacgatgtatatttctattaaatgctttctgcagtgatgtgaattaggggtttttctgcatgtactaataaaaactgcgtatccccgttatagggaaagaacgggacgcatcctccacccatgacactaaccgtgtgattggtagttccctgctgtgcacttctggtgaaatagaagaagctctatgtgccgaccggtactgtcttttatccgattatttaccagtgacaccttgatatgaggttatatctattattgctaggaggtaatatatgcttatgttattatccaaagcgccaatagtaatttagataaagattatagatcagcaagcaaatccagtctgtttttttgtgcgtactgcataacatctatgatgactatatttttacgtgatacatcactacttaaatgtatataagatttgatgtttattattcatgctgagttttaatgtttatatttttntattgaaatctaaaaattacttaaattatcccttaaatattacttactcataaggagcaatgtgtgatatgagcttttctattgaagatttttcattggattttttttcattacataacaaggtggccatcgtaactggggccgcgggtgagctggggagaggcttatgctcggctctggccaaagcaggggctaatctattgttggttgacatcaaagagcctgataatagatatttgaagcatttaactcatgaaggcgttgaagttgagtttatgacaatagacataacaaaacctgatgcatcatgcaccattattaataggtgtctggagcgtttcggtcagttagatattctggtcaataacgcgggcgtgtgtaacattaatcgtcctatcgatttcaatcgaaacgactgggatccgatgattaatctcaacctgaatgctgcattcgatatgagccaggccgcattgaatatatttgtcccgcaaagaaaagggaaaattattaatatgtgttccgtattgtcatttcatgggggacgttggtcgccagggtatgcggcgactaaacatgctttagcggggctgaccaaagcgtatgccgatgattttgcggaatataatattcagattaatggtatcgccccaggatattatgtgagtgaaatgaccgctattatttataataaccctaaaataaaagagttaataaaagggcgtataccggctcaacgctggggaagggcacaggatcttatgggcgcaatggtgttcctcgccagtgccgcttcagattatgtcaatggacaactattagtcattgatggtggatattcaattcgttaacgatttttggctgcgttgaggtgttttgactggaaaatggagtggagagattttgtcatttctccacttccggtacttcaggtgggtatagtggttattcgttagcgttgaaccatcgcgatgagtttacataccactcagagcattattgcgctaattgttgttttatctgtgcaccattatcatcgagatatgtcgccgcaaccacaccactaacgttattacttgctaaccagtaccgtcgttgactgaagggttttatcatcatatcgctttcttgctgcacctttgtagccccaatgctgatggaggtgaaagagatattcagtggtgttgggttattaagctcaatatagctactgctgccgtcgttacccagatgccaacttattttacgcatagcttcttggggcgtcatagttacagattttggcctgtaaaagattttaagttgcgtattcattgccagcgttaaatgtgtgggatcttgatggggagtttctggcggcatttcataaagatttaaccagaatgcagattcgcgatcctggggaagtgggtcatgattatagataatccgcaacccctgggttcgtctcgcagccaggcggaaaaccggtggcagcaccacaaaggggggagaagcagcttctggggaaccttcaccattatctacccaactttgcaccagtaccggatagtcattggtattgaccagcatcagtgtcttttcccgatcgccatcgcgataaataatccgtgaagaagccggcatgatgccggcttccactgactgtacgaacaagacggttaagagcagcaaaacggatttcattgcattttcaccaatatataagccgttgcccgcacttttcccgcactgactgtctgatttggcagtttcttcaaccgggcgataaaagagtaactatagctggagtatccggggtgagtcgcaccttctaatgttgccccttcaaatacaggataccaccccgctgcatttcctccgggggttaacttcgcgatgcccggttgaccaaccagcgtcatcgccgtatcggggtgagcactgttagaaatgtagatcccaacgccctttgccatctctgctgcgtcataattatcagagaccagggcgctgacgccgccgttgctattgataatccccagtttttgcgccgctgtatatgcaccttcagacacctggattcctaatgctgtctgagtatcgctaatccctgattgaaccgagttactacactcgacgcggacattaaaattaccggtactttccatgcccgcattcagttgtgcttctgcaattgtcggcagcaatactaacggcgtggcgctgcgggcaacgcaggtggcattgttgtagagtcgattggccgaacgcattccgtaaccaaaaccattatcagcaccccagaaatcccaatgaacagaactatcttcgccgggctcatcatgaccaaataaaatgccgctggtaccggaaagctgaatataggcattgggctgaacacagttatagattgtaccggaaggttttgcgaatccgactccactaccatctgtattattattaccgcaccaacttgttgttgctgatgtatcaggtagcgtactgatgcgataaagctcagcatgaagaggagggatatcctgtaagcgaatctggattttagttccctgagtggcataactggtgatgggcactttcttccagtaacgaccaagcgtcacgcccgccatggtctgcttgagaccgacaaaagcgaaccaggtggcatagacatcactcagaccatcaggcccgcctgcatcgtaaaagccccccacgcggtcgtcgccattggtagcgaccagaaaatagatgtttggcaaatctgttgcatcacattcccacaatacggagcttcctgtcgcgccacctgatgtgtagttagtgggaggtacgaccgttgtcgcgaggagtgaacctgctggcgcaaaataggtgtcggtcatattaatttttccgaactcaataagcgctgtccgaccatcttcagtttgacctatctgtgtgtttgtacagttagcccaagcggatgattgtattagtgccaccaatatgatggagctaatcagaatgtgtaaaaaagtcgatttagacatcgggttttctctgtatcaagactgacaggtttcattcaggcggatgatagggctattgctgtccttcccgctgatatcaaagggcaattggcagctatcgttagcacnttcaccccagcgaactgacaagtggccttttgtctgttctgtgcggaggtaaatttgccccccctgaccggctataccgacgactgtattattctcatccagcacatcggctcccattggcagttccgaaccatctgccatgcgggatttaatcagcaacgctttaccaggacgggtacggaaaattactttcaccgccgcacccgcaaccggtgctacctgtctttcactgtcgaccaactcggcatcgccatccattccttgtggatcgagagatatacggttgtagcgatagggcgttactgccggaacaagcgcatagccactgtcattaatttccagctgactggagttatagacttttgcaccttctgcgcctttagcttcgaccagggcgaacgtttcacccagataaggtccgaaagtaatgccgccaccatgcacagccatcgcgccttgtacgttacctgaagcctgccagtaatcctggcccttcgatgcgttcaatccgacggtagtttgtgaaaaacgtttttgcatgtttccgctaagcgtcgtctgcttatattgttgatcgcgcatgacgttcaggctgtagttggtggtctgtgcttcatcaagcattccggttagcgagctttgtaattgcgagctaccgtcagttgaatgggtccagctgttgctaagacttggtacacgaggtccattgccgccaagtgggaatgagaatgaaagggatgttaccgtctgcatatcatcagaattgtctttatagccgcccattctttggcgtccgacggaaaggttcatactgatgccatggctaaagctattgctgtaacctaactgaagctgtgtatcacggctcttgccgccacggtagttctgtgttgaacctgacacaaacaggttgccgtaattcgcaaggctctgacttaacgtaagatcgaagcgcgactgttgacgccactggctggagtcccatgactgtttattgctggcagcatgacgctctcccagcacatcagccagatcacgatagccgctggtagagtatcgataacctgccagggagacggtggttgaagtaggctggaaagttttactccaggttaattgcgacatccaaccactctgcgcttcgctttcgggaacacgcgcatgggaccaagtgaggtttgccccaaatgcccccagcgaactgccatagactccgcccagcatcagcgcctggtagccatcagcgatacgcgaaccactgttaaatgtcagcgtattagtcatcccgtgctgccaggtaaggtcaccaaacatcgagtcatcaccactatcctgcgttttacctacttccacgttataacgggaagttcctggacgcatcgattctggtacggctgaaaaggggacactgaaacgactgactgcgccgttagcttccgtaacggtgacatccagatcgccgctgtagctggtggggtataggtcgtttatctcgaaagggccaggagccacggtggtctgatatatttcatgaccgttttgcattaccgagactctggcgtttgttgcggccacgccgcgaatagtcggcgcatagccgcgcatggagtccggcagcatacgttcatcggtcgcgagactaacgccgtgataactgagtccagagaaaaatcttccgctggtgataagctgccccatcattaactggctatttatggcgggcagcgggcgttgcaaatagctacgaatattgttccactgattccctttgtcattatcccaggtcatgttggataactgacgatattgccaggcaccaaggttgatgccaccattaaatgatgcccatagcgaacgctggctatgagcattctgccctgaataggcaacgttgtaatagttggcaatataattcatgaacgccagcgatgctccggtatccagctcgctggggggaacatagccgcgagggcgactaatcaattgactctgtggcaccgataagtccaggcgcaattgtgacaactgtgtctggctggtgatgccgggagcgagttccttagcaaacgtacagacaggatctttttcccccttatcttcccctgttttgaggcctatcgcgtccgcgacttcaggcgtcaggcagggcagaacgcgaccatcagcggcttctttaaacgtgacattccaactgcctgacaacttattgttggtgtagatatccattttataattgcccggtgcaacagactcacgtgttgtcagttttgctaatgacgactgactaaatctgctgccgcggaagagttgcgggtcaaaggtgtagttgtcttcatctgacggtgttgcgggtgagatttcgctccccatgaccggttggcaaagtaaaaccaacattgccgcagaaattgacacaacggatttattcatctcgacgtactcgtgcgtgaaaaaggataccnctcaaaaaaggagaaagaggttataaggcatgctcagacgtaacatttacgccatagtcgttgacggtcactaaatggatctgcgcaccgggagcgacactgatgccagagggtagtgtccattcagttgtgctttgaggagcaatcattaccgaattcgcgagggggacttttttaccattattaagcagttcagcggcgcgaattgtgacgtaatagcccgtgggattcgtcacttcaatgcggttctgttttacctggtaagtcaggtttttgggtgcgtcactggatttaccgacaatcgagctgggacgatagaaaattttgactcgattagtcagggccaggatgagctggttctgacttttatcattcttattcagataaggtagttgactgaaactaaaccagaaaacagactcgcgatcctgcggtaaattattaccagtgtagagcaggcgtaacgcctgacctgcggcagcttccatgcgaaatgtctgcggggttggcataaacggtacattcttgtcagaaccacgttcatcctcaacatggatattaatgatatagggctgatcgctggtatttcgcaactggatggttttttcctttgcgtcaccagggaaaataatacgggttccggtcattaccacgctggcaaacgcgctgctgctcatgctcatggaaaatacaagtaccagtaaatatgcaaaaatgttcattcttatcttttccatgtccatgaaaaatcactattaattgtgcgaagaaatactggctggcatttactgccagccagtagattaattagaggtagctcagggtgtattctgcgacagcggtaattttaccggcagtggcagcagcgctatcgataacgaagtaacgcgcaccgaagtcgtagctggcttcggtatcgccaactttcagggtcagacccggtacgttagtcgcgccagccagagttactgggttaccagaagtgctggaatccattaactgaatgccaaagcctttcgccgcatcgctgctggtatcacggtttcccataacacccgtgctagcgtcaacgtcgtagcccaggaaggtggtgttgattgcctgatctgcaccagttggagcctggcagttagacacagaaaccgtaaacggcgtctggcctgcgctctgaccatcagctaaagttgcaccgaagtcagccatggctacggtcggcatcaatactactgaattggtttgaccgttgatatttacggaacaggtctgatcggttacttcaccctgaaaagtgactgtaggcgcagccatagttgaaaaaggtaatgcaatagctgccagcagagctgcttttttgaaagtagaaaacatattaatatccttgaaatttagagttaatatagaacgagttaattaatgcaattgatacaatctgacgtttttaaaaccggtaaatctccttaactgtataagtgccttgaaaatgtaaaagccatcactatcacaagcaatttcaaacttgttaaaaactgatattttatagtgactaatatacttgacatccttttttagcagggtgtgcaatattcttttgttatctatcttaaaatataagtaatagatatcccactcataccttgtcagagtcacctgcctgacttgctggtctttatcagtacttttaatcaaagtaatgagtttattcaattttatatatcggctaatgaatgtttgctctgaaagtganaagaagatatttctgtttttcatctttcttagtgaaacaatcattaaaaacctggccaaatctggcagttttgcaagtatacttacgtcatccactgcgacaagaagtacgttttttgtaaagcggttgtcaaatctaagtgtacttaggtcattattgcatgcattttgagaacaaaaaaaacactcaataaaaaaacgataatggtgacctagttttgcacttaatccctgaaggtaatatagatcatccgaaatgataattacccttgttagtaagttcttgttcattgcactaactcaattgcttgcagcaaaacagcccatcttcatggagtaaaaattttgaaagtgaataaagatttttactaaagatgtaacaatgggcattccatatgcgacataacaactgcagtaacacaactaatctttgcgtgttctttatattagagagtaacagcgtgatatctgtatctctaaaagaatagcgatgtcctgcaatcgatgagcacaatatatgacattcatcacatgtataacaattgaattttcattcatactaatgttgaacggtaatatagtaatttaatgcttgccgaaagatgataaacagagttttattctgaataagagtgttttttgcgattttctcaggttgtaaattctgcataatggctgaacctattactttttatgtcaaaaaagccgtttttatangaataaaacaacgatatttaagagtgctggcagcggagaaaagggttaatacagtcatttaagattacttcagcttttcctgtggtgagaaatgagcggaattgtagcgcaatctgtaaaaacaattcctcttaactaataanaatcgcgaataatcattgtgttagattgatttgttgcaaaataataacaacattattaaaatcattacaatctttaatttagaataacatttttatgaagaccagaatacgttaagggatgatgtatagcggtgattgctattagatgggaatgaaagcttgccaaaccgttttgctcttntttctccctttcaacgataagccaggcataatgtggctgcttaagccaattgtcgcaaagccaaagctctctatatagctaacctcatggttaatccgatctcagtaataccatgagcaagaactctttcctttttatatagctcttaagggttacatgcgtgaatgcaaatggtaatataatgaaatgtcgcctgcccgtaatgaccataaagaatctaccccgacgtanaagatatagagaataagatgcagtaatgatgatgctttgttaatcaaataataagatttaaattaattgtaactcaccaactttgttgttttattcggatgtctgaaatgatgtcgtacagaaaactacatatcatttcagacgtcctctaaattggatttttttcacccaaggagcaaggatgggggacttttaaattattgtgttttagtaagttaggttcttcgccgttcgatgaaaaaacaataactcttagttgtttttttgagtccttatttcagcttatttttcgtgattttttattgcgccaggtgataggatttgccgcaatcatttttgctgatattccgtgagtcatcaaaagtgatctgcatgtccaaaatgaatagcatcaataaggaaaacgttagtggcgatgataaatttaagtaaggaagcaacggtggggaaagcattaacccctattgctatacttatgatgttgtcttttcctgtagcttctcaagcggcgggattagtcataaaaaatggaacggtatataacgccaatggtgtgccagtcgttgacatcaacaaacctaacggtagcggtttatctcataatatctgggataacctaaacgttgataaaaatggtgtcgttttcaataatagcgctaatgaatccagtacttcacttgccggaaatattcagggaaacagtaatctgacctccgggtcggcgaaggtgatcctgaatgaggttacttccaaaaatccttcaaccattaatgggatgatggaagttgcaggggataaagcggatctgattattgccaacccgaatggtattactgtaaacggtggcggttcaatcaatacaggtaaacttaccttaaccaccgggacgccggatatccaggatgacaagctggccggttactccgtgaacggcggtaccattacgctcggtaaactggataacgccagcccgacagaaattctgtcccgtaacgtggtagttaacggcaaagtgtctgccgatgagctgaacgttgttgctggcaataactatgttaatgccgcaggccaggtgaccggtagcgtatccgccacggggtcccgtaacggttacagcgtagatgttgccaaactgggcggaatgtatgcgaacaaaatcagtctggtcagcaccgagaaaggtgtgggggttcgcaacctcggcgttattgctgggggtgttaatggtgtcagcatcgattccaaaggtaacctgttaaacagtaacgcccagattcagtctgcaagcacgatcaacctgacaacaaatggtactctggataacaccaccggtacggtgacatctgtaggcactatctcgcttaataccaacaagaatactatcgtgaatacccgtgcgggtaacatctctacgatgggcgatatctacgttaacagcggtacgattgacaatactaacggcaagcttgcggctgcaggaatgctggcggttgataccaataacgccacgctgattaactctggtaaagggagttctgtcgggattgaagcggggctcgtggcgctgaaaaccggaacgctcaacaacagcaatggtcagattcgcggtggctatgtgggtcttgaatccgctgcgctgaataacaacaacggtgatatccagaccaccggcgatatcgccattatcagtaacggtaatgtggataacaacaaaggtctgatccgttcgtccaccgggcatatcgttattggcgcggcaggtagcgtaaataatggttcaaccaaaaccgccgataccggcagttctgactctctgggcattattgcagataccggcgtagaaattggtgcgaacaacatcaataacaacggcggacagattgcgtctaatggcaacgtctccctgtcaagttacagcacgatcgacgactatgcgggcaaaattctgtccaacagcaaagtgattatcaagggaagctctctgcgtaacgataccggggggatcagcggtaagcagggtattgaagtcgccgttggcggcagcctgaccaataatattggcgtgatcagctctgaagagggtgatatctccctgttagccaactccgtggataaccacggcggcttcatgatggggcagaacatcacgatggagtcgatgtctggcgtcaataacaacacagcgctgatcgtggccagcaaaaaactgaagataaatgcgcgcggcagtatcgaaaaccgcgatggcaataacttcggtaatgcttatggtctgtacttcggcatgcctcagcaaacgggtggaatggtcggcaaggaaggcatcgagctttccgggcagaacatctataacaacaacagccgtcttatcgctgaggatggtcctctgactctgcaggcgcagaacacgttcgacaacacgcgtgctctggtcaccagcggggcggatgcatctattcaggttggcggaacgtattacaacaactacgctaccacctggagtgcgggcaacctggatatcgacgcgaccacgctgcaaaacagcagcagcggtacgatgatcgataacaatgcgaccgggttcatagcatctgataaaaacctgtcactggaagtggtgaatagccttaccaactacggctggatcagcggtaaaggcgatgttgatgtcacggtgaataacggcaacctgtataaccgcaataccattgcggctgaaaaggggctggatattgccgcgttgaacggtattgaaaactggaaggatatttctgctggcggcgacctgacgatgaacaccaatcgccatgtgaccaacaactccaacagcaatatggtggggcagaatattgttattaacgcggttaacgatatcaacaaccgtggcaacattgtcagtgacgctgacctgaacgtgacgaccaaaggcaacctgtataactatctctatatggtagggtatggggatatcgcattgtcggcaaatagcgtggcgaacaataacgcgaccatcgaagcgacaggcgatctgattatcgattcgaagggtaacgtgggtaacaaccgcggtaatctgcatgcgttgaacggcgtgttgtctgttaaaggcaacaatctgaacaacgataacggtgaaattcgtggttatggcgatgtcacgctggcactgacgggcaactacgacagctataagggttcgctgacctctgaaacgggcgacgtgactctgacggcgaacattgtagacaacgcctatggtttgattgccggtgagaatgtttctgtcgatgctaaatcgacgatttacaacaacactgcgctgatcgcggcgaataanaagctggttattaacgctggcggcaacctcgaaaaccgcgacgggaataatttcctgcgtaataacggcgcgctgtttggaattaccgacaacgttggcggcatcgtaggtaaagaaggtgtcacgctttctgctcagaacgtctacaacaataacagcagcatcatcgctgaaaatggtccgcttaatctgctgtccaggggaacgctggataatacccgcgcgcttcttagcagtggggctgatgccatcatccgtgcggcagggacgttctacaacaactatgccaccacgtacagcgccggtaatctcgacgtttatgcggcgtcgttgaacaacgccagcgatggtcgcctggaagacaataccgccacgggcgtgattgcgtctgacaaaaacctggatctgagcgttgataacagtgtcactaactatggttggatcagcggtaaaggagatgtgcatttcaatgttctgaaaggcacgctgtataaccgtaatgccatcgcggcggacaacgcgctgaccattaatgccctgaacggtgttgagaactttaaagacattgtggcgggtactgcgctgactattgatacgcagaagtatgttaccaacaacagcaacagtaatatgttgggacaaaccatcgcgatcaatgccgtgaatgacattaataaccgtggaaatattgtgggtgattattctctgggtgttaaaaccaccggtaatatttataactacctcaatatgctgagttatggtgtcgctggcgtatcggcaaataaggttacgaatagcggtaaagacgctgttctcggtggcttctacggtttagcgttagaagcaaacgaaactgataacaccggtactattgtcggcatgtaagatgtaaccaaagacagcagtggcttttaatattaatgcgtcatgtcacgcaggggttgctgctgtctttatttagtttgagaagataatgcaattacgatttaattttggtttgctgctcattctttgttgttttcaggttgcagcgaaagacagtcttgataatttgatcaagcagcaaaaaaatgcagatgaaagcacgttgcgcgcnnnnaaattagaaaaaaaagatgtttactcaaatgcacaacgtaatgcgtttactctgggtgaactgccgcaggaaaagaattgctttatcattaatcggattgaactggaagataactttctgggtggtcagttgatttctgaagtgcaaaaagcgattgccggacgttgtgtcggtagtgctggtgtgcaaaaaattgcagctgccttgcaggattattatattaatgcgggatatatcacaacgcgaattagtatcccttcgcaggatatttctaaaggcaagctacgtttccaggttaatgccgggaagatagaaaaaacgattgtcgaaggtaatgatatccgtgaatggatgttaccttttcagcgtaacgatattctcaatattcgtgatattgaacaggggctggaaaatcttcagcgagtacctgacgttgatgtgaaaattaatattgaaccgggaacacgggatggttacagcatcgttcatattgatacacaccgggggaaaaactggagcgttcgggcaagttacaacaattggggcgatgaagaaacgggccgttaccagacaaccgcggtgggttatctgtttaatccagcgaaaatgggggatctgttttatctcgccggtacgcgtagtactaccggacagtatgaaaacgtcagtagttattattccattccggtggggtactgggagtacggctttttctatagcaaaagtaaatcgcagcaggtgattccgctttcgtacatctcgctggattatgttggcatcagcgaatacttgagcgcaaaagcgacgcataccgtttatcgcgataaaacaaaaaagttcgccggtagtgcagaactcattcgacgaaagtcgaattacacgcttaatggtgaggagctgacattacaggcgcgggatatgggaaatatcaagctggggctaaattataagcaacagttacccggcgcgttctgggattcaaccctctcgtggcaacgctttttaacctggttcggtggtgaaaaaacgccggatatgcaatatggcgacgttagcccggtaagcaatatctttaattttgagggtaactatacccgacaaatagagaatggatattacaataccgctttttttgcccagtacgcaccgcgtgaactgactttgcaagataaaattacagttggcgatcgttggagtattcgcgggtttgaaaatagcgtaggtttgtcagggaatgatggttt

SEQ ID NO: 229 - DNA, 7285 bp, Escherichia coli
  Strain O55:H7
  modified_base (3302)..(3302): a, c, g or t
  modified_base (3305)..(3305): a, c, g or t
  modified_base (3796)..(3799): a, c, g or t
  modified_base (6533)..(6533): a, c, g or t
taaaaaatacgctggcatttcctttgcctggaatgaaagctaattattatgccggtcttgattttgggcaagtgtatcaggacgcttcttatggcgatgaatcactggtgggctcggcagttggtattgatggaaacattaaaagtcttgagtataacttttccgtttctaccccattaaagtatccggcgacattagatattgatcgggtgaatgtaaattttaatttttcgtaccaaatgtaaaggataacgagactcatgagaatagggacagatattgttgaaattgccagaataaccaaagccattattaatggagagatggttttttatgagcgtgtttatacttctcatgagcgcttactcattaaccctgcagaacctgattatgaacgggcctctggattctgggcggcgaaagaagcgttagttaaagcgattggttgtggttttcgtgatggcgtacgtttccaggatattgaaataaagcatgatgcagccaaagcaccttatttcgttatttccggaagactacaagaaatttttatcgggcaggggttgcaaaataactccctgagtatttcgcattgccgtacccacgccattgcgactgtcatcgtttattaactcaacatatgtgatgaatatgtacaaatataatgatttaaatgaaaaaaccgtactggtgacaggagccagtggtgatattggactgggtatttgcgaaaaatatctggagcagaactgcgatgtttatgcgctctataaatccaacgacgtgcaattaacggcgctgaaagcaagccatcctgcaggcgataaactgcatattgtgcagtgcgatcttgcctgcccccagagcgtgagcgcattgtgcgaacagatagagcgccaagctggcaagattgatgtgctggtaaataacgcgggcatcgttaaagacagcctgtttgcctcgatgagttatgaggatttcacccaggttatcgaaaccaacatgttcagcattttccgtctgacgaaagacgcgctgatgctgcttcgtgcggcagaaaatcccgccattattaacgttgcctctattgcagcgctgatcccaagcgtcggtcaggcgaattacagcgcgtcaaaaggggcgatcctaggcttcacccgcacgctggcagcagaaatggcaccctggggcgtgcgcgtcaacgcggtcgcaccgggaatgattgaatcgaaaatggtgaaaaaagtatcccgcgcagtggtccgtgcggtaaccagtaccatcccgttacgccgtctgggtaaatgtgaagaagtggcgaacaccatcgtcttcttaagttcctctgcctccagctacattgtcggccagaccatcgttatcgatggcggcctggtcatgcggtgatttatgtctaaatacacgattccttcgaaaatcttcctcgaaatgggcggctggcgtcagccgctgctgatggtcgataaaattgcagattataaatacggtgaaaatggctttgtcagtgtcgtgaaacacgtcacctataacgaaccgtatctactggggcatttcccggaagatccgattatgcccggggtgattatttcggaaatcttcggccaggccagcgagtatctctctttcctgaccgacatttgcgatatctggcgcgaacgttttgaggaagagctgaagtcgttacgtgatattcacgcacgcattcaccgccctgaaatgctggagattatccgtacccggcgcagccaggtacgcggcgtgctggcggctcagaacctgaaatttaaagatatcgcctatccgggtgattctattgatgttgtcagcaaattggctttttcggatgccagtggctttaaacactattccgtgaccgcgtacgtcggtaaaaagctgattagtcagggcaccattatcaatttccgtgaaaccaagtaatccaataagagagtaaatattatgtctaccatgaatgacgctattgaacagcgtaaagaagttctgatgaccattaaaactgagatcatccagcgactgaatattcaacgcgatgaagcgcaaattgatgatgatactgcgctgtttggtaatggttttaaactggactccgtcgatgcaacggaaattgtcgttctgctggataaagtatttgatatcaagatcagcgaaagtgacgacccgtcctatatgcgcagtatcaatagtctggccaccttcgttattcaaaagaaaaacgattaactacttattaaagaattaattatcaggacacgtttatgaaatctcttgctgaatttcacttgaaaaataatgcggtaatgggggtatataacaaccgtaccctaccttcttcttatcacgatgctatgaccgaatataaagccgttcgtgaaaacgcgctgctggtggactattctcacctctctattgttagcgtcatgggcgatgatgcctgggcgctgatcaaccagctggtttccgcagatgtctccatcattcgtgatgagcaggcaatctactcactggtgttgaatgaagagggcaccattcgcggagacgtctatgtgctgtgcagcattgacggttattacctgctttcagaagatatttcggctgccgaattgatcgccagcatgaataccattctcgaaaaagcggaagaactggatattcaatcgatgcctgaaattcaggatatgcgggaaaacaactggggggcaatcctgctcgaaggcccatactcctgggagatcatgtctgaaattcatggctttgacgtgattggcctgccttactacgaatacatgaataccgaggaggatctgctgatcttccgctgtggtaaacacggtgagtatgcgtacatgaccatcggtgagcaggcgaaactggcggagcagtgggaaaaactgttaaccgttggcgagaaatacctgatgcagaccggcggcctggattatcaaaaaatcgtacgcctcgaaaatccgtgctgggatgccagcctctgggaaggtcaggcggtgaatccggttcagttgcagatgcagtgggcggtgcagtacgacaaagatgattttattggcaaggacgcggtgacagagctctcccaggagtataccggtaataaactcatcggcatgatcgcacaggaagaatgcgaaggcattgaggctggcgatcgcgtgctggtggaaggtcaagacgtgggctatgtcgtgaaggcactcttttccccagcgttgcagcgtttcattgccctgaccctgctggaaaaggattacgcntgntctgacatcagcggctacgaaattcaaactgctcacggaattattccggcgcaatcaaaatgtatgccgtttatttataacctgagcatgttggttagcccaactgagcacagttatatcgacgcgtcaaaaaataaaagcgcagcgtaatgaatatcgccgcgtgactatagcttacgcggcttaaattaaccccaattggcgggattgccaggtattattcatgaaaacgaacaggaaaagagttgttattaccgggctggggattttgtcctcactggcggaaaatattcaggatttccgggaagcattattaaataaaaaaaatggcgttaaggatagcgaacgctttgcaaaatggtttgaaaatgcgcgtgcggcagaagtgttgcatgacattgaatactccgatctgaacgaagatgttatcgattcactggataacgcagcgctctgggcctacaaagtgggtaaagatgcgctgagtcagnnnngcctgatggatagccgtgacaccctcaaagaaacaggcatgatcgtcggtgtttcgtccgcgggaacagaggcatttttgccgctgttcgaacagcgcatggaagatttctcgctgcgtaaagcactcttttccggcgcattctcatcctgttgttccagcgtttcaacgctgctgggcttacagggtggggttgaactggtggcgaccgcgtgtaccgccagcccgaacgccgtggggatggcctttgactacatccagaatggtaaaagcaaaaccatgctggcagtgggcactgagcccatctatctgccgacctttgccggattctacgcactgaatgtcatgcatccagacacttgtacgccgttctcgggtcagtccggtatgtcgattggtgaaggcgctggcgctatcgtgctggaagagtatgagcacgccgtagcacgcggggcgaccatttatggtgagatcctctcttacgccacttcctgcgatgctttccatgaaaccgggccagatccgcgtgccagcggagcggtgcaggtcatgaacaaggcaatggcaaatgcgggcgtaaccccggagcaaatcgattacgtcaacgcgcacggtacgggtaccgaagccaatgaccgtattgaaacgctggcaatgaaaaaggtcttcgctaaccacgataaactgctggtgagctccaccaaatcttactttggccacaacattggcgcagcggggattgtggaactgattgcctgtctggcaacgcttccggataaccgcgtactgccgacgctgaatttcagccatgcacgcccgaattgcgatctggactatgtgccgaatgagtttcgcgatcgcaaagtgaacatcttcatgaagaataactatgccttcggcggcaacaactgctgcatgatcctgagcatggagcccgcgtccattccggtcagtacctatgattcgaagcgtgtggctatctcgggcgtcggtgcagtatccgcaataggccacacgctcaaccaggttctggaaaacatctgggcgcaggaccaccacgttgaactgggtagcgtaaccttcccggacgatacactggaagaagccaaagagctgctggccgtgctggatgaatcaaaccagtttgccgagctgtttgatgaagagtacagcttcagcgaagctacgcttccggaaacggaaagcaactttaaaacgttccaggtttccgggctggagccgcgtaaacacctgcgtcgtttcgatcagcgtaaagcgacccgtggcggcacgtttgccctgatcgcactcaccgaagcgctggaacaggcgaagcgtaaaatcaaacgcgacggcgatgagttgggcatgatcatggggatgtcccgcggcccgcaggaaaccacctacaaatatctgcaaagtctgaaacccgatccacgcaaagtacgtacatcggaatttcctggctcgctgatgaatgcgatcccaacgttctgcgggatctctgaagggatcaaagggtataccactacgcttgcgacaggggaaaactcggcgctgggcgcgctgacctacggttatgaaatcgtccggcagaacctgcaaccgcaggtattggttggcggcgcggatgagtacttcccgtcgatgtcgctgtatatggatgcggtgacacaaaagatccacatgacggctgaggcgagcgactatcagatttacggtaaagatccgcaaggttatgttccgggcgaaggggcttgcatgctgctgctggaagatccgcagttggctgtggcgcgtggcgctgaggttctcgcggaagtggtgggctacggcaagtcatgcagcaatacctacttcgacgcctcattgttggaagaaaaatccgcgtcgatggcgctggccattgaacgcgcccttacgcatgcgggcatctctgctggcgatattgatttggtatgtggtaccagcaacggtagcgatgaccattctcgtatcgaaattgacgcgatttacaacaccttcgccgcgcaaaacccggcggtgccggtagtgaactataacgcttgctttggttttgtcgcctctgccgctggtttgcttaacctcgccgtgattactgactgcattaagaagcaggcagtacctgcgattccaaatacggtggaattctttgatgagcgtgtgaattttgtacgccagtcgatgaaacttgcgctgaaccatgtcctgcttgttggcgcaacggaaggcggcaactactacgcgttcgtcattaagggataagactgtggacaatgccgctattatttcgggttacagcgtgtggatgccgtatgccgaagactgttcgcagttaattgacaatctgaaacaggggaaacgcgttgcgcgtacaccctggtttacctccaacgaggaagccattaaatgcgggtttaagggtaatccgtcagtggcgacgttgaaacaggtggacgatagcgcattggacctgctgtctcagttgatcgacgaagccctggaacaggcaatgctggataagcattgcctggccgggcgcaacgttcgcgtttatctgaccggtattgggccgcgtatcgacgggctggattacaaatctttctataattacaacgatgtagaagatatcaacttaacgcaatccatcacaaatctgcatgcctcaaagatgtcgcaggacacgatttcaagccatcttgcgcgcaaanatcgcttgcagtatttgccgcctaacatgaactgcaccagtaactcgtcactgactgcggtgcatctggcgacgcagggcattgagcagggcgggattgatctcgcgattgtgctgaactgttcgaaaattaaaacccaggacatctggttcctggaaacgcaatcgatgctggacagcgaacaagtgcagccgtttggtgaaaacagtaaaggtgtggcgttcgcagaaggttttagcgcgctcctactggaaagcgctcatcaccgccgggcgcgtcaacaaagtgagggcgtaagggtgcaaacgacttacacccaaatcagcgcgggccgcagcaacgatgcctcctggcttagcactaacgtgcacaaggtcatgcaggccgcgatgaagcaggctgaaattgcgctggatgatcttgcagccattcttccacacggcaacggttcggcagtgagcgataacgcggaggccaaagccatcgccatgttcgcaggggagcgacagatccccgttctcgcctataaagggcagatcggctataccgcaaccggatctggtgttgtcgatctgatcattggccaccattcgttgacgcatcatcaactgatcgcacctgttggcaacgacgtcattatcgacagcatggcttcgctggtacttacggacggcagcgtgacaaaccatagcaaacgccatttgctgaaggttggtgtgggtgtcgatggttcagttattggcgttgtcatg

SEQ ID NO: 230 - DNA, 2500 bp, Escherichia coli
  Strain O55:H7
  modified_base (91)..(91): a, c, g or t
tgcaagcggggcgcgcgaaatgacggaaaagagtatctacctgtcttcctgggcgcttacggaaccggacgacattttttatttttatcanccgacctggctcaacgcctgggaagcacatatgtacgaaaggggattatacggcacccgtgctaatggctggggactgaagcgctttggcgtggagaacgatatttatgcaccagaacggatccgtaatccacaatatatgccttaccttgaggcgatggagcaggtgaccgattctgcattacaacaaatgccgactaaagaacgcatgaagttaatgaaatcgcgcacggcatttatttatgccgattcctggggcgaatccggttcgtttgaaaaaatttccagtgcgctgcatatcgccactattgatacgcttcccaagaatttacttaagaagttttcgataacggaaccgacttgcaagattcgcggcgaaaaacaggcattcgttcaggcgctgcgtatggcgcaggattatctcgcctgggatgtattcgataacgtggtgatttgtgctgcctatcgggcaattccggtgctggtattctctgaagaagatgtgggtaaaccgcctaagcgtttatttccccgtcgtgctgatgaggtgaatttatctgttgaacgagtgggttgttttattctcagccagcgtgagagcgccatcaggctgcaatgcggggaatatcattccggcactgcgccacagcatgctacggatattgatgtcatggccttcagcgaacggcaacaaatgccgtcccggcctgctgctggcgttatcgacctggtggcccattacggtgaaagcggttgtctgacgcccgcgttgagtatggattatttaacccgtcatattcagcccggtggaaaaatgcgtacggtcattgccgataaacagtttggttatcactactttgaccttgaataccttgaaggataacgacagtcgtatgcaatctactattaaatcgttgcccgctatttcgcttagcaatatttataagtgttatggcgctggggcaggaaaggttgatgcgcttaaaagcattaatcttgatatcaataaaggcgaatttctcgcactgtgtgggccgtcaggcagtggtaaaagtactctgttgaatattctctcgggtattgataaaccgaccagcggaacggtgatatttttaaataaattactgaaccaactgccagaagagcagttggctgtgattcgtggaaaacatttgggttttatttttcagttttttaaccttatgccggtattaaatgttttcgataacgtttatttcccactggtgcttaatggtcagttcagtaaaaaagaagccactgaacggacgctgcattatctcgatagtgttggattaagcggttttggcgatcgtaaacctgggcaactatcgggcggtcaacaacagcgtgtcgccatcgccagggcactggcccacgaaccgatggtggtcattgccgatgaaccgacgggaaatttagacctggcaaccggcgaggctattttggacctgttgttgacgattaatcagcagaccggcaccacatttgttatttccacgcactccagcgaattaaaagcgcgggcacggcgagtggttgaaattcaggatggagtattgattcatgactcagatgcataaaggatttttgctcatcggcgtctttttgtacgcggcgtttgtggctccgaagatttacgcggcaacacccgacgctgttaaccaggttctgcaacaggggctcccggcgcagcctgccgcgctggcgacgctgaccgaggcgttaaagaaagagtatgaagccaggcacaatgtggtggcgctggttttttacgcctatggcttactgcgtcaagcggacggttatgcggcaacaaacgattttatccatgcctcagaatacgccaaaagcggctttttctggctggatgaagcggtggatttgcaggagaaaaatcaacgcgtacggtatttacgcgcccgcgtagatgcctatttacccgcagactcagggcgttgcgtggtgacagtcaaagacaccgaacacatgctggctgacccggcgatatggacgacaacgatccgcgaccatattctggcgatgcgttatcgcgcattacgtcactgcaaggacaccacccgcgcgaatgcgttgttggcgcaaattaaagggcagaacgccgcgcttgcgcagtcgctgacgcaggattttaatgttgtaccagaatgggatagtgaagagttaacccaggtactgctgccgctgatgaaaggtgagtaaatgtccggggaaattttagctgttaattgcgttctgctgctgattctgttttttgtgttttatcagcttctgttttattcacgagatgtcaaatttgcatttttgaatctctttcgccacaagcgtcgctctttttctaccataaccgctattgtattgggtggcgtgg

SEQ ID NO: 231 - DNA, 1250 bp, Escherichia coli
  Strain O55:H7
tttatatggcggatttattgattactctttctggatcctgaaagagcagacgattcgtaccaatattggtcatgtacaaatttacaatcagcactattttgaaacgtcgaataaaaataagagcctgattgccgattatgcggcgttaaagaaagctattttgtcggacccgacgctggcggcggatatttccacgctctccgggcaactggagtttactggcgtaatttcacattacgagagcgaaacctccagctatttctccgcgctgggggtcgagccgttacccgctttaaagctgggttcgttcgataagattatcgcggggagcgatctttcccgggtaaaaggtgatgaaatcaccctgggcagcggtctggcgaaaacgttgaatgcgaaatatgacgactggctggatgtgatggtggtcaacacggcgggcgggcagggcgcattgtcgctaaaaatgcgtggcatttttgagtcaggcattaaagattatgacgatgtcgcgatgaagatcccgctggacaccgcgcagcgcatgatgggtacggatggcgtcagcaaagtgcttattctgcttaaagaggatgacaccgcggcgtttagcgcaaagctgcgtcaatttatcgaacgcaatcatttgccgctggtggtcaaagactggcgtgatgtttcactcttttatcaacaggttgaagggttgctatcggggatctatttcttcatcaagctgattgttgcgctgattgtcatcttcatgatcggcaactcgatggcaatgaacattgttgagcgcacccgtgaaattaccactctgcgtgccataggcctgaagccgcttcacgtcacgcgcttgtttctgacagaaggcatttttattggtgtgattggcgcagtcggcagcctgctggtggggggcgtgttagcctggattattaatctttatggtattgcgatgccgccatcgccgggacaaaccatcggctataccgcctttataaaaaccagtaacccggaattgatttgggtgacggtggtattacctattttgacagcaacaggtgcctctgtgttaccggctttacgtgcttcccggctgaatatttctgacgcatttaaattctcatagggctaattatgaatatggctttttacggcaagtggtttgcttgcctgtggctcgctacgtcgtgcgttcaggcggcgagcacagataataaggcgctggagataattcgtcgcgc

SEQ ID NO: 232 - DNA, 998 bp, Escherichia coli
  Strain O55:H7
  modified_base (10)..(10): a, c, g or t
  modified_base (686)..(686): a, c, g or t
cgttcgccgnataaaccgtttcgttacacgctgacggtaacggaatataaagcgggcgcaacccagccagagaataaacaggtcctcgatatttccatgcgctttatgaaaccgcagggtaatgaaaaagcggatgcacgctcgctggtgcgttttatttatccgccgcgagataaaggaaaaatcatgctttccgactggtacgatttatggttttacacgccggaactgcgacgtcctatgcctatttcacggcaacaaagattaattgggcaaatctctaatggcgatgtcattgtcactaactttgaatatgcctatgactcgaccctgatgggggaagtcacgtgtgctgaaaagcagtgttacaagctggcgctggtgcgtaaatcggcggatatcacctggccgaaggttatctattacgttgaaaaagacggtgataatcgcccgtggaaggcggcctattattcgcaggatgaccagttaataaaagaagtgttgtatcaggatttccagccggtgttggggaaaacgcgacccatgaaaataaccgttaccgatgttcgtcacggcaataactattcagtgatggagtacagcgatgttcgtctggaatcgctgccggagtttcatttcaccaaagagtatattcagcgaggtgcgaaatgaaacgtacgctgaanatctcttcgttgctgtgtgttgcgctgccgttgacggtacaggcggattgcctgtcaggtgacgaggtggcacaaaacagcgatgtgacgctttacgagcaggtgtcttatgtcaataaacaggcttcggcctggcagattgcaggcaaaaatccctacacccgtcacaacggttatcaggaggcggggattggcatcaatagcggttgttcgataatcgacaatacgctggaccttaagctcaatctgtatggaataaacgaatatgcgcttaaacccgcagggaaattcgaaacggatgatagccgcacg

SEQ ID NO: 233 - DNA, 3340 bp, Escherichia coli
  Strain O55:H7
  modified_base (60)..(61): a, c, g or t
  modified_base (853)..(853): a, c, g or t
  modified_base (2461)..(2464): a, c, g or t
aattaaccgcctcagtctggtctatagcgcctcggacagcgttcaatttgaagcaggcanntttgccgcgccgtcaggaatgttctttttgcgttcgccttctgatttgcaaacgcattattacaccggattccagtcgacgcgtttgcacgatcccaaaatgacatcggcgtatcaggcgtcatcgtggggcgcaaaaatgagcgtggatacacgcgattatgcgttttcggcgagtgtcataccgaagttagccaccatcgacaaacgctatgtgacgtctggcaactggtcggctaatcagcagggaaacagcgacgaagcctatctgctgagcttcagcgatcatcgctttggtgagcacacgccgacagtcaatgtgcggctcggaccatcgccgtcactcgcgctgtctgacagttatcactacaccccgcagcttacgctgaatgtcgacgcagcctaccaccgctcccagcaatggcggcatctttcccaccgtgagacggcgcaggtcgaggaatatcagtttccggattcgctctatgaaacgaaagatgaaagcggcgtggagctggcgctgggtgggcagtacaccagtgataatttcagcgtgtttggcgttgagtattactttcagagcgagggttattcgcgcgctgaacagcgtcagcagcgcgagttaattgacttcctcaataccacaaccggctatgcgccactggatcaggcatttgattcttacaaatacctgatggcttcagaaatcagcaataccgccaatcaggggatgctgcagggtaagcactatctgaacgcctgggccagtctgccgctggcgggagagtcgacnctgcagccttcgctggtggtgaatctcgttgatggcagcacgttgctgggcctgcattattccacgccgctcagcgctataagtaaccagcttgaagcctatgccggtggctatagcgcgctgggaagtcggtactccgaatttgcgctttttggcgacacgttaggcctttatttgggctttaaatactatctataaggataaagagatgatgaataatgcttcacaaccgacagtactgctttttgccggtcagggtaatccggttattggtatgggcagcgatctttgggatctcaacgccagtacaaaacatatctgggattgtgccagcgatatttccggactgaacctgcgtcgcctgtgtcagaaagggccgatgaatcgccttattcaaacgacggtacaacaactggcggtgaccgcaattaatgtaacgctctataccctgtgccgcgagcgtcttgagaatttaacggttgtgggctcctgcggacacagcgttggtgaatacagtgcgctctacgccgctggagctatttctcttgagacgctatttggcatgattcacttcagagccagcctgatgcatgacgaaagccagagaaataaaggcgcaatgctggcggttaaaggcatcaaccgcgaacaactgcagacgatgattacggaatcaggcattgcgctggatattagctgtgataacacgccgcgccagcaggttattgggggaacgcaggctgcgttgaatgaatttgccacgctgctgatggccgctggatacgaaccggttaaactcggtgtgagcggtgcctggcacacgcgtttgatggaagacggcgttcaggcaatgcgcgattatcttgccggactggatatcgcttcgccagagcatcaggttctgatgaacgtaacagcaaaaagcgaggtcgctccgtcaattatcaaagaaaatctctcattacacttaactcatacggtgaaatggactgaatctctcgatacatttctgaatatgccaacctcggtagctttccttgaaataagtaataagccctatttggggaatatgttcaacgatttcgctggcgtggatcagcaacgagttatgcattgtcgtaaagcatttagtgatgcgaaggtattcaaatgattcctgattatttaacttttattcgctttcaggataaacgaagtctgatatacatttatgctattggacttattctgataggcttttattggaaaaatgcaggatttacttttccatcagaggatattggtgtcgttagtgggattctggccctagtgctgtataattttatttttgatctcaaggcgtactgggcttataaatgcgtcacgaagaatatcgatttttcgtggtttaagaaaaagcagaaccacaaaatagaattatttcttacgcaacctctggtggcaggatttctgtcgttaatcatgttgagtacaatgagttgggggctataccagcgtctaccctcgttatatgcgctgttcctgatttcgttacttgggccgttggttatctttctgctgtttcggatgatccgcaccagttatgtcaagcaggtcgctatttcagtnnnnaaaaaagtaaaatataaaagtctgactcgctatgtgctgctttcggtgtgcatctcaacggttgttaacctgcttactatcagcccgttgcgtaacagagattcttttgtgatagaggggcagtggttaacgtttaaatcgataattgcattgctcattctttgtggcgtagtgttggcgattaatctgttttttctgcgcttctccaggcggtacgcttttttgggcaggctttttttgcaggaaatcgatctctttttctccagtgaaaatgcattgtcgaccttttttgccaagccgctttggcttcggttattcatattgctggttattgaagtgatgtggattacgctggtgtcggtattggcaacgcttgtggaatggcggatttggtttgaagcctattttttactctgctatgtaccgtgcttaatttactattttttctattgtcgattcctctggcataacgattttatgatggcatgtgacatgtatttccgttgggggcattttaataagtgaggaagtgataggaagtgaccagataatacatatatgttctgtactctcttgcgcattttgattgttgactgagcaaccagacagttgatgtgcacgatttcccctcgcccaaacagacgtgggcgggggcacccggtgtgtgcaatatacgaaaaaaaagcccgtactttcgtacgagctcttctttaaatatggcggtgagggggggattcgaacccccgatacgttgccgtatacacactttccaggcgtgctccttcagccactcggacacctcaccaaattgtcgttcctgtcttgctggaacgggcgctaatttagggaaatcatgacctgaggtcaacaaacttt

SEQ ID NO: 234 - DNA, 4263 bp, Escherichia coli
  Strain O55:H7
  modified_base (2176)..(2176): a, c, g or t
  modified_base (2482)..(2482): a, c, g or t
  modified_base (3103)..(3103): a, c, g or t
tttattcaaacttcaatcaatatgcagttttaataagcaaaatctgctttttttgccaccgaccacggatttgttatgctggtggtctttgtagatcataacgataagtgcgaataaatttcgcacaacgcttttcgggagtcagtatggatatcatcttttatcacccaacgttcgatacccaatggtggatagaggcactgcgcaaagctattcctcaggcaagagtcagagcatggaaaagcggagataatgactctgctgattatgctttagtctggcatcctcctgttgaaatgctggcagggcgcgatcttaaagcggtgttcgcactcggggccggtgttgattctattttgagcaagctacaggcacaccctgaaatgctgaagccttctgttccactttttcgcctggaagataccggtatgggcgagcaaatgcaggaatatgctgtcagtcaggtgctgcattggtttcgacgttttgacgattatcgcatccagcaaaatagttcgcattggcaaccgctgcctgaatatcatcgggaagattttaccatcggcattttgggcgcaggcgtactgggcagtaaagttgctcagagtctgcaaacctggcgctttccgctgcgttgctggagtcgaacccgtaaatcgtggcctggcgtgcaaagctttgccggacgggaagaactgtctgcatttctgagccaatgtcgggtattgattaatttgttaccgaatacccctgaaaccgccggcattattaatcaacaattactcgaaaaattaccggatggcgcgtatctcctcaacctggcgcgtggtgttcatgtcgtggaagatgacctgctcgcggcgctggatagcggcaaagttaaaggcgcaatgttggatgtttttaatcgtgaacccttaccgcctgaaagtccgctctggcaacatccacgcgtgacgataacaccacatgtcgccgcgattacccgtcccgctgaagctgtggagtacatttctcgcactattgcccagctcgaaaaaggggagagggtctgcgggcaagtcgaccgcgcacgcggctactaataaagcatcaggattcctgctatccttggcgggaattgaatacaggagagagttatgtatcccgtcgaccttcatatgcataccgttgccagcacacatgcatatagcacattgagtgattacattgcccaggccaaacaaaagggcattaaactttttgcgattaccgatcatggcccggacatggaagatgcgccgcatcactggcacttcattaacatgcgtatctggccgcgagtggttgatggggtagggatcctgcgcggcatcgaagctaacattaaaaatgttgatggtgaaattgattgcagcggtaaaatgtttgactcgctggatctgattattgccggttttcatgagccggtttttgcaccacatgacaaagcgaccaatacacaagcgatgatcgccactatcgccagcggcaatgtgcatataataagccatcccggaaatccgaaatatgagatagatgttaaagccgttgctgaagcagccgcgaaacatcaggtggcgctggaaatcaataattcctcatttttacactcacgtaagggcagtgaagacaactgtcgtgcggtagccgcagcggtacgtgatgctggaggttgggtggcattaggctcggattctcacaccgcgtttaccatgggggaatttgaagagtgtcttaaaatcctcgacgcggtagattttccgccagagcgcattttgaatgtttctccgcgccgcttactgaacttccttgaatctcgcggtatggcaccgattgcggaatttgcagacctttaattactagtaatggaaatatattaatgaacgagttttctatcctctgtcgtgtgctgggttcgctctattaccgccaaccgcaagatcctttactggtgccgctgtttaccctgattcgtgaggggaaactggctgcgaactggccactggagcaggatgagttgctgacacgtttgcagaaaagctgtgatatgacgcaagtctctgccgattacaatgcgttgtttatcggcgatgaatgtgccgtgccgccatatcgtagcgcatgggttgaggacgcaacggaagcggaagtgcgngcttttctttctgaacgagggatgccattagcggatacgcctgccgatcacatcggcacattgctgcttgcggcttcctggctggaagatcagtcaacggaagatgagagcgaagcactggaaacactgttcagtgagtatctgttaccctggtgtggtgcgttccttggcaaagtggaggcccatgcaaccacgcctttctggcgcaccatggcaccgctaacccgcgatgccattagtgcaatgtgggacgagctggaagaagattctgaagagtaaatgtgatatgcgtcactcataactgcnacagataatttgctgttgcataaaatgtgtgctcgatctcattcatggccgcgttttctgctatcatgcgcggcatgaacatacttctctctattgcaatcacaacaggcattctctccggtatctggggatgggtggctgtttccctgggcttactaagctgggcgggcttcctgggctgtacggcctactttgcctgcccgcaaggtgggctgaaagggctggcgatctccgctgcaactctgcttagtggcgtggtgtgggcgatggtcattatttacggtagtgcactggcgccacatctggaaattctcagttatgtcataaccggtattgtcgcgtttctgatgtgtattcaggccaaacagctgctgctttcatttgttccggggacgtttataggcgcatgcgcgacgtttgccgggcagggtgactggaaactggtgttaccttcgctggcgcttgggctgatatttggttacgcaatgaaaaacagcggcctgtggctggcggcgcgtagtgcaaagacggctctccgtgagcaggaaatcaaaaataaagcgtgaggggcactcacgctttcgcttaaacagtaaatgccggattattaattccggcatntttatctgtcaggattccggtggaaccgacatatggcggtatttcaccagaatgtcattctgccgttctgctttgttctgcaaatcccacagaccacggtcaataccatcattaatcaggaaaatgacccctgtttcgatagccgacatcaggcacagcataacgggttcgttcgaggtgtaacccacttccccttccagcaagcgctggtagtcaataaagcggaaaaccccggcctgaacttcataggaaagtatcgtcttactggtgttcaccgaggagaggatctcaccggtactcacattgacgacgcgcaggttcacggcaatctgatcgagctggtattgcgtgtcggcaccgatcccaaaatatcttgccccaaccccgccagatttgacattgctttcataaccgataatcgaaccttcaaccatgatatttgccgcagttaaagattgcagcgggattcggttattaatggcaaccgtgccgttttcttgtgccgcacgaataatcttgcgctcattaagcaggttttgtaagccctggcgctccagcggtataaaccagcgagaatctttcaatgccgtgaccagcatcgccgtggcgctttgcggaacagcagtggagaagttacttgccgggtagggtttaaattgcccggtttcgtcctgaatgttgtataccgaaacaaagatcttacccgtcggcgctggcagatgggtcaaatctttgtagctctgagcacgaggcattaatgtcggtctggcggcttctttaggcggggcggttaagcatccgctcagtaacatgacggcaaccaaaagaaataagcgctgcatgattattttccttatgaagctggggcttaaaaatcggttgagttattttgtaaacccgaaacctggatggtcgaggtttgtccggttttacgatctgtcacgttcaactgcaattgaccatcgcggttagcaatatcaacaatataatcgttggtcaccatgcggcccggtttaccggtattaatattcgacagtagcccacctaaaatttgtgactggatggcctgagtaaagttatctaacgctgagggtgtttcaataccaaagtcatcgttatagctcggatctttataagagttttgggcctgagcgctattt

SEQ ID NO: 235 - DNA, 1502 bp, Escherichia coli
  Strain O55:H7
ttgggttaccaccaaagtttggattacggaactggaaagtcatggttccagcccaacttaatggcgaaataagcatgagtagaactactgcatgtttgacacgcattgcagcctccgaacaattttttatttagaattcatcatgcgccaaatcgcccgtacttaataacgcctgatttatctggcgacgatttagtgcttcttcagtttgaatcagtgcaaagacgacagttttttcgaagtctcttttcaacgggaataaaaaagtctggaaaataacgtcctgattgaccgttattgtgatccagcttccccatcgtgcactgggcctttcattaatcgttaagttacccgtatagtcactttcccatttatcactaaaggctcggtaaaaatcatggccaatagatgaaacagtatggtcagttaacaatcccgggacttctacctcaacggcgtgaagattccctgcggcgaacagaaattctgccgccacaatccagcgtaaataacgtttcatggctttatcgcctgaggttatcgtttgcccaggaaaccgcttgtgtccggttttttacggctatcttcttgaaaagattataaagatgcgttttaaccgtattttcgctgatgaacaacgaacgagcgatctcgttattagacgcgccgatacgcagcttattcaggatctctttttcccgatgagtaaggagggctgattccgtgctgttataacgatagttaccagaatgtgtaatcaggtaactggcaagcttttgcgtaaagtagcattcgccgcgcaggacgccttgcaatccattgacaacgcgttcttgatcctccatggcataaaaaacgccgttgatatgaggccagttttcaatgtcgcggtacgggtaatcttcaggcgtatttagcaacaatattttgatattgttgtttttcctgctcaaagtatcctgccaataatggataagctttttatccgcttccatcatatccagaagaataatagagcctgaagagatatcgtccagagaacgttgaatattatgtaattttcctgtaattgccagcgattgtttaaggtgctgcaagagagctgtcgcctgcaaagaaggtttagtgatcaacaataatgtatgaccatgaatactatggacttcattaaacatgatgaaaccccgctttttttattgatcgcacacctgacagctgcctctaaaatagaagcaccagaagtactgacagatgttgcactgctgtgtgtagtaataaatcagccctaaatgggtaaaatataaaactaatggattacatctgatttcaatctagccattacaaatcttaaatcaagtgttaaacatgtaactaaatgtaactggttatattaaaatgttaaccttaaggttttattaagtttagaaatgatagaaaagttgtacatttggtttttattgcacaattttaaaaaatcatacaaatggtgctaacttactaat

SEQ ID NO: 236 - DNA, 15616 bp, Escherichia coli
  Strain O55:H7
  modified_base (3)..(4): a, c, g or t
  modified_base (929)..(932): a, c, g or t
  modified_base (3743)..(3743): a, c, g or t
  modified_base (4434)..(4434): a, c, g or t
  modified_base (5381)..(5381): a, c, g or t
  modified_base (5587)..(5587): a, c, g or t
  modified_base (8699)..(8699): a, c, g or t
  modified_base (9439)..(9439): a, c, g or t
  modified_base (13171)..(13171): a, c, g or t
  modified_base (15613)..(15614): a, c, g or t
tannaaaaatatttcggtgtagtcctttcgtcatgtaaaacgttcttgttttttctccacaccaccgtggacaattttttactgcaaaaagacgaggtttgtcacggcttgtgcgcaagacatatcgcagcaatcagcgacgggcaagaagaatgactgtctggtgttttttgctagcggaaaacggagatttaaaagaaaacaaaatattttttgcgtagataacagcgtatttacgtgggttttaatactttggtatgaacaaaaaaagaaaaatacaacgcgcgggtgagttattaaaaatatttccgcagacatactttccatcgtaacgcagcgttaacaaaatataggttgcgttaacaaccaagttgaaatgatttaatttcttaaatgtacgaccaggtccagggtgacaacatgaaaaacaaattgttatttatgatgttaacaatactgggtgcgcctgggattgcagccgcagcaggttatgatttagctaattcagaatataacttcgcggtaaatgaattgagtaagtcttcatttaatcaggcagccataattggtcaagctgggactaataatagtgctcagttacggcagggaggctcaaaacttttggcggttgttgcgcaagaaggtagtagcaaccgggcaaagattgaccagacaggagattataaccttgcatatattgatcaggcgggcagtgccaatgatgccagtatttcgcaaggtgcttatggtaatactgcgatgattatccagaaaggttctggtaataaagcaaatattacacagtatggtactcaaaaaacggcaattgtagtgcagagacagtcgcaaatggctattcgcgtgacacaacgttaatttccattcgacttttaaatcaatccgatgggggttttacatgaaacttttannnntagcagcaattgcagcaatcgtattctccggtagcgctctggcaggtgttgttcctcagtacggcggcggtggcggtaaccacggtggtggcggtaataacagcggcccgaattcagagctgaatatttatcagtacggtggtggtaactctgcacttgctctgcaagctgatgctcgtaactctgatcttactattacccagcatggtggtggtaacggtgcagatgttggtcagggctcagatgacagctcaatcgatctgacccaacgtggctttggtaacagcgccactcttgatcagtggaacggtaaagactctcatatgacagttaaacaattcggtggcggcaacggtgcagcggttgaccagactgcatctaattccaccgtcaacgtaactcaggttggctttggtaacaacgcgaccgctcatcagtactaatacatcatctgtattaaagaaacagggcgcaagccctgttttttttcgggagaagaatatgaatgcgttattactccttgcggcactttccagtcagataacctttaatacgacccagcaaggggatatgtacaccattattcctgaagtcactcttactcaatcttgtctgtgcagagtacaaatattgtccctgcgcgaaggcagttcagggcaaagtcagacgaagcaagaaaagaccctttcattgcctgctaatcaacccattgctttgacgaagttgagtttaaatatttccccggacgatcgggtgaaaatagttgttactgtttctgatggacagtcacttcatttatcacaacaatggccgccctcttcagaaaagtcttaatttgttgaaatatcgagcataagatgaatctggagagaatggtctgctgcgaatcagccaacctgaaagtatggataacacaaccctcaaggatgactaatcattgaggaaatagaataaatgttcagaccttttttaaactctcttatgctcggcagtttgttttttccttttattgccatcgcaggaagcaccgcgcaagggggcgtgatccatttttatggccaaattgtggaaccggcatgtgacgtcagcacccagtcatcacccgtagaaatgaactgcccacagaatggttctgttccgggtaaaacctactccagcaaagcgttaatgagcggcaatgtcaaaaacgcgcaaatagcctcagtaaaagtgcagtatcttgataaacagaaaaagctggctgtaatgaacatcgaatataactaagtttctgaacaactcacgttgctgagcagaaaaatgcgatttaaccaaaaagcctgctgtacacttaagaaacaagaaggtgtaaggaggcgttatgaaaacgcgtattcatgttgtgcagggtgatattaccaaactggccgttgatgtgattgtgaatgcggctaatccttcattaatgggaggtggcggcgtcgatggggccattcatcgcgcagcgggtccggccctgctggatgcttgtttaaaagtcaggcaacagcagggcgattgccctacggggcatgccgttattacgcttgcaggcgatcttcctgctaaagccgtagtgcacaccgtcgggccagtctggcgtggtggtgaacaaaacgaagaccagcttttgcaggatgcctatctcaatagcctacgactggtggcggcaaacagctatacgtcagtggcttttcctgcaatcagtactggggtttatggttaccctcgtgcggcagcggctgaaatcgcagtaaaaaccgtttcagaatttattacccgtcacgctttacccgaacaggtatactttgtctgttatgatgaagaaaacgcccacctctacgaaagactccttacccaacaaggagatgaatgatttgccccggctggcgagcgcggtgctgccactgtgttcgcaacatcccggtcagtgtggtcttttccctctggagaaaagtctggatgcgtttgccgcccggtatcgtctggccgaaatgtcagagcatacgctggatgttcagtattacatctggcaggacgatatgtcgggtcggttactgttttccgccctgttagccgcagcaaagcgtggcgttcgcgtccgtttgttgctggacgacaacaatacgcccggacttgacgacattttacgcttgcttgacagccatccccgcattgaagtccggctttttaatcctttctcgtttcgcttgctgcgtccgcttggttatatcaccgacttttcccgtctcaatcgccgtatgcacaataaaagtttcactgtcgatggcgtggtgacgttggtaggggggcgaaatattggtgatgcctattttggggcaggggaagagccacttttttcggatttagatgtcatggcaataggacccgtagtagaggacgttgccgatgatttcgcccgctactggtattgcaaatcggtttcacccttacagcaggtgctggatgtcccggaaggtgaaatggcggatcgcatcgagttacccgcctcctggcataacgatgccatgacgcatcgttacttacgcaaaatggaatccagtccgtttataaatcatctggttgatggaacgttgccgcttatctgggcgaaaacacgtttattaagtgatgatccggcgaaaggggagggcaaggcaaaacggcattcactgttaccgcagcgcctgttcgatatcatgggctcacccagtgaacgcatcgatattatctcttcctattttgtaccgacacgcgcaggtgtggcgcaactcttacggatggtgagaaaangggtaaagattgcgatcctaaccaattctcttgccgctaacgatgttgctgtcgtccatgccggatacgcgcgctggcgcaaaaaattgctccgctatggcgtggaattatatgaactcaagccgacgcgtgaacaaagtagtacgttacacgatcgcggcataaccggtaattccggtgccagcctgcatgctaaaacctttagcatcgatggtaaaacggtgtttatcggttctttcaatttcgatccgcgttcaacattgctcaatactgaaatgggcttcgtgatagagagcgaaacgctggctcagttaattgataaacgctttattcagagccagtatgatgcggcctggcagctccgtctggacaggtggggacggatcaactgggttgatcgtcatgcaaagaaagagattgttctcaaaaaagaacccgctaccagtttctggaagcgggttatggtcagactggcgtcgatattgcccgtggaatggttattgtaaatgtggcttaacgggctggtgctttatcgttctcacgcttaacaaccggtttaccagagaacaaaaacttcagtaacgggatgcgcaaatgaatttcatacagaattatcgcaatccctactacgaatatcaggccacagagaaaaccaagccagttggaggtgatgtgcggtgtaatgtatgcnccgaaaaacagcgttaacgggtggtgaaccagatagataaacagcgatgcgttaacaaaataagtcacccgcgctgactggaagttaagcaaacggtggccaaaggagaagaccacattcaccatccacagaccgaggaccatggtgatcaccgactcggtttcgtacatccaggcatcgccactgccatagcgctggttgagtaaataagcgacaaacgccaatgctgcagcgagggtacagccacgagacggcgtggtaaacaaggctttaagatgagggaaaatgaaagccagtgcgccgaggataaagaacggtaaataaaatagcgtttgcatgacaataaaattgaacgtgccattactcagaatgggtggatacacaataaaaatcgttcttcttattaccgcataaccgatgccgaggcacaaaaaaatcaccgatagttttaccatcgagaattttttattcgttttatcagaattttctaaattatttctgatgcgtttaaatatccatacgcacagcgtcgtcatgaccactaacaccagtaaaaaccacagatgtgatattaattcccaggccaacgtattatatttgtcatacaatgacagcccaggccaactttccgctttccctttgacgtattgcagcataataaattgcggcaatgtcagtagggggatggctgttaacatcgggatccctacacgttcgacacgtactttccaccattttttcaagggatagcgtaaaaaaagcatgtaggaaaagtacccggatataacgaaaaatacctgcatgcggaacgagtggatgaagtcattaaaaagggtcagccacaatgacggttcggcgctattcacatgccatgtatggctcgaatagattaaagaaatatgaaaagggatccctaacaacatcagccaggcgcggatggagtcgangaaatattcacgttgcgcgggtactggattcatatatggttaactaatctcggatttttcgtcttatccctgtcgggttatgcctttaggcttgttgccatagcgacaccgacctgaccgcgccaggcgcaggcttcaagtttttatgcatagcatcatcgctaccactaaccagaatggaagcgtctgtaagacggttgataaanaaatttgctggcaaaccctacacgaagtcgatgcttctgtctttaggagaagcacggaaagtgaaaacggttgcaatcaggtgcttaatccatgagccagcgtgctgaacgataccgggattctgttgtcggaatggctggttatccattaaaatagatcggatcgatataagcacacaaagggggaagtgcttactaattatgaaacataaactacaaatgatgaaaatgcgttggttgagtgctgcagtaatgttaaccctgtatacatcttcaagctgggctttcagtattgatgatgtcgcaaagcaagctcaatccttagccgggaaaggctatgaggcgcccaaaagcaacttgccctccgttttccgcgatatgaaatacgcggactatcagcagatccagtttaatcatgacaaagcgtactggaacaatctgaagaccccattcaaactcgagttctaccatcagggtatgtacttcgataccccggtcaaaataaatgaagtgactgccaccgcagtcaaacgaatcaaatacagcccggattatttcactttcggcgatgttcagcatgacaaagacacggtaaaagaccttggttttgccggttttaaagtgctttacccgatcaacagcaaagataaaaacgatgaaatcgtcagcatgctcggggccagctatttccgcgtgattggtgcaggtcaggtttatggcctttctgcccgcggtctggcaattgataccgccttgccatcgggtgaagaatttccacgcttcaaagagttctggatcgagcgtccaaaaccaactgataaacgtttaaccatttatgcattgcttgactcgccgcgcgcgacaggtgcttacaaattcgtagttatgccagggcgtgacacggttgtggatgtgcagtcgaaaatctatctgcgcgataaagtcggcaaactgggggttgcaccgttaaccagtatgttcctgtttgggccgaaccaaccgtcgccagcaaataactatcgtccggagttgcacgactctaacggtctctctatccatgccggtaatggcgaatggatctggcgtccgttgaataacccgaaacatttagcggtcagcagcttctccatggaaaacccgcaaggctttggtctgttgcagcgcggtcgtgatttctcccgctttgaagatctcgatgatcgttacgatctccgtccaagcgcatgggtgactccgaaaggggagtggggtaaaggcagcgttgagctggtggaaattccaaccaacgatgaaactaacgataacatcgtcgcttactggacgccggatcagctgccggagccgggtaaagagatgaactttaaatacaccatcaccttcagccgtgatgaagacaaactgcatgcgccagataacgcatgggtgcaacaaacgcgtcgttcaacgggggatgtgaagcagtcgaacctgattcgccagcctgacggtactatcgcctttgtggtcgattttaccggcgcagagatgaaaaaactgccagaggataccccggtcacagcgcaaaccagcattggtgataatggtgagatagttgaaagcacggtgcgctataacccggtcaccaaaggctggcgtctggtgatgcgtgtgaaagtgaaagatgccaagaaaaccactgaaatgcgcgctgcgctggtgaatgccgatcagacgttgagtgaaacctggagctaccagttacctgccaatgaataagacaactgagtacattgacgcaatgcccatcgccgcaagcgagaaagcggcattgccgaagactgatatccgcgccgttcatcaggcgctggatgccgaacaccgcacctgggcgcgggaggatgactccccgcaaggctcggtaaaggcgcgtctggaacaagcctggccagattcacttgctgatggacagttaattaaagatgacgaagggcgcgatcagcttaaggcgatgccagaagcaaaacgctcctcgatgtttcccgacccgtggcgtaccaacccggtaggccgtttctgggatcgcctgcgtggacgcgatgtaacaccgcgctatctggctcgtttgaccaaagaagagcaggagagcgagcaaaagtggcgtaccgtcggtaccatccgccgttacattctgttgatcctgacgctcgcgcaaactgtcgtcgcgacctggtatatgaagaccattcttccttatcagggttgggcgctgattaatcctatggatatggttggtcaggatttgtgggtttcctttatgcagcttctgccttatatgctgcaaaccggtatcctgatcctctttgcggtactgttctgttgggtgtccgccggattctggacggcgttaatgggcttcctgcaactacttattggtcgcgataaatacagtatatctgcgtcaacagttggcgatgaaccattaaacccggagcatcgcacggcgttgatcatgcctatctgtaacgaagacgtgaaccgtgtttttgctggcttgcgtgcaacgtgggaatcagtaaaagccaccgggaatgccaaacactttgatgtctacattctgagtgacagttacaacccggatatctgcgtcgcagagcaaaaagcctggatggagcttatcgctgaagtcggtggcgaaggtcagattttctatcgccgccgccgccgtcgcgtgaagcgtaaaagcggtaatatcgatgacttctgccgtcgctggggcagccagtacagctatatggtggtgctggatgctgactcggtaatgaccggtgattgtttgtgcggcctggtgcgcctgatggaagccaacccgaacgccgggatcattcagtcgtcgccgaaagcgtccggtatggatacgctgtatgcacgctgtcagcagttcgcgacccgcgtgtatgggccactgtttacagccggtttgcacttctggcaacttggcgagtcgcactactgggggcataacgcgattatccgcgtgaaaccgtttatcgagcactgtgcactggccccgctgccgggcgaaggttcctttgccggttcaatcctgtcacatgacttcgtggaagcggcgttnatgcgccgtgcaggttggggagtctggattgcttacgatctcccgggttcttatgaagaattaccgcctaacttgcttgatgagctaaaacgtgaccgccgctggtgccacggtaacctgatgaacttccgtctgttcctggtgaagggtatgcacccggttcaccgtgcggtattcctgacgggcgtgatgtcttatctctccgctccgctgtggtttatgttcctcgcgctctctactgcattgcaggtagtgcatgcgttgaccgaaccgcaatacttcctgcaaccacggcagttgttcccggtgtggccgcagtggcgtcctgagctggcgattgcactttttgcttcgaccatggtgctgttgttcctgccaaagctattgagcattttgcttatttggtgtaaaggaacgaaagaatatggcggcttctggcgcgttacattatcgttgctgctggaagtgctgttttccgtgctgctggctccggtacgcatgctgttccatacggtcttcgtcgtcagcgcgttccttggctgggaagtggtgtggaattcaccgcagcgtgatgatgactccacttcctggggtgaagcgttcaaacgccacggctcacagctgctgttagggttagtgtgggctgtcgggatggcgtggttggatctgcgtttcctgttctggctggcaccgattgtcttctcgttgatcctgtcaccgtttgtttcggtgatttccanccgtgccaccgttggtctgcgcaccaaacgctggaaactgttcctgatcccggaagagtattcaccgccgcaggtactggttgataccgatcggttccttgagatgaaccgtcaacgctcccttgatgatggttttatgcacgcagtgtttaacccgtcatttaacgctctggcaaccgcaatggcgaccgcgcgtcaccgcgccagtaaggtgctggaaatcgcccgtgaccgccatgttgaacaggcgctgaacgagacgccagagaagctgaatcgcgatcgtcgccttgtgctgctaagcgatccggtgacgatggcccgtctgcatttccgcgtctggaattcccctgagagatattcttcatgggtgagttattacgaagggataaagctcaatccactggcattgcgtaaaccggatgcggcttcgcaataaaaacgtagttgcctgatgcgctatgcttatcaggcctacatcgctcctgcaatgtgttgattttgcaagattttgtaggtcggataaggcgttcacgccacatctggcaaaaacaacgagccaataaaaataccggcgttatgccggtatttttttacggaagaggtatcaaatgcgtttaattgtggtgagcatcatggtgaccttgctgggtggctgtggcagcatcattagccgcactataccggggcaggggcatggcaaccaatattatcccggtgtgcaatgggatgtgcgtgactccgcctggcgttatgtcacaatccttgatctgccattctccctggtttttgatactttactgctgccgatcgacattcatcatggcccgtatgagtaattaacgttcatcccactcatcagctgctgcgcgtccttcctcggtatccagcggtggctcaagctgaaattccccctcgtcccattcatgtaatgtattctcttcctgccactcctggcggatctctatctcatcatagtcgccatcaaaaacactttgcgcggcttcaccgctaagcataggtaaacattcaccttcttccccttcgtcggcaaaaaactcaacttgccacatgatgtcgccgtcctgcaaaacgtatttttgggcattgaactgttgcacattcgcatcttcggcgtcgatgccggggttgtctgcaagaaattcttcgcgtgcagcgtcaatggcttcttcaagcgttgcgtacatggtcatcacgattctccctttgagttgatgaggtttcagggaaaaggatagctgattctccgcttttgcaagtatgaaaggcgaaaaatcagttcgatacctggggtattcgacgacgacgtagactgttccatgaatagactgcgttgaataacactacgccagcggtgacgagaaataccgctctgaaaccgtagttcgctgaaatcgctgctcccatcaatggtccggtaacgttgccaatatcacgaaacgattggttatagctgaagatacgtccggcgatttggttgctcgagttgtaaaccaacagtgtctgtacggcggggagtagtgcaccatcggcggcaccgagcaaaaaacgtaaaatcccaagttgcaatggcgtctgaacgtaagacattgggatcaacagcagtacagaaaagatcagcgccgtaatcaggatcttttcgggtccgattcgatcgccaagtttgccgagtcgtggtgcactcagcagagcagctacgcctggcaccgaggcgatcatgccactgataaaggcgacgttactgacgttacccgccagttcgcggacatacagcgtcagaatgggggcaattgagcccgtcgccacctggatgattaacgtggtgacaaacaggctgagtaccagtttcgggtttttaagtgatgtcaccacttcccgcatgtgcagcatctcttttttgctgaccggctggaatttttctctgatgcaaaacagggtgacgaaaaagcagagtatgagcacactggcggtaataaagaataccggacgtaagccgtagctatcggcgagcaggccgccagccattgggccgagcaacgcaccgctaacgccgcctgtggagagcgtacccagtgcccagccgcttttattacgcggtacttgtgtggcgataagagcattagcgttggggacaaatccgccaagtaacccaagaagcgcccgcaggatcaaaaactgccagatattttgtgccagccccatcaacaccatcacgatgcccatgccgagagcagagcgtaatagcatgagttttcggcctttacggtcggcgagtccaccccaaaacggtgaggcgatggccgaaaataaaaatgtaatgctgaagacaataccggaccacatattcagggcggagtggccggtaacgccaagctgctcaacgtagaggggtaagaagggcattaccagactgaaggcggcaccggtaagaaaacagcctagccaggcgacgatcaggtttcgtttccagtttataggggtgtcattttcacagggtgacatagcaatccgctgttggtgcgccaggcgcggtgaacataagaagaaaagataagcacactaattatgcgcccgacttccagggggcgcaatccagagagcttttatcgctaaatcagggggatttgctgtggtaatgccggatgccattctgaagcatccggcatgggagatttaatagcgtgaaggaacgccttccgggcgtgttttaaagcgacggtgtaaccacatatactgctctggtgccatcatgatgcatttttcgaccactttgttcatccacgcggcggtagtttcggcatcatccagcggcggagaacactctggcggcagcataatcaattgataccctttgccatctggcttacggcgtggaacgaagggcaccagacatgcgccggacatccgtgccagcatccaggttccggtcgtggtcgcagcctgctcaacggcaaataaagggacgaaaacgcttgagcgcgggccgtaatcatgatccggtgcgtaccagaccacttcgccttttttcagggctttaatcatgccttttaaatctttgcggtcgagcatcgatttatttgagcgcaaacggccccaggtttgtagccagtcaatcagtggattatcgttcgggcggtaaacgccaatccccggttcctgcataccaaactgccgcgcacccagctccagtgtcagaaaatggatgccaactaacaggatgccgcgtttttgcgcctgcacgtcacgaatgtgttccatgccgatcacttccgtccagcgagcgattcggcggtccggccagaaccacgccatgccagtttccatcagtcccatgccaacggattcgaaattcttcaccaccattttacggcgttcttgttcgctcatttccgggaagcacagttccaggttgcgatgcacaatttttgcgcgtcgtttcataaaacgtaacgccagttttcctaatccacaaccgaggcggtagataaccgggtagggcaattgcacgactaaccaaagtacgccaatacccaaccaggttaaccaataacgcggatgaagcagtgcggtggagaacttgggtagattcgtcatatcaatcctgtttttcaacctattcgggcaattgtatgtattgtcgcattttttcgcccgcaaccaaaatttgtggctgaagactgggcgaaattgccgcgcttgtaaataacaaanaatttttaatgcgcaaatgtagcgtaaaatgtgtggatgttaattatcgataattgctatatcatgccgcggatttttactttcccatctcccaggaaccgtacaccatgccagtgttacacaaccgcatttccaacgacgcgttaaaagccaaaatgttggctgagagcgaaccgcgaaccaccatttcgttttacaagtatttccacatcgccgatcctaaggcgacccgtgacgctttatatcagctgtttaccgcgctgaatgtttttgggcgagtgtatctggcgcatgagggcattaacgcgcaaatcagcgtacctgcgagcaatgttaaaacatttcgcgcgcagctctatgccttcgactcggctttagatggcttacgcctgaatatcgcgttggatgatgacgggaaatccttctgggtactgcgcatgaaggtccgcgatcgtatcgttgccgacggtattgacgatcctcactttgatgccagcaatgttggtgagtatctgcaagcggcggaagtgaacgccatgcttgacgatcccgatgcactgtttatcgacatgcgtaaccactatgagtatgaagtggggcactttgaaaacgcgctggaaattccggcagataccttccgtgagcagctgccaaaagcagtcgagatgatgcaggcacataaagataaaaaaatcgtcatgtactgcaccggcggcattcgttgtgaaaaggccagtgcctggatgaaacataacggattcaataaagtctggcatatcgagggtggaattattgaatacgcccgtaaggcgcgcgagcagggcttgccggtgcgttttattggcaaaaattttgtttttgacgagcggatgggcgaacgtatatctgatgagattatcgcgcattgccaccagtgcggtgcgccgtgcgacagccataccaactgtaaaaatgatggctgccacctgctgtttattcagtgtccagtatgtgcggaaaaatacaaaggttgttgtagtgaaatttgctgcgaagaaagcgcgttaccgccagaagaacagcgacgccgtcgggcaggacgtgaaaatggcaataagatctttaataagtctcgtggacgtctgaatacaacactgggcattcctgatccaacagaataaatatcattgccggatgcgtgccatccggcaacatttcactcttacttctgctgtacgccttccactgaaataatcagatccacttcctgagaagctggacctaaatctgtcttgatattgaagtccttgagcttaattttgccttcggcctcgaagcctgcacgtttaccaccccatgggtcgtcgccctgaccaattaatttcgcttccagcgtgacgggtttggttacaccattcagcgtcagatcgccggtaatatccagttcgtcaccgtctttcttcacgctggtggaggtgaatgttgcctgtggatattttgcggtattgaggaaatctgcactgcgaagatgtttatcacgttcggcgtgattagtatcgacgctggtggtgttaattgtcacattcactttatcggcagctggatttttttcatcaaaggtaaaagtaccgtcgaaatctttaaaggtgccatataaccagctatagccaagatgctggatgcggaagttaacaaaggcgtgctgaccttctttgtcaattttgtaatcggcggcaaccgctgaaccggcagagaacatcagggacgcgaaggttaaaccaagcaggctttttttcattttttatactccatagtcagatgacgactttcccagcatgcgcttcagagtgtcgtctttatcgatgaaatgatgcttcagggccataaatccgtgcataacggacagtactacgacgctccacgcgagccaaaaatgcagggcaccggcaaagtctgcctgtgcgccagcgtcggcaagggtcgcggggacgtcaaaccagccaaaaacgctgatcggtttaccatcggcagttgagatcagatagccgctgatgccgatggcgaacagcaataggtacaatgcgagatgcccagcttttgcggcaagatgagtcatgggcgaataactcggcagcggacccggcggtggagatatgacacgccacagaacgcgaataaccagccccatcattaacaaaataccgatgcttttatgtagttcgggtgctttgtgataccagccatcgtaataactgagcgtgaccatccacagacctaaagcaaacatgccgtagacaataattgcgcttagccaatggaaggccgcagatataacaccatagcgttcaggggtatttgtgaatgacataagtgcatccaaaacgaatttgtgagagaaagaaaatggcgtgtcggagaatgaattgcaacacaaaaataacaaattgaatgatatttattttnntt

SEQ ID NO: 237 - DNA, 8597 bp, Escherichia coli
  Strain O55:H7
  modified_base (1906)..(1906): a, c, g or t
  modified_base (2990)..(2990): a, c, g or t
  modified_base (2992)..(2995): a, c, g or t
  modified_base (3548)..(3548): a, c, g or t
  modified_base (3560)..(3560): a, c, g or t
  modified_base (5193)..(5193): a, c, g or t
  modified_base (5714)..(5714): a, c, g or t
  modified_base (6269)..(6272): a, c, g or t
  modified_base (7989)..(7989): a, c, g or t
aattttgaattaataatgaaagaatcttcataagtttagtgggttcagcatcagagatgtctggtgagtgctgtagaagcaggaataatctcattcaatttttcacgctaaatgaaagggagattaaatatttgtcagtttatgtcagtgcggaaaactaaaaataaaacacatagatcagatccataattgccaacaatccccagagaaaacgatatagcatcagatgctcgcgaatattattgatgagatagtgcaacagccgacgcattaaatactcctgtaaaaacggcctcattctggaggccgtaatgatgattattggaagcgggaaaggctgaatggcgtcaaatcaaaatcgctttttttgtcttgcgcaaaatcggcagctatttcccctaaaactgacgcaaatttaaaaccgtgcccactcaggccggtaatgagcagtgtattatcgtggccgggtagggtatcgataataaaatcttcgtcaggcgaattatcataggtgcaggcagcgccgtacaggcagcaaccgatacccggcaatacattgcgcaagaacgggaaggcttccgaaccatcgctgaccacttccgcaaacggaacacgttcatccgctgaatggataacctggcctccgttatgtttgccaatcttcaacgcgtcgttttctgccggaaaaccataatattgatcgccattgggcagttcaccggtaaacgccgggaatttattcttcacgctatagcggccatcggcctgataccaggcaaatactttacgtacgggctggacaggcagctccgggagcaggtcttttacccatgttcccgcgcagacaatcgcttttttcgcctgatactcaccgtcagccgtttcaatagttacgccatcatcgtcatgacgaattgcggtgaccgggcagttgaacagttgcgcacagcccgcttccttcgccagttggatccaggttttaatcgccagttcgctgcgcaaaaaaccggaatcagtctcaaataagccgatgtagttgtccgggacgcgtatttctggccagcgggccataatcccttgcgcatcgagcttttcaacgttgagttgccactgttcggcgctgtgggcgacgttggcgagaaatgcggagtcagccgggccaaggttaatgacaccagagcgtacaaaaatgggatcatcttcgttgtggcgggagaggtcatcccacagcgtttgtgcgcggaggaccagcgggacatacttttcgccttcaccataagcatgtcgaattaatcgcgtatcgccgtggtggctgccgtgttgatgtggtggcatatgggcgtcggtcataagcacgtttaaaccggcgcgggttgcataatacccggcggcagcgcctacggaaccgctgccaataatgatgagatcgtatttcatttttttctctctgctctcatggtttaagcagagtaattaactgaatgcagatatacaacccagaaatggtaaaggcaccggtgaggtgccttttgggtggatggtcatatcatgttaatgacgccgatactcgtttaccgggaaatcaccggattcaattttggcgattcctgcttctaatatcgaaataaattgtctggcaacatcagtggttaaccagagcgtctgaccaacttcagtcccttcctgctcggacttatttggggtctggtagtgcaaacgcaacatcagcgcatcatagctatcaacggtgctgatgtcccaccctacgagcggatgagtctgaatgacttcattatttttttccatcatggccccctaattcgtgttactagacaacgttattcgaggttcaatgcgtttttatctgaagcaacttcagtataccaataaataagggtaatcaccnaatttttaaaggggggaacagataaatttctgcttttaagatttatatgaacaataaaacagcatgtcattcatatttttttagcatattgtgcaattattttgaggaagtgtagaaattttgtactcataattcgcaagtaaaataaaaaagccggggcgacccggcaaaaacaaaaatcactgcatattattcgctgacaaaccagtcatcggcgctttcccacgtttcttggagaatttcgctaatgcgctgtttatcttcttttgtcgcgccaataaccgataaattattcgctgcggcataacgtactgatacgtggccttcattatcaggaaacgcatactgaatacggcgggaaagttcgccagccagggcgtcaatagccccagctggcaatggagaagttttcgctatggtgacttcaattcgcataatagccccctgttgaatatactggttatttatacaggcaaaataacctaatgacaacaggaagctacgatttttattgtttaacagaccagcgtaccgtttccccggcgaggaatggcaccagcgtgtcatcagtcagtgcgatgctttcagcaacctgatgctcttcacgtaccagttcgatgaatgtgtcgttgaccggtaacccatagaactgcgggccgtttacagaacagaatgcttcaaagtgctgcagagcattcatctcttcaaagacggtagcgtaacttcccagcgcggttggggcgttgaagcagcccgcgcagccgcagctgctctctttgcgatgacgtgcatgtggcgcagaatccgtaccgaggaatactcgattaaaaccgctggcgactagttcacgcaatgcctgttggtgaatattgcgtttgaggatgggtagacaatacaggtgcggacgcacgccaccaaccagcatatggttgcggttaaacatcagatgttgcggagtgatggtagcagccagccgttcatttccgtcacggacatagtcggctgcgtctttggtggtgatgtgctcaaaaacgactttcagcgcggtcaggcgctggcgcagaggttccatcacgctttctanannnngcgcttcacgatcaaaaatgtcgatatctgcatgtgtcacttcaccatgcaccagtagcggcataccgattttttccatgcgctctaataccggcatgattgcgtcaactgacgtcacgccgtggctggagttagtggttgcgtttgccgggtaaagttttgcagcggtgaacacgccttcgttaaatccgcgctccagctcattaggatccagcgaatctgttaaataacaggtcatcaatggggtgaaatcgtgcccggcaggtacggcgtgaagaatacgttggcgatacgccacggcagcctcaacggtggtcacgggcggagccagattgggcattacgatagcccgtccataaatttcgctggtatacggcacgacagtttttaacatgtcgccatcgcggaggtgaaggtgccagtcgtctgggcggcggatctttaatacctgggatggtgcagtcattaatctctatgctccggctgaagggatgtttttgccggacacaaaggataagcggaaacgttttcctttgcacgaaaaaaaaagggngcgaatgcgccntcgtgattaatcagtaaatggaatgacaatttcgcctggcttcacttcaatgcctttcgccagttttttcgccattgcttcgccctggctgccatcttcgcgcaggacgtaagcaggttgctggttaaagtaattgcgtaatgcctggttcagatagggaagcaacgtttgcatcaccgtttgcattttttccggttgtaccgtcgcatcgaccacctccatctctttcaggaagatcgcgcctttttctttatcaaacacgggcagcgctttcagcttcagtttcatggtcgctttctggctaccgaacagggagttcatgtccagattggcgtctccggttagggcaaccttattcggctcttcgcgaccaatttggctggtcaggtttgtcagaacaatatgggcgtcagccacaccgggtaaaccaatatcttttgagaaattattatgtttcgcaagcgactggttaatttcttgttcggtgatggtgtattgggtgagttgattacagccaacgagcaggccactgacgatcaatgcagcggcaaataaaaacttgttcatggtagtcctcgacatgaaatctgcgtcaatatcctgacacaacgcagcatgtgtcaccagcgataaactcgccagcagaaaaaactgaaaacggcggcaacccgcgaatacaggctgccgcggcgagtcaggattaaatcgccattgatgataacaaattgatttgtgtctgtttcgccatattatcgcggtaatcagcaacgcggcttggccagttaattccggctaccagcgtcagattacgcagtagcgggaatagctgaatatcatcttccgaaagttcgccattcacggcgttcggtttgacgatcagtttgtccagcgcacgtaaatcatcgctgatattcttaatcagaccgtcagagtgggccagcaggtcggcaaaattacccgcgctggcctctttcttgtcgacgaaatatttgcgcgcggcgggagtagaaaactcatcaaatgccgatttggcaaaacgcggcaacagcagtttattggcgtagccattgaccttgcgcagccactcttcaatggcaggggaacgtttgccggtcagtaacggtttgccgtcgagtttatcgacatagtgaacgatatccatgctttctggcatatagcggctgtcatctttttgcagaatgggaacctgtttttgaccgaccatccgggtgggtgtttctgcgtcgtcgttgagcagaacatgtaattcgacggggatatttttcaggccgaaaatcatgcgggctttgaggcagtaagggcagtgatcgtaaatgtatagcttcacgtgactcctccatttggctgtcagttcactttcagtatggaggagtcaggggggagtatcaaatcaggcgtcgcgttcaagcaaacgacgcgcggcgcgtttctggctaaactgccaacccagcgcaaggaaagtgaagatgccaataatgcccagcatcatccacggaagctctggctggtgcaccgatttgcccaggtcaaacagccagccgccaccgatataaccaatagcgccgccaatcgccagacccagacggctaaaccccatatagctgccgcgagntcttgcgtccgccagcgaagcacttaaggtttcacgcgcaggctcggcaatgatcgacccgatataaaacagacaaatcagggtgaaaagttgttgcaggccgctgaccatgcccaccggcatcatgcttaatgacattatcaacagcccagccatcaaccggtgttccagacgaaaatgcttttcactccagcgggcgatagggtagagcaacgttaacgacagacacgcttcaatggcatacatccatttaacggcagagggcgcgccagccacatcgttgaccataattggcagcatcagcatcacttgtacagccagcatgtagtaacccgccagcgtcaggacataggtgacaaaacgcttgtcgcgcatcacgcgggtcatgccttcgcgaacgggcgtgcgtacggtggagagtttccatgccggtaacaaccacgcattgaacgctgcacacagcacaaacaaaacggcccctgtggcgcagaccaggcgaaagtcgtattgcaacagccagntccccaacaatgcgccaatgaccgcaccggcactgtcctgcatcatcaacagcgagaaaaaacgaccacgctgttgtggacggattagtttcaccaccagcgccgaacgcggcggatcaaacaacgtgccaccgagtcccgagagcaggcatgaaaaccacaatagccacggttcgtgggcgatacccattgtggcgaatccggcggcacgcatcagcataccggtaacaatcatcggtttggcaccaaagcggtcggcaattgcgccgccgaaaatacccagaccttgctgaataaactggcgtaggccgagggcaataccgaccatgacggcggcccagcccatttgatcaacgaagcggatagagatcagcgggaagacaacaaagaaccccagcacgaccagcatattatcgatgagcaggaaatatttacccaggttcctcgcctgcgacacgcgggacatttcccctcccgggaaataaaagatgagcactttctattctgcattgccgctaagacttttcccatcacttcggggacaatatttttttnnnnaaacgtcgctttgatagagagtttttatcaaatatgtgaataatgcagaaaatggcattttggacttttcacagggtctggttgcgcaggtatagtaatacttacagcgtattaaagacgttacgggaaggagtaggtatagaatgtttggctatcgcagtaacgtgccaaaagtgcgcttaaccacagaccgactggtcgtgcgtctggtgcatgatcgtgatgcctggcgtctggcggattattacgcagagaatcgccatttcctcaagccctgggagccagtgcgcgacgaaagccactgttatccatcaggctggcaggccaggctggggatgattaacgaatttcataaacaaggttcagctttctactttggcttattcgacccggacgaaaaagagattattggcgttgccaatttttccaatgttgttcgcggctcttttcatgcctgctatctcggttattcgattgggcaaaaatggcagggcaaaggactcatgtttgaagccctgaccgcagccattcgttatatgcagcgcacccaacatattcatcgcattatggctaattatatgccgcacaataaacgcagcggtgatttactggcgcgactgggttttgaaaaagaaggctatgcgaaagactatctgttgattgatggacaatggcgcgatcacgtactgacggcattaactaccccagactggacgcccggccgctaaggagaatctcatgaaatatcaacttactgccctggaagctcgtgtgattggttgcttgctggaaaagcaggtgaccacgccggagcaatacccgctctcagtcaatggtgtagtcacggcctgtaatcagaaaacgaaccgtgaaccggtcatgaatctgagtgaatctgaagtgcaggaacagctggataatctggtcaaacgtcattatctacgcacagtgagcggttttggtaatcgggtcaccaaatatgagcaacgtttttgtaattcagaatttggcgatctgaaactgagcgccgcagaagtggcgttaatcaccacgttgttattgcgtggtgcccagacgccgggtgaactgcgcagccgcgccgcgcgaatgtatgaattcagcgatatggcggaagtggagttgacgctggaacaactggcgaatcgcgaagatggtccttttgtggtgcgtctggcccgcgaaccgggtaaacgcgaaagccgctacatgcatcttttcagtggtgaggtagaggatcagccggcggtaacggatatgtcgaacgcggttgacggtgatttacaggcccgcgtcgaagccctggaaatcgaagtggcagaactgaaacagcgtcttgattcgttgctggcccacctgggagattaaagtgaaaaaattacgtatcggcgtagtgggattaggcggcattgcgcaaaaagcgtggttaccggtgctggcggcagcgtctgactggacgttacaaggagcctggtcgcctacgcgcgcgaaagccctgccaatttgtgaaagctggcgcattccttatgccgattcgttatccagccttgccgccagttgcgatgcggtttttgtacattccagcaccgccagtcactttgacgtggtcagtacgttactcaatgcgggggtacatgtctgtgtcgataaaccgctggcagaaaatctgcgcgatgctgaacggctggtggaactggcngcgcggaaaaaactgacgttgatggtcggttttaaccgtcgtttcgcaccactctactgtgagttaaaaacgcaactcgccaccgcagcctcgctaagaatggataaacatcgtagcaatagcgtcgggccacacgatctttatttcacgttgctggatgattatctgcatgtggtggataccgcgctgtggttgtcgggcggcaaagcctctctggatggcggtacgctactgactaacgacgctggcgaaatgctgtttgccgagcaccatttttcggccggtcctttgcagatcaccacttgtatgcatcgccgtgccggaagtcagcgtgaaaccgtgcaggccgtgactgacggtgcgctcatcgacattacggaaatgcgcgaatggcgtgaggagcgtgggcagggtgtagtgaataaaccgattcctggttggcagagcacgcttgagcaacgtggatttgtcggctgtgcgcggcacttcattgaatgcgtgcaaaatcagacagttccgcaaaccgccggcgaacaggcagtgctggcgcaacgtatcgttgacaagatctggcgcgatgcgatgagtgaataaaccctgtaacatct

SEQ ID NO: 238 - DNA, 27769 bp, Escherichia coli
  Strain O55:H7
  modified_base (533)..(533): a, c, g or t
  modified_base (4334)..(4334): a, c, g or t
  modified_base (4737)..(4737): a, c, g or t
  modified_base (7295)..(7295): a, c, g or t
  modified_base (11497)..(11497): a, c, g or t
  modified_base (11652)..(11652): a, c, g or t
  modified_base (16169)..(16169): a, c, g or t
  modified_base (16173)..(16175): a, c, g or t
  modified_base (20131)..(20131): a, c, g or t
  modified_base (20639)..(20639): a, c, g or t
  modified_base (23475)..(23475): a, c, g or t
  modified_base (25161)..(25161): a, c, g or t
  modified_base (26247)..(26247): a, c, g or t
  modified_base (27719)..(27719): a, c, g or t
gcaattcaccataatccaggtagactattcgcctctttcagcgcctgccttgcaggcgttttgcccgtgggtctggattagaacaccgatgaatttattaaaatcgctggccgccgtcagctcgatgaccatgttttcgcgtgtgcttggcttcgcacgagacgcaattgtcgccagaatctttggcgcagggatggcaaccgacgcctttttcgtcgcttttaaacttcctaacttgttacgccgtatctttgccgaaggggcattttcccaggcatttgtaccgattctggcggaatataaaagtaagcagggtgaagacgccacgcgggtctttgtctcttatgtttctggcctgctgacacttgcgctggcggttgtgacggtcgctggcatgctcgccgcaccgtgggtgatcatggtgaccgcgccaggcttcgctgacacagctgacaaatttgccctgaccagccagctactaaagattacctttccctatatcttgctgatctccctggcgtcgctggtgggancgattctgaatacgtggaaccgcttctcgattccggcgtttgctccaacactgcttaacatcagcatgattggtttcgcgctgtttgccgcaccgtactttaacccaccggtgctggcgctggcgtgggctgtgacggtcggcggcgtcctgcagctggtgtatcagctaccgcatctgaagaagatcggcatgctggttttgccacgcattaacttccacgatgccggagcaatgcgtgtggtgaaacagatgggaccggcaatccttggcgtctctgtgagccagatctccttaatcatcaacaccatttttgcctcgtttcttgcttccggttcggtgtcatggatgtattacgccgaccgcttaatggagtttccgtccggtgtgctgggcgtggcgcttggcaccattttgctaccgtcgctgtcgaaaagttttgccagtggcaatcatgatgaatacaaccgtttgatggactggggactgcgtctttgtttcctgttggcgctgccgagtgcggttgcgttgggcattctttccggtccgttaaccgtttcgctgttccagtacggtaaatttaccgcctttgatgcgctgatgacccagcgggcgttaattgcctactcggtgggtttgattggcctgattgtagtgaaagtgttggctcctggcttttattcccgccaggacattaaaacgccagtgaaaattgccatcgttacgctgattttaacgcaattgatgaacctggcgtttatcggtccgttgaaacatgccgggctgtcactttctattggtctggcggcgtgtctgaatgcttcgctgctttactggcagttgcgtaagcagaaaatctttaccccgcaacctggctggatggcgtttctgttgcgtctggtggtggcagtactggtgatgtctggcgtgcttttaggtatgttacatatcatgccggagtggtcattgggtaccatgccctggcgtttgctgcgtttaatggcggtcgtgctggcggggattgccgcgtacttcgctgcactggcggtactgggcttcaaagttaaagaatttgcccgccggacggtgtaacaatgcattccggcctgcagtgcaggccggagataatcttcagatcgaaatctttttactgccgcgatgggttgttgaggtctgaccgttcgccccatatagcgtcggttcctgatgcggtttcaacatttccagcgcctgttgattgcgctcaatctgtccttccagtaaccagccgttatgttgattcatttggcgtagttgctgcgttttcacagcaatttcctgccagcgttgactaatatcaacgctatttgctgtattgggttctttcctgcgtaactgttcgaggtaatccaacgttgccagcagtgagcttttttgttctgtaatccattgcaactggctgccgttgatctgccccatagagagatgttgctgctcttgatccattaccgttttgagatcgttaagcacagcggacatctggtcgaggatctctgcaagacgcgtcatacgattaattactctgcaagtcttgctgcgcttcgttgatcagcgcatcggcaattttgccggtgtccatttttagttcaccgttacgaatcgccagttttaacgcttcgacacgttcaagattgatatcactgctgccgggttgcatcagttttgcttgcgcgtcgcttaacgtcacactggtgctggtggaggctgttgtttttgccgctcgggtgttcgttaccggcgcgtcagtggtttcgcgcggttgaacggtgcttacgggcttcagaggcgaagtgcgatcaatactcatggtttattcctcattgagggcgcttttatcatgtgttgcttatttatcggcaagggacgggtaatctttaacagcttacaggtttataagaatattcccatctgcatcaacaacgccgctgactacctgtccagataccatgcgcacccgcgcattctgtgcgacggctgcattgttcagcgcctgaccttctgcgttggcgctaaacccatcaccgctggcgatcacgttgacgcgttgtcccgcttttacccgccatgcctggcgaaactgggttaactggataggttgatcgggtgatagatcgcgcaggctaacggcatcaacaagttgattgatatccagcaccgtacgcggtggcaaggtatccagccgtccgcgtttcagtttgacattgccagctcccagctttcctcctcgcacaatgggcatcgcggcaaccacataatttcctgtggcctgcacattaacctgtaaatatcgtttgtcgttaccgcagcgtgccaacacattcacattgccccacaagcgggaattattgctcatcgaaagcaatggctgctcgcacggcggtagtagattgggcgctgtacgaatagaaacacgaacctcatcacttatccctgcgagctgggagctaaaaaaggtttgcaattgcgatgtgagattgctcgccgcacttaacggactgaacagtatcgcgatgatcgccacgctacgttttattgccagcattttcgcccccagccatttctacaacgtgaattgtacctgtccgcaatgaccatcaacggcataaatagcgacccattttgcgtttattccgccgataacgcgcgcgtaaaggcatttaagctgatggcagaattttgatacctgcggaggagatatgctcgataagctcgacgccgccttacgttttcaacaagaggcgctcaatctgcgcgcccagcgtcaggaagtgctggcagcaaacatcgccaatgccgatacccctggttatcaggcgcgcgatatcgattttgccagtgaacttaaaaaagtcatgcaacgtggacggaatgcaaccagtgtggttgctctgacgatgacctcaacgcaacacattccggcgcaggcgctgacgcctcctaccgcagaactgcaataccgtattccggaccagccttcgcttgacggtaataccgtcgatatggatcgcgaacgcacccagtttgccgataacagcctgcaataccagatgagccttagcgcgttgagcgggcaaatcaaaggcatgatgaacgttttacagagcggaaattaacggatggcactgctgaatatttttgatatcgccgggtcggcgttaactgcccagtcccagcgcctgaacgtggcggccagtaatctggcgaatgctgatagcgtgaccggtcctgatggacagccatatcgggcaaaacaggtggtattccaggttaacgctgcaccaggtgctgcgacaggcggcgtaaaggttgccgatgttatagaaagtcaggccccggacaaactggtttatgaaccgggtaatccgctggcggatgcaaagggctacgtaaaaatgccgaacgttgatgttgtcggagagatggttaacaccatgtcggcgtcacgcagctatcaggccaatgttgaagtgctcaacacggtgaaaagcatgatgctgaaaacccttacgctcggtcaataaaggagaaagctatgtccattgcggtaaccaccaccgatccgacaaataccggcgtcagtaccaccagcagtagttcgctcacgggcagcaacgccgcagatttacaaagcagttttctgactttgttggtggcgcagctgaaaaaccaggacccgaccaatccaatggaaaacaacgagctgacgtcgcaattggcacaaatcagcacggtcagcgggattgaaaaactcaataccacgctnggatctatttccggacagattgataacagccagtcgttacaggccagtaacctgatcggtcacggcgtgatgatccccggcaccactgttcttgcgggaaccggcagtgaagaaggggctgtgaccacgaccacgccgtttggtgttgagctgcaacaggcggcagacaaagttacggccaccatcaccgataaaaatggcgcggttgtgcgcaccattgatattggtgaactgaccgccggagttcacagtttcacctgggacggtacgttgactgacggcagcactgcgccgaacggttcttacaacgtagcgattagcgccagtaacggtggtacacaactggttgcccagccgctgcagtttgctctggtgcagggtgtgatccgcggcaacaacggtnatacgctggatctcggcacttacggcaccaccaccctcgacgaagtacggcagataatttaagccttcacatttcaggagtcagtcatggccttttctcaagcggttagcggattaaacgctgccgccaccaacctcgatgttattggcaacaatatcgccaactccgccacctacggctttaaatcaggcacggcctcttttgccgatatgtttgccggttcgaaagtgggactgggggtaaaagttgccggtatcactcaggactttaccgatggcacgaccaccaacaccgggcgtggtctggacgttgctatcagccagaacggttttttccgtctggtagatagcaacggttcggtgttctacagccgtaacggacaatttaagctggatgaaaatcgtaacctggtgaatatgcaaggtttacagctgacgggttacccggcaaccggtacgccgccgactattcagcaaggggcgaatccgactaacatttcgatcccgaataccctgatggcagcgaaaactaccaccacggcgtcgatgcagatcaacctgaattccagcgatccgcttccctctgttaacgcatttgatgccagcaatgcggatagctataacaaaaaaggttcggtgactgttttcgacagtcagggtaatgctcatgacatgagcgtctactttgtgaagaccggggataataactggcaggtctacacccaggatagcagtgatccaacaggtacagccgagcctgcaatgaagctggtgtttaatgccaatggcgttctgacctcaaatccaacagagaatattaccaccggcgcaattaacggcgcagaacccgccacgtttagcctgagcttcctcaactccatgcagcaaaataccggcgctaacaacattgtggcaaccacccagaatggctacaaaccgggcgatctggtgagttatcaaatcaatgatgacggtacggttgtcggcaactattccaacgaacaaacccaactgctggggcagattgtactggcgaactttgccaacaacgaaggtctggcatccgaaggcgacaacgtctggtctgcgacgcaatcttctggcgtggcgctgttggggacagccgggacgggcaactttggcaccctgaccaacggtgcgttggaagcgtccaacgtcgatctcagtaaagaactggtcaatatgatcgttgcccagcgtaactatcagtctaacgcccagaccatcaaaacccaggaccagatcctcaacacgctggttaacttacgctaatcgctgacgggatagctcaatggatcacgcaatttataccgcgatgggagcagccagccagacgctgaatcaacaggcggtaaccgccagtaatctggccaatgcctctacgcccggttttcgcgcgcagttaaacgccttgcgcgcagtgccggtggaagggctttcactgcccacgcgcacgctggtaacggcgtcaacaccgggtgcagacataacgcccggcaagatggattacacctcgcgcccgctggacgttgcgttgcagcaggatggctggttggccgtgcagaccgctgacggcagcgaagggtatacgcgtaatggcagcattcaggttgatcccaccgggcaactgacaattcaggggcatccggtgataggcgaggcggggccaattgctgtgccggaaggggcggaaatcacgatagctgccgatggaacaatctcggcgctgaatccgggcgatccggcaaatacggttgcgccagtggggcgtctgaaactggtgaaagccacgggcagcgaagtgcagcgcggtgacgacggcatttttcgtttaagcgcagaaacccaggccacgcgtggaccggtactgcaggcagatccaaccttgcgtgtgatgtcgggggttctggaaggcagtaacgtcaatgccgttgcggcaatgagcgacatgattgccagcgcgcggcgttttgaaatgcagatgaaggtgatcagcagcgtcgatgataacgcaggccgtgccaaccaactgctgtcgatgagttaattgaacgattgatgacattgcaataaaagcgagcggactgttccctcgcccctttggggagagggttagggtgaggggaaattcgcaccgccgcgtgcttctgctctgcttgtcagcaatccactacaggacattttatgatcagttcattatggatcgccaaaacgggccttgacgcccagcaaaccaatatggacgtcattgccaacaacctggcaaacgtcagtactaacggttttaagcgtcagcgcgcggtgtttgaagatctgctttatcaaaccattcgccagccgggggcacagtcttccgaacaaaccaccttaccctccggattacaaatcggcacgggggtacgcccggtcgccactgaacgcttacacagccagggcaacctgtcgcagaccaacaacagcaaagatgtcgcgattaaagggcagggctttttccaggtgatgttgccagatggctcatcagcctatacccgtgacggntctttccaggtggatcagaacgggcagctggtgacggctggtggttttcaggtgcagccagcgatcaccattccggcgaatgcgttaagtatcaccatcggtcgtgatggcgtggtcagcgtaacccaacaaggccaggcagctccggttcaggttgggcagctcaatctcaccacctttatgaatgacaccgggctggagagcattggcgaaaacctctacaccgaaacgcaatcctccggtgcaccgaacgaaagcacgccgggcctgaacggcgcgggactgctgtatcaagggtatgttgaaacgtctaacgtcaacgtggcggaagaactggtcaatatgattcaggtgcaacgcgcttacgaaatcaacagtaaagcggtgtccaccaccgatcagatgctgcaaaaactgacgcaactctaaggcataaccggtggcaggttcaccggtttattgatttttgaagatgatagccatgcaaaaaaacgctgcgcatacttatgccatttccagcttgttggtgctttcactaaccggctgcgcctggataccctccacgccgctggtgcagggggcgaccagtgcacaaccggttcccggtccgacgcccgtcgccaacggttctattttccagtctgctcagccgattaactatggctatcaaccgctgtttgaagatcgtcgaccacgcaatattggcgatacgctgaccatcgtgttgcaggagaacgttagcgccagcaaaagctcctctgcgaatgccagccgtgacggtaaaactaattttggctttgatactgtgccgcgctatttgcaggggctgtttggtaacgctcgtgccgatgtcgaagcctccggtggtaacacgttcaacggaaaaggcggggccaatgccagtaatacctttagcggcacgttgacggtgacggtcgaccaggtactggtcaacggcaacctgcatgtggtgggtgaaaaacagattgccattaatcagggtaccgaatttattcgcttctctggcgtggttaatccacgcactatcagcggcagcaataccgtaccgtctactcaggtggcggatgcgcgcattgaatacgtaggcaatggctacattaacgaagcgcaaaatatgggctggttgcagcgtttcttccttaacctgtcgccaatgtaagtgaggctgtggtgattaaatttctctctgcattaattcttctactggttacgacggcggctcaggctgagcgtattcgcgatctcaccagtgttcagggggtaaggcaaaactcactgattggctatggtctggtggtggggctggatggcaccggtgaccagacaacccagacgccgtttaccacacaaacgcttaataacatgctctcacagctgggaattaccgttccgacgggcaccaatatgcagctaaaaaacgttgctgcggtaatggtgacggcgtcacttccaccgtttggacgtcaggggcaaaccattgacgtggtggtttcttccatgggaaatgccaaaagcctgcgtggcggcacattgttgatgactccgcttaagggcgttgacagtcaggtgtatgcgctggcgcagggcaatattctggttggcggcgcaggagcctccgctggcggtagcagtgttcaggtgaaccaactgaacggtggacggatcaccaatggtgcagttattgaacgtgaattacccagccagtttggcgtcgggaatacccttaatttgcaacttaacgacgaagatttcagcatggcgcagcaaatcgctgacaccatcaaccgcgtgcgtggatatggcagcgccaccgcgttggatgcgcggactattcaggtgcgcgtaccgagtggcaacagttcccaggtccgtttccttgccgatatccagaatatgcaggttaatgtcaccccgcaggacgctaaagtagtgattaactcgcgcaccggttcggtggtgatgaatcgcgaagtgactctcgacagctgcgcgatagcgcagggaaatctctcagtaacagtcaatcgtcaggccaatgtcagccaaccagatacaccgtttggtggcggacagaccgtggtaacgccacaaacgcagatcgacttacgccagagcggcggttcgctgcaaagcgtacgttccagcgccagcctcaataacgtggtgcgcgcgctcaatgcgctgggcgctacgccgatggatctgatgtctattttgcaatcaatgcaaagtgcgggatgtctgcgggcaaaactggaaatcatctgatgatcagcgacagcaaactactggcaagtgcggcctgggatgcgcaatcactcaacgaactaaaggcgaaagcgagcgaagatccggcggcaaatatccgtccggtggcccgtcaggtggaagggatgttcgtgcagatgatgttgaaaagcatgcgcgacgcgttaccaaaagatggcctgttcagcagcgagcacactcgcctgtataccagtatgtatgaccagcagattgcccaacagatgacgacgggcaaaggtctggggcttgcagagatgatggttaagcagatgacgccagaacaaccattgccagaggagtccacgccagcagcaccgatgaaattcccgctcgaaaccgtggtgcgttatcaaaatcaggcgctttcgcagctggtgcaaaaggccgtgccacgtaactacgatgattcgctgccaggtgacagtaaagcattcctcgcgcaactctcgctgcccgcccaactggcaagccagcaaagcggtgtgccacatcatttgatcctcgctcaggcggcgctggaatctggctgggggcaacggcaaatccgccgcgaaaacggcgagccgagctataacctgtttggtgtcaaagcctctggcaactggaaagggccagtcactgaaatcaccacgactgaatatgaaaatggcgaagcgaagaaagtaaaagcgaagtttcgggtctacagctcgtatctggaagcattgtcggattacgttgggctgttaacacgtaacccgcgctacgccgccgtgacgaccgccgcgagtgcggagcagggggcgcaggccctacaggacgcgggctatgccaccgatcctcactatgcccgtaaactcaccaacatgattcagcagatgaaatcgataagcgacaaggtgagcaaaacctacagcatgaacattgataatctgttctgaataactcaagtccggcgggtcgctgccgataatactctgtaattgaaggcttataaggaacctccatgtccagcttgatcaataacgccatgagcggactgaacgcggcccaggcggcgttaaatacggcaagtaataatatctccagctataacgttgccggatatacccgccaaaccactattatggcgcaggccaatagcacgttgggcgctggcggctgggttggtaatggtgtctacgtttctggtgtgcagcgtgagtatgatgcgtttattaccaaccagttacgtgcggcgcagacgcaaagtagcggcctgactgcccgctatgagcagatgtcgaaaatcgacaatatgctctccaccagtacctcttcgctggcaacacagatgcaggatttcttcaccagcctgcaaacgctggtgagtaacgcggaagacccggcagcgcgccaggcgctgattgggaaatcagaagggttggtgaatcagtttaaaaccaccgatcagtatcttcgcgaccaggacaaacaggtcaatatcgcgataggtgccagcgttgatcagatcaacaattacgctaaacaaatcgccagcctgaacgatcaaatctcccgcctgacaggcgtgggggcaggggcgtcacctaacaatctgctggatcaacgcgatcaactggtgagcgaattaaaccagattgttggtgtagaagtcagcgttcaggatggcggcacttataacatcacgatggccaatggttactcactggttcagggaagtacggcgcggcaactggcggcagttccttcctgcgccgacccttctcgtacgactgtcgcttatgttgatgggacggcaggcaatattgagatcccggagaaattactgaataccgggtcgctgggcggcattctgacattccgttctcaggatctggaccagacgcgtaatacgcttggacaactggcgntggcatttgctgaggctttcaacagccaacacaaagccggatttgatgccaacggcgatgagggtgaagatttctttgctatcggtaagcccgcggttctgcaaaacactaaaaacaacggtaacgttgcgatcggtgccacggtaactgatgcntccgcggtactggcgacagattacaaaatctcgttcgataataatcagtggcaggtcacccgccttgccagcaataccacttttacggtgacgccagatgccaacggtaaagtggcatttgatggtctggagttgacgtttacaggaacgcctgccgttaacgacagcttcacgctgaaaccagtaagtgacgccatcgtcaacatggatgtattaatcaccgacgaagcgaaaatagcgatggcgagcgaagaagatgcgggtgatagcgacaaccgcaacggtcaggccctgctggatctgcaaagcaacagtaaaacggtgggcggagcgaaatcctttaacgacgcttatgcctcgttagtgagtgatatcggtaataaaaccgcgacgttgaaaaccagtagcaccacgcaaggtaatgtggtgacgcagctttccaatcagcagcagtcgatttccggtgtcaatctcgatgaggagtacggaaatctgcaacgttttcagcagtattacctggcgaatgcgcaggttctgcagacggcaaacgcgatttttgatgcgctgattaacattcgctaaggggagataaaatgcgtttcagtacccagatgatgtaccagcaaaacatgcgcggcatcaccaattctcaggcagaatggatgaagtacggcgagcagatgtcgacgggtaagcgagtcgttaacccttcagacgatcccattgctgcatcacaagctgttgttctctcccaggcacaggcgcaaaacagccagtacacgctggcacgtactttcgccactcaaaaagtgtcactggaagagagtgtacttagccaggtcaccaccgctatccagaatgctcaggaaaaaattgtctacgccagcaatggcaccttgagtgacaatgaccgggcctcgctggctacggatattcaggggcttcgtgaccagttgctgaatctggcgaacaccactgacggtaacgggcgctacatttttgccggttataaaacagagactgcgccgtttagtgaggttaacggtgattatgtcggcggaacagaaagtattaagcaacaggtcgatgcttcgcgttcgatggtgataggacatacgggcgacaaaattttcgacagtattaccagtaacgcggtagcggaaccagacggtagcgcttctgaaaccaatctttttgccatgctggatagcgccatcgcagccctgaaaacgccggtcgcggatagcgaagcggataaagaaaccgccgctgcggcgttagataaaaccaaccgcggactgaaaaactcgctgaacaatgtcctgaccgttcgcgcggaattaggcacgcagctgaacgaactggagtcgctggattcattaggtagcgatcgcgcattagggcaaacgcagcagatgagcgatctggttgatgtggactggaatgcaactatttcatcttacatcatgcagcaaacggcattgcaggcatcgtataaagcatttaccgatatgcagggattgtcgctcttccagctcaacaaataagctcgctttaaaacatatcatgaaactgggtatgttttgtctgcccgctctgggatcgccggggcgggcatttttttgcctattttgcattgttggttagcaaggatgccattcgatgaattttaatatgttgattcaaagatgaaataaaaaagccctggcagttaccagggcttgattacttgagctaattattactcaacaggttgcggacgcgcaggagcggcagaggcatgatgcgttgccgtatgaccacctgcggcacctttaccttcgaaggcaaaagtagggcgctgccagtcactgtgacgcggtgcctccggaacatattccggtgccggagcgcgcgtcattggcgcggtagcgtggttatgctcaacggtgatctctggtttaaccgcggttaccgtttcaacttctgctgcgacttcagcgacgactggcgcggcaggttgagcaacaacttcaggttcagcaaccacaacctcagcagtttcggcaacttcttcaatatctgccgtctcttcctgcggttcaaccaccggttctgcgtgttctgcaacttcctgggctacggcaacatcagactcggtaatcacctgcggctgttcagttaccgcggcggcaatcacttcaggatgcgtcgtttcaaccacttccggttgcggttcggcaaccggtacgggggcttctacgacttcagccatttcttcaacaactggcgcgctaacaaccggttcgacagcggcggcgacagggacctcagtcaccatcggctgcacttgcacttcttcctgttcgcgctgctcttcaacctgtacatcttgtggacgtacaatcggatagcggatccagactttgccagaggccagttccggagacgcgcacgctacggtcaacggcattggcgattgggttggataacgctcgtcacgatagcgacgacgacgctgaccactcacgcgcaggtgacgaggcgagcggcgagaacgacgcggcatgccaccgttgtcacggttatcagcattgttctcttcttgctgttctggtgcagtttgcgctacgactggcagcgggactttcaccagttctgtgcgtggagctggcgcttcctgaacaattggttcggcagcgacagtttcttcagctaccggtgcgactaccgtttcttcggctacgctttgctcgtaacgcactttctgattgagctgacgctgtttacgacgcggctgaaccggacgtacacgttcttcctgttcggtttcctgaacagattgctcttcaacattcagcgccttcgcttcttgttgcgcctgacgtttatcatcgttacggcggcggctacgttcacgacgcggcgcttgctgctcgtcggcggtacgcgctttttccgttacctcagcctgctgacggccctcacgcgtctcggcagtctgctgctgtgcttggcgacgattacgacggttttcttcgcgattatcgctgccttcagtacgttcactacgggtgtcgcggcgctcattacggtcacggcggttgttctgacgaggcttgcgacgatcctgttgacgttccggtttcgcttctgctttcggtgctggttgctcggtcggtttggtttcttcaccaccgctgaacagcgctttcagtgcgccgaagaagcggctcaacagcccaggttgtgcaggagttgctggtgttgccggtgcagctttcggtgctggggctacaacaggcgcggcaggttcagctggcgttggcgctggcggcacatccggcatggcaaaggttgccagcgcaggttgttccggacgcttacgttcagcgaactcttcttcagacggcagcgccatcgcttcttcatgcagcttcggcagcatgtagcttaaggttggggtttcttcccctttacgcacgcgcagcacgtggtagtgcggggtttccatctgatcgtttggcacaattacacagcgcacaccgtcctgacgagtttcaatggcatttaccgcagaacgtttttcattcagcaggtaagaagcgattggcacaggaacaatggcgtgaacttcctgggtgttctctttcagcgcttcttcttcgatcagacgcagaatagagagcgacagcgattcgttgtcacgcacggtgccagtaccagaacaacgcggacaaacgtgatgactggattcacccagtgatgggctcaggcgctggcgggacatttccagcaggccaaagcgagaaatatggctgatttgaatacgcgcacggtcctgacgcaccgcttcacgcagacggttttctaccgcacgctggtggcgtactggcgtcatgtcgatgaagtcgataacaatcaggccgccgaggtcacgcaggcgcagctgacgagcaatctcatcggcagcttcgaggttagtgttaaacgcggtttcttcgatatcgccgccgcgggtcgcgcgtgcggagttgatgtcgatggccgttaacgcttcggtgctgtcgataacaatcgaaccaccggatggcagacggacttcacgctggaaggcggactcgatctgcgactcgatctggtagtggctgaacagcgggatctcgccggtgtacagtttgattttgctgctgaaatccgggcgacctaatgcagcgatatgctgacgtgccagttcgagcactttcgggttatcgataaggatttcgccgatgtcctgacgtaagtaatcgcggaatgcgcgaacgattacgttgctctcctgatgaatcaggaacggggccgggcggctttcagcggcttttttgatggcttcccagtgtttcagacggaagcttaaatcccattgcagcgcctcagcagatttgccgacgccagcggtgcgcacgataagccccatgccttccggcagttcaaggcttgccagtgcttcttttaattcggtacggtcgtcgccttcgatacggcgagaaatgccncccnnncgcgggttgttcggcatcagaaccagatagctacccgccagactgataaaggtggttaatgccgcgcctttgttgccgcgctcttctttatcgatctgaacaatgacttcctgaccttcacgcaacacatctttaatgttgggacgaccatgagcactgtagttagcagggaaatattcgcgggcaatttcttttagtgggaggaaaccgtgacgttcagcgccgtaatcaacaaaagcagcttccagactcggttcaatgcgggtgattttacctttgtagatgtttgcctttttctgctcgtgccctggactttcgatatccaggtcatacagacgctgcccatctacaagggcaacgcgcaactcttcctgctgagttgcgttgattaacattcttttcatcgtaacttactcattattcttacattgacgactaagctgcgggcaaagtaacgcctttccgggtgtgaaccgatggcctcgtgtctagtcgcgtcgccaacctcacggttatcgtcagctcaaagaggcgcagagtgtcggttgcccgtttttcatgcggaaaaacagcgcaattatcaaagaaacagactgggtattactctccagaaatatttccatctaccggtaaggactgcaacccgcagcccgctaactgcctgaaagatcaatacgtcttacgccattgctgcgtggatgatcggtcgggcaaaatgggttattccgtaaaatttcttgttttaacaaggatggacacggaaacggcctcattattccactgcaagccttgttatagcaagatgacttttaccatttatcacccgcttactcacagttttttcacttcttgctggtgattggtttaataaccatcaataaagtgatcacgtagtgaagtaataaggtgcaaaactaaatataagcatagaaaaatgagtggcgcgaatcctgttggctaattagaatcgcccaccatgaaaacagagactccatccgtaaaaattgttgctatcaccgccgacgaagcggggcaacgtatcgacaactttttgcgtacccaattgaaaggcgtaccaaaaagtatgatttaccgtattttgcgtaaaggcgaagtgcgggtgaacaaaaaacgtattaagcctgaatataaactcgaagcgggtgatgaggtgcgtattccaccggttcgcgttgctgagcgggaagaagaggcggtttcgccacatctgcaaaaggtggcggcgctggcggacgtcatcttatatgaagatgatcacatcctggtgctgaataaaccttccggtacggcggtacatggcggcagtggtttaagcttcggcgttattgaaggtttgcgggcgttgcgcccggaagcgcggttccttgaactggttcatcgtcttgaccgggacacctcaggtgtgttgctggtagcgaaaaaacgctcggcgttgcgttctctgcatgagcaattacgtgaaaaagggatgcaaaaagattacctggcgctggtgcgcggtcagtggcagtcgcatgtgaagagcgttcaggcgccgttattgaaaaatattctgcaaagcggcgaacgtatcgtgcgtgtgagtcaggaaggcaaaccgtcggaaacacgctttaaagtggaagaacgctatgcatttgccaccctggtgcgttgtagtccggtaacagggcgcactcatcagatccgtgtgcatacacagtatgcaggtcatccgattgcctttgacgatcgctacggtgaccgtgaatttgacagacagctcactgaagcaggcacgggattaaatcgtctgttcctgcacgccgcagcgttgaagtttacccatccggggaccggtgaggtgatgcgtatcgaagcgccgatggatgatggtttgaagcgttgtttgcaaaagctgcgtaacgcgcgctaatacgagcatataagcatgataatgggataaggcgtttacgccgcatcaggccgccagcaccgattgccggatgcgacgtaaccgcatccggcgcaaaaaactatcccatcagcgggtttttcccttcccgacgtaacatctgacacagcgcgattagcggtaaaccaaccagcgtgttaggatcacgcccctctaaacgctcaaacagagtaatgccaaatccttcactcttaaagctacccgcgcagtgcaggggatgctctttacgcacgtaattatcaatctccgcctcgctcaggtgacggaaatggacgtcaaaaggctccacttctgtttgcagatgcccattcgccgaattaaacaacgccagtccagtatagaaagtgacgatattgccgctggctttgcgtaattgcagacgggcattttcttccgttaacggtttaccggtgatttcgccatcaagaacacatacctggtctgaaccaataattaaatgatccggataacgtgacgccagagattgcgctttttcttgtgccagtcgaagcaccaactgtcgcggtgattcgtcgctgtgtggagtttcgtcgacctcgggtgctgcacattcaaaagagatttgcagtttttccagaagagcgcgacgccagggcgaggtggaggctaaaataagtttaggcatatttttttccatcagatatagcgtattgatgatagccattttaaactatgcgcttcgttttgcaggttgatgttcgttatcagcactgaacgaaaataaagcagtaacccgcaatgtgtgcgaattattggcaaaaggcaaccacaggctgcctttttctttgactctatgacgttacaaagttaatatgcgcgccctatgcaaaaggtaaaattacccctgactctcgatccggttcgtacggctcaaaaacgccttgattaccagggtatctatactcctgatcaggttgagcgcgtcgccgaatccgtagtcagtgtggacagtgatgtggaatgctccatgtcgttcgctatcgataaccaacgtctcgcagtgttaaacggcgatgcgaaggtgacggtaacgctcgagtgtcagcgttgcgggaagccgtttactcatcaggtctacacaacgtattgttttagtcctgtgcgttcagacgaacaggctgaagcactgccggaagcgtatgaaccgattgaggttaacgaattcggtgaaatcgatctgcttgcaatggttgaagatgaaatcatcctcgccttgccggtagttccggtgcatgattctgaacactgtgaagtgtccgaagcggacatggtctttggtgaactgcctgaagaagcgcaaaagccaaacccatttgccgtattagccagcttaaagcgtaagtaattggtgctccccgttggatcggggataaaccgtaattgaggagtaaggtccatggccgtacaacagaataaaccaacccgttccaaacgtggcatgcgtcgttcccatgacgcgctgaccgcagtcaccagcctgtctgtagacaaaacttctggtgaaaaacacctgcgtcaccacatcactgccgacggttactaccgcggccgcaaggtcatcgctaagtaatcacgcgtctgcgtgatgaagcttagtgaggattttccccaggcaactggggaaagaccaaaccgggcggcgacgataccttgacacgtctaaccctggcgttagatgtcatgggaggggattttggcccttccgtgacagtgcctgcagcattgcaggcactgaattctaattcgcaactcactcttcttttagtcggcaatcccgacgccatcacgccattacttgctaaagctgactttgaacaacgttcgcgtctgcagattattcctgcgcagtcagttatcgccagtgatgcccggccttcgcaagctatccgcgccagtcgtgggagttcaatgcgcgtggccctggagctggtgaaagaaggtcgagcgcaagcctgtgtcngtgccggtaataccggggcactgatggggctggcaaaattattactcaagcccctggaggggattgagcgtccggcgctggtgacggtattaccacatcagcaaaagggcaaaacggtggtccttgacttaggggccaacgtcgattgtgacagcacaatgttggtgcaatttgccattatgggctcagtcctggctgaagaggtggtggaaattcccaatcctcgcgtggcgttgctcaatattggtgaagaagaagtaaagggtctcgatagtattcgggatgcctcagcggtgcttaaaacaatcccttctatcaattatatcggctatcttgaagccaatgagttgttaactggcaagacagatgtgctggtttgtgacggctttacaggaaatgtcacattaaagacgatggaaggtgttgtcaggatgttcctttctctgctgaaatctcagggtgaagggaaaaaacggtcgtggtggctactgttattaaagcgttggcnacaaaagagcctgacgaggcgattcagtcacctcaaccccgaccagtataacggcgcctgtctgttaggattgcgcggcacggtgataaaaagtcatggtgcagccaatcagcgagcttttgcggtcgcgattgaacaggcagtgcaggcggtgcagcgacaagttcctcagcgaattgccgctcgcctggaatctgtatacccagctggttttgagctgctggacggtggcaaaagcggaactctgcggtagcaggacgctgccagcgaactcgcagtttgcaagtgacggtatataaccgaaaagtgactgagcgtacatgtatacgaagattattggtactggcagctatctgcccgaacaagtgcggacaaacgccgatttggaaaaaatggtggacacctctgacgagtggattgtcactcgtaccggtatccgcgaacgccacattgccgcgccaaacgaaaccgtttcaaccatgggctttgaagcggcgacacgcgcaattgagatggcgggcattgagaaagaccagattggcctgatcgttgtggcaacgacttctgctacgcacgctttcccgagcgcagcttgtcagattcaaagcatgttgggcattaaaggttgcccggcatttgacgttgcagcagcctgcgcaggtttcacctatgcattaagcgtagccgatcaatacgtgaaatctggggcggtgaagtatgctctggtcgtcggttccgatgtactggcgcgcacctgcgatccaacagatcgtgggactattattatttttggcgatggcgcgggcgctgcggtgctggctgcctctgaagagccgggaatcatttccacccatctgcatgccgacggtagttatggtgaattgctgacgctgccaaacgccgaccgcgtgaatccagagaattcaattcatctgacgatggcgggcaacgaagtcttcaaggttgcggtaacggaactggcgcacatcgttgatgagacgctggcggcgaataatcttgaccgttctcaactggactggctggttccgcatcaggctaacctgcgtattatcagtgcaacggcgaaaaaactcggtatgtctatggacaatgtcgtggtgacgctggatcgccacggtaatacctctgcggcctctgtcccgtgcgcgctggatgaagctgtacgcgacgggcgcatcaagccggggcagttggttctgcttgaagcctttggcggtggattcacctggggctccgcgctggttcgtttctaggataaggattaaaacatgacgcaatttgcatttgtgttccctggacagggttctcaaaccgttggaatgctggctgatatggcggcgagctatccaattgtcgaagaaacgtttgctgaagcttctgcggcgctgggctacgacctgtgggcgctgacccagcaggggccagctgaagaactgaataaaacctggcaaacccagccagcgctgttgactgcctctgttgcgctgtaccgcgtatggcagcagcatggcggtaaagcaccggcaatgatggccggtcacagcctgggggaatactccgcgctggtttgcgctggtgtgattgatttcgctgatgcggtgcgtctggttgagatgcgcggcaagttcatgcaagaagccgtaccggaaggaacgggcgctatggcggcaatcatcggtctggatgatgcgtctattggaaaagcgtgtgaagaagctgcagaaggtcaggtcgtttctccggtaaactttaactctccgggacaggtggttattgccggtcataaagaagcggttgagcgtgctggcgctgcctgtaaagctgcgggcgcaaaacgcgctctgccgttaccagtgagcgtaccgtctcactgtgcgctgatgaaaccagcagccgacaaactggcagtagaattagcgaaaatcacctttaacgcaccaacagttcctgttgtgaataacgttgatgtgaaatgcgaaaccaatggtgatgccattcgtgacgcactggtacgtcagttgtataacccggttcagtggacgaagtctgttgagtacatggcagcgcaaggcgtagaacatctctatgaagtcggcccgggcaaagtgcttactggcctgacgaaacgcattgtcgacaccctgaccgcctcggcgctgaacgaaccttcagcgatggcagcggcgctcgagctttaaaagaggaacatcatgaattttgaaggaaaaatcgcactggtaaccggtgcaagccgcggaattggccgcgcaattgctgaaacgctcgcagcccgtggcgcgaaagttattggcactgcgaccagtgaaaatggcgctcaggcgatcagtgattatttaggtgctaacggcaaaggtctgatgttgaatgtgaccgacccggcatctatcgaatctgttctggaaaaaattcgcgcagaatttggtgaagtggatatcctggtcaataatgccggtatcactcgtgataacctgttaatgcgaatgaaagatgaagagtggaacgatattatcgaaaccaacctttcatctgttttccgtctgtcaaaagcggtaatgcgcgctatgatgaaaaagcgtcatggtcgtattatcactatcggttctgtggttggtaccatgggaaatggcggtcaggccaactacgctgcggcgaaagcgggcttgatcggcttcagtaaatcactggcgcgcgaagttgcgtcacgcggtattactgtaaacgttgttgctccgggctttattgaaacggacatgacacgtgcgctgagcgatgaccagcgtgcgggtatcctggngcaggttcctgcgggtcgcctcggcggcgcacaggaaatcgccaacgcggttgcattcctggcatccgacgaagcagcttacatcacgggtgaaactttgcatgtgaacggcgggatgtacatggtctgaccgcgatttgcacaaaatgctcatgttgcgcgcagtctgcgtggttatgagtaataattagtgcaaaatgatttgcgttattggggggtaaggcctcaaaataacgtaaaatcgtggtaagacctgccgggatttagttgcaaatttttcaacattttatacactacgaaaaccatcgcgaaagcgagttttgataggaaatttaagagtatgagcactatcgaagaacgcgttaagaaaattatcggcgaacagctgggcgttaagcaggaagaagttaccaacaatgcttctttcgttgaagacctgggcgcggattctcttgacaccgttgagctggtaatggctctggaagaagagtttgatactgagattccggacgaagaagctgagaaaatcaccaccgttcaggctgccattgattacatcaacggccaccaggcgtaagtgaacatctccaggcggtcgttcgaccgcctgagttttatctttttgtcccactagaatcattttttccctccctggaggacaaacgtgtctaagcgtcgtgtagttgtgaccggactgggcatgttgtctcctgtcggcaataccgtagagtctacctggaaagctctgcttgccggtcagagtggcatcagcctaatcgaccatttcgatactagcgcctatgcaacgaaatttgctggcttagtaaaggattttaactgtgaggacattatctcgcgcaaagaacagcgcaagatggatgccttcattcaatatggaattgtcgctggcgttcaggccatgcaggattctggccttgaaataacggaagagaacgcaacccgcattggtgccgcaattggctccgggattggcggcctcggactgatcgaagaaaaccacacatctctgatgaacggtggtccacgtaagatcagcccattcttcgttccgtcaacgattgtgaacatggtggcaggtcatctgactatcatgtatggcctgcgtggcccaagcatctctatcgcgaccgcctgtacttccggcgtgcacaacattggccatgctgcgcgtattatcgcgtatggcgatgctgacgtgatggttgcaggtggcgcagagaaagccagtacgccgctgggtgttggtggttttggcgcggcacgtgcattatctacccgcaatgataacccgcaagcggcgagccgcccgtgggataaagagcgtgatggtttcgtactgggcgatggtgccggtatgctggtacttgaagagtacgaacacgcgaaaaaacgcggtgcgaaaatttacgctgaactcgtcggctttggtatgagcagcgatgcttatcatatgacgtcaccgccagaaaatggcgcaggcgcagctctggcaatggcaaatgctctgcgtgatgcaggcattgaagcgagtcagattggctacgttaacgcgcacggtacttctacgccggctggcgataaagctgaagcgcaggcggtgaaaaccatcttcggtgaagctgcaagccgtgtgttggtaagctccacgaaatctatgaccggtcncctgttaggtgcggcgggtgcagtagaatctatctactccatcctggcgctgcgcgatcaggctgttccgccaaccatcaacctggataacccggatgaaggttgcgatctggatttcgtaccgcatgaagcacgtcaggtcagcggaatggaatacacgctgtgtaactccttcggcttcggtggcactaatggttctttgatctttaaaaagatctaagttgtcattttccacccatataaaaggtccgcttgcgggccttttttcttagcttttattccgacttgttccgtagtgaacatgctgccacactaacaattctctgataaggagccggtatgttcttaattaacggttataagcaggaatcgctgtcagtaagcgatcgggcaacgcagtttggtgatggttgttttaccaccgccagagttatcgacggtaaagtcagtttgttatcggcgcatatccagcgactacaggatgcttgtcagcggttgatgatttcctgtgacttctggcctcagcttgaacaagagatgaaaacgctggcagcagaacagcaaaatggtgtactgaaagtcgtgatcagtcgcggtagtggcgggcgagggtacagcacattgaacagtggaccggcaacgcggattctctccgttacggcttatcctgcacattacgaccgtttgcgtaacgaagggatcacgttggcgctaagcccggtgcggctggggcgcaatcctcatcttgcaggtattaaacatcttaatcggcttgagcaagtattgatccgctctcatcttgagcagacaaacgctgatgaggcgctggtccttgacagcgaagggtgggttacggaatgctgtgcagctaatttgttctggcggaagggcaacgtagtttatacgccgcgactggatcaggcaggtgttaacggcattatgcgacaattctgtatccgtttgctggcacaatcctcttatcagcttgtcgaagtgcaagcctctctggaagaggcgttgcaggcagatgagatggttatttgtaatgcgttaatgccagtgatgcccgtacgtgcctgtggcgangtctccttttcgtcagcaacgttatatgaatatttagccccactttgtgagcgcccgaattagtcatgaaaaaagtgttattgataatcttgttattgctggtggtactgggtatcgccgctggtgtgggcgtctggaaggttcgctatcttgccgactgcaaattgcttatcaaagaagagacgatatttaccctgaagccagggaccggacgtctggcgcttggtgaacagctttatgccgataagatcatcaatcgcccacgggtttttcaatggttgctgcgtatcgaaccggatctttctcactttaaagccgggacttaccgctttacaccgcagatgaccgtgcgcgagatgctgaaattgttggaaagcggtaaagaagcacagttccctctgcgactggtagaagggatgcgtctgagcgactacctcaagcaattgcgtgaggccccgtatatcaagcacacgctgagcgatgataagtacatcaccgtagcgcaggcacttgaactggaaaacccggagtggattgaaggttggttctggccagacacctggatgtataccgccaataccaccgatgtcgcgttactcaagcgagcgcacaagaaaatggtgaaagcggtcgatagcgcctgggaagggcgtgcggacggtctgccttataaagataaaaatcagctggtgacgatggcatcaattatcgaaaaagaaaccgccattgccagtgaacgcgatcaggttgcctcggtatttatcaaccgtttacgcattggtatgcgcctgcagaccgacccaaccgtgatttacgggatgggagagcgttataatggcaaactttctcgtgcagacctggaaacgccgacagcgtataacacctataccattaccggtttgccgccgggtgcgatagctacgccgggggcggattcgctgaaggctgctgcgcatccggcaaaaacgccgtatctctattttgtggccgatggtaaaggtggtcacacgtttaataccaatcttgccagtcataacaagtctgtgcaggattatctgaaagtgcttaaggaaaaaaatgcgcagtaagtatatcgtcattgaggggctggaaggcgcaggcaaaactaccgcgcgtaatgtggtggttgagacgctcgagcaactgggtatccgcgacatggttttcactcgggaacctggtggtacgcaacttgccgaaaagttaagaagcctggtgctggatatcaaatcggtaggcgatgaagtcattaccgataaagccgaagttctgatgttttatgccgcgcgcgttcaactggtagaaacggtcatcaaacctgcgctggctaacggcacctgggttattggcgatcgccacgatctctccactcaggcgtatcagggcggaggacgtggtattgaccaacatatgctggcaacactgcgtgatgctgttctcggggattttcnccccgacttaacgctctatctcgatgttaccccggaagttggcttaaaac

SEQ ID NO: 239 - DNA, 551 bp, Escherichia coli
  Strain O55:H7
cgcggcgagctggatcgtattgagcaagagtctttcgatttctttaatcgcacccgcgcccgctatctggaactggctgcacaagataaaagtattcataccattgatgccacccagccgctggaggccgtgatggatgcaatccgcactaccgtgacccgctgggtgaaggagttggacgcatgagatggtatccatggttacgacctgatttcgaaaaactggtagccagctatcaggccggaagaggtcaccatgcgctactcattcaggcgttaccgggcatgggcgatgatgctttaatctacgccctgagccgttatttactctgccaacaaccgcagggccacaaaagttgcggtcactgtcgtggatgtcagttgatgcaggctggcacgcatcccgattactacaccctggctcccgaaaaagggaaaaatacgctgggcattgatgcggtacgtgaggtcaccgaaaagctgaatgagcacgcacgcttaggtggtgcgaaagttgtctgggtaaccgatgctgccttactgaccgacgcc

SEQ ID NO: 240 - DNA, 4750 bp, Escherichia coli
  Strain O55:H7
  modified_base (207)..(207): a, c, g or t
  modified_base (1376)..(1376): a, c, g or t
  modified_base (2680)..(2680): a, c, g or t
  modified_base (4747)..(4749): a, c, g or t
taacgcattgctgaaaacgcttgaagagccaccagcagaaacctggtttttcctggctacccgcgagcctgaacgtttactggcaacgttacgtagtcgttgtcggttacattaccttgcgccgccgccggaacagtacgccgtgacctggctttcacgcgaagtgacaatgtcacaggatgcattacttgccgcattgcgcttaancgccggttcgcctggcgcggcactggcgttgtttcagggagataactggcaggctcgtgaaacattgtgtcaggcgttggcatatagcgtgccatcgggcgactggtattcgctgctggcggcccttaatcatgaacaagctccggcgcgtttacactggctggcaacgttgctgatggatgcgctaaaacgccatcatggcgctgcgcaggtgaccaatgttgatgtgccgggcctggtcgccgaactggcaaaccatctttctccctcgcgcctgcaggctatactgggggatgtttgccacattcgtgaacagttaatgtctgtcacaggcatcaaccgcgagcttctcatcaccgatcttttactgcgtattgagcattacctgcaaccgggcgttgtgctaccggttcctcatctttaagagagacatcatgtttttagtcgactcacactgccatctcgatggtctggattatgaatctttgcataaggacgtggatgacgttctggcgaaagccgccgcacgcgatgtgaaattttgtctggcagtcgccacaacattaccgggttatttacacatgcgggatctggtaggcgaacgtgacaacgtcgtattttcttgtggcgtgcatccactcaaccagaatgatccctacgatgtagaagatttacgccgtctggcggcagaagagggtgttgtagcgctgggtgaaaccgggctggattattattacacaccggaaactaaagtacgtcagcaagagtccttcatccatcatatccagattggtcgtgaactgaacaagccggttatcgtccatacccgtgacgcccgcgccgatacgctggcaattctgcgcgaagaaaaagtgacggattgcggtggcgtactacactgttttacagaggacagagaaacggcgggcaaattactggatctcggattttacatctccttttccggcattgtgaccttccgtaatgcggagcaactgcgcgatgctgcgcgttatgtccccctggatcggttactggtggaaactgactcaccttaccttgcgccggtgccgcatcgaggaaaagagaatcaacctgcgatggttcgtgacgttgcagaatacatggctgtgttgaaaggtgttgccgttgaagaactggcgcaggtnaccaccgataacttcgcccgtctgtttcacatcgacgcttcccgccttcaatccatccgttgaatgagtttttttaaagctcgtaattaatgactaaaaacgagtaaagttcaccgccgaaaattgggcggtgaataaccacgtttgaaatattgtgacatatgttttgtcaaaatgtgcaacttctccaatgatctgaagttgaaacgtgatagccgtcaaacaaattggcactgaattattttactctgtgtaataaataaagggcgcttagatgccctgtacacggcgaggctctccccccttgccacgcgtgagaacgtaaaaaaagcacccatactcaggagcactctcaattatgtttaagaatgcatttgctaacctgcaaaaggtcggtaaatcgctgatgctgccggtatccgtactgcctatcgcaggtattctgctgggcgtcggttccgcgaatttcagctggctgcccgccgttgtatcgcatgttatggcagaagcaggcggttccgtctttgcaaacatgccactgatttttgcgatcggtgtcgccctcggctttaccaataacgatggcgtatccgcgctggctgcagttgttgcctatggcatcatggttaaaaccatggccgtggttgcgccactggtactgcatttacctgctgaagaaatcgcctctaaacacctggcggatactggcgtactcggagggattatctccggtgcgatcgcagcgtacatgtttaaccgtttctaccgtattaagctgcctgagtatcttggcttctttgccggtaaacgctttgtgccgatcatttctggcctggctgccatctttactggcgttgtgctgtccttcatttggccgccgattggttctgcaatccagaccttctctcagtgggctgcttaccagaacccggtagttgcgtttggcatttacggtttcatcgaacgttgcctggtaccgtttggtctgcaccacatctggaacgtacctttccagatgcagattggtgaatacaccaacgcagcaggtcaggttttccacggcgacattccgcgttatatggcgggtgacccgactgcgggtaaactgtctggtggcttcctgttcaaaatgtacggtctgccagctgccgcaattgctatctggcactctgctaaaccagaaaaccgcgcgaaagtgggcggtattatgatctccgcggcgctgacctcgttcctgaccggtatcaccgagccgatcgagttctccttcatgttcgttgcgccgatcctgtacatcatccacncgattctggcaggcctggcattcccaatctgtattcttctggggatgcgtgacggtacgtcgttttcgcacggtctgatcgacttcatcgttctgtctggtaacagcagcaaactgtggctgttcccgatcgtcggtatcggttatgcgattgtttactacaccatcttccgcgtgctgattaaagcactggatctgaaaacgccgggtcgtgaagacgcgactgaagatgcaaaagcgacaggtaccagcgaaatggcaccggctctggttgctgcatttggtggtaaagaaaacattactaacctcgacgcatgtattacccgtctgcgcgtcagcgttgctgatgtgtctaaagtggatcaggctggcctgaagaaactgggcgcagcgggcgtagtggttgctggttctggtgttcaggcgattttcggtactaaatccgataacctgaaaaccgagatggatgagtacatccgtaaccactaatccgtaagacgttggggagactaaggcagccagatggctgccttttttacaggtgttattcagaattgatacgtgccggtaatgctgaaattacgcggtgcgccgtagacgatagaaccttccacgttggtatcgtaggttttgtcgaacaggttattgacgttcccctgtaacgagaagtttttcgtcacctggtagcgggtgaagagatccaccaacgcgtagctaccttgctcggcgcggaaggtgccatacggtgtcacggtgtcggtatacacgcgattttgccagttaacaccaccgccgactgtcaactctggcatgacaggcaaccgatagctggtgaacattttaaccgtggtgcgtggcagattaggattaacggcgtttccttcgttatcctctgcaatatagcgcgttgcgccaaatgtcagctgccagttgtcggtaattgcgccgttgagttcaaattccacccctttactgactgtcccatccaccgctttataggcggtttcgccgttgctgccggggataggtgtaccggtggactgagcgacattatcctgctcaatacggaagatggctaacgtggtggtcagacggctattcatccagtccgatttcagacccagctcgtagttgttaccggtgattggagccagatatttgcctgaactgtcacgatcattttgcggctggaaaatagaggtatagctggcgtaggtcgaccagttgtcattgatgtcaaacaccagaccagcgtaaggcgtggtgtggtttttctccatgctgtaagtcagcgtatcaacccgccagttggtataacgtgcgccgaggatcagatgcagcggatcggcaagggtgacacgagtggcagcatataacgatttcatatgtgtggtatcgtcctgcgccaggctctgtggtgaccagtcggtttgtgggaaattgccattaaagttgtagaaactgccaatttcatccgggaagatgttggcccatgaactgaagtaacgattgttttgtttgctgtaactgccaccaaacattagattgtgctgacgaccaaacaattcataactaccgtcagcgaacaaatccagcgcatcaactttacgtttgccactgttccaaccggtgccgccgacataatcaaagccaggtccataattactgtatggcccaaccagcataccatccgctttgtttacataggcatcgacatacatcattttgctgtcaaattcgacttcagagtgggtggcattcagtgtcgcttgccaggtatcagcaaaccgctgcttcagggtcataaagaccttgttgatctctttatcgttgtacgcccagtcaggtgcggtactgcgtgcgcgatcgtaactgttgctgctgccatcagtattccagcgcggtaaaccgccccaggttgggctattaacatcaatgcgctgatattcgtaaccggctgaaagcgtcgtaagatcgcctaaatcagcatcgacaatgccggagaagaaggtcttttcactattgtagcggtccagccatgagtcgttattctggtagccgccgacannnc

SEQ ID NO: 241 - DNA, 8068 bp, Escherichia coli
  Strain O55:H7
  modified_base (3631)..(3631): a, c, g or t
  modified_base (4454)..(4454): a, c, g or t
  modified_base (5006)..(5009): a, c, g or t
  modified_base (5177)..(5177): a, c, g or t
  modified_base (6715)..(6715): a, c, g or t
ggattttaccgtcttcggtgagtgggctttgtaaatccgccacataccgttctttgttccagctaccgtattccgccgagacatcgcctttaaattcacgactggtcgcgtgttttcgaaccatattaattgccgcagatggattacccgtcccggtcatgagtcctgtcgcgccacgcactacttctacgcgttcaaacagtgccatatcagaaagtgcgtcgcccagattccagcgcgattcaaaataggtggggataccatcaaccatatagttatcgatctggaatccgcgggaataataaagagcacgatcggaatccgcctgacttttgctgatccccagcgtgttttccatcacttcgcccagcgtttgtaactgctgatcttccatccgctgctggctaacaatagtgaccgactgaggaatatcacgttgagtcatctgcattttggtacccgcagaggtagacgttacgctgtaatcattttcgccatcatctggagctgtggctgaaccctcaacaatcaccgtttcttcagtggctggtgcagcaaaagcggcagaaggtaatagtgccagtgctatgcaaccggcaagtagtgacggtttggtgatggcttgatattgattatccctgttaaattgtgttgaaagcatttgaaatctcttggtttatgttgtcgtcaggctcatgccggaggagggtgatgagcggttatatttagtgtgcgaataattttgtttgtaaatgcaaatgagaaatatacgcattcatatttgtcgtgtaaaccaaacagagaatgtcttttcagcgcattcgcaggcagaaatgggaataatggagatatatacggcagcaaaacgattttttgcttaagaaatcgtgagttaaggttgaaagagcaggtttaactcgaccatactctatactcgcagtgtggcgcggcgtagcatggcgcaacgcatggctatttgaaaaaggaaaatgtcgtggcagaagaaactatattcagcaaaattattcgtcgtgagatcccctccgatatcgtctaccaggatgatctggtaacggcgtttcgcgatatttcgccgcaagcgccaacgcatattctgatcattccgaatatcctcattccgactgtgaacgacgtctcagctgagcatgagcaggcgctgggacgcatgatcaccgtagcggcaaaaattgctgagcaagaaggtattgccgaagatggctatcgtctgatcatgaacaccaaccgccatggcggacaagaggtttaccacatccatatgcacttgttgggtggccgtccgctgggaccaatgctggcgcataaaggtctgtaacgatgagaaaaggatgctttgggctggtgtctctggcgttgttactgctggtgggctgtcgttcacatccggaaattccggtgaatgatgagcaatcgctggtgatggagtcatctttattggctgcgggcatcagtgcagaaaagcccgtcctttcgacgtctgatattcaaccttcagcatcctcaacgctttataacgaaaggcaagaacccgttaccgttcattatcgtttttactggtatgacgccagagggctggagatgcatcctctggaaaggccacgcagcgttaccattcccgcacattcggcggtaacgctgtacggcagcgccaattttctgggggcgcacaaagtcagactttatctatatttgtaaggggtgaatcttgatgacaaaaatgagtcgctacgccttgattaccgcgctggcgatgtttctcgccgggtgtgtggggcaacgtgaacctgcaccggtagaagaagtgaaaccagcgccggaacaaccagccgagccacaacagcctgtccccacagtgccctcggtgccgacgatcccgcagcagccaggcccaattgagcacgaagatcaaactgcaccgcctgcgccgcatattcgccattatgactggaatggcgcaatgcagccgatggtcagtaagatgcttggggctgacggggtgactgcgggtagcgtcctgctggttgatagcgttaacaaccgtactaacggttcgctgaatgccgcagaagcgaccgaaacgctgcgaaatgcgctggctaataacgggaaatttaccctggtttccgcccagcagctgtcgatggctaagcaacagttaggtttgtcgccgcaggatagtttaggcacccgtagtaaagccataggcattgcccgcaatgtcggcgctcattacgtgctgtactccagcgcctctggcaacgttaacgctccgaccctacaaatgcagctgatgctggtgcagacgggcgaaattatctggtcaggtaaaggtgccgtttcgcagcaataatcccatcacgcgcgacgaattgctgtcgcgctttttcccgcagtttcatcccgtcacgacgtttaatagtgggcttagtggcggtagttttctcattgaacatcagggccagcgttttgttgtgcgtcagccgcacgatcctgatgcgccgcagtccgcgttcttgcgccagtatcgggctttatcacaactacccgcatgcattgcaccgaagccgcatttatatctccgtgactggatggtagtcgactatctgcccggcgaggtaaaaacgtatttgccggataccaacgaactggcaggcttgctgtattatctacatcaacaaccacgttttggctggcgaataacgctgttgccgttactggaactgtactggcagcaaagcgatccggcgcggcggacagtgggttggctgcgaatgttaaaacgtctgcgcaaagcgcgggaaccacggcctttacgcttaagtccattgcatatggatgtccacgccggaaatttagtgcatagcgcgtcagggttaaaactcatcgactgggagtatgcaggagatggtgatatcgcgctggaactggcggcggtgtgggtggaaaatactgaacagcaccggcaattggtcaatgactatgccactcgcgcgaagatttatccggcgcaattatggcgtcaggtcaggcgatggtttccctggctgctgatgctcaaagcagggtggtttgagtaccgctggcgacaaaccggcgatcaacaatttatcaggctggccgatgacacctggcggcagctattaataaaacaataaggagagcagtgtgggtccagtaatgttggatgtcgaaggttacgaactggacgcggaagagcgtgaaatactggcgcatccgctggtgggagggctgattctctttacgcgaaactatcatgatcctgcccagttgcgtgaactggtgcgccagatccgcgcagcatcgcgcaatcatctggtggtggcggtagatcaggaaggtggacgcgtccagcgttttcgcgaaggttttacccgcttaccggcagcacaatcctttgctgcgctgttgggaatggaagagggcggcaaactggcgcaagaggcgggttggctgatggccagcgaaatgatcgctatggatattgatatcagctttgcgccagtgctggatgtaggacatatcagcgcggcgattggcgagcgttcttatcatgccgacccagaaaaagccntggcaatcgccagtcggtttattgatgggatgcatgaagccggaatgaaaacgaccgggaaacacttcccaggacacggtgcagtaactgcagattcacacaaagagacgccgtgcgacccacgcccgcaagcggaaattcgtgccaaagatatgtcggttttcagcacgttaatccgcgaaaataaactcgacgccattatgcctgcgcatgtgatctacagtgatgttgatccgcgtccggcgagcggttcttcctactggctgaaaaccgttttgcgtcaggaactgggttttgacggcgtgattttctctgacgatttatcgatggaaggtgccgcgattatgggcagttatgccgaacgcgggcaggcatcactggatgcgggttgcgatatgatcctggtctgcaataatcgtaaaggggccgtcagcgtgttagataatctgtcaccgatcaaggcagaacgtgttacacgtttgtatcataaaggttcattttcgcgacaggaactgatggactcggctcgctggaaagcgatcagcgcccgtctgaatcagttacatgaacgctggcaggaagagaaagcaggtcactaaccctggcttatgtgaggaagcgatgattatctatttacacggttttgactctaacagtccgggtaaccacgagaaagtcttacaattgcagtttattgacccggatgtacgcttgataagctacagtacgcggcatccgaaacatgatatgcagcatctgctcaaagaagtggacaaaatgttgcaactgaacgtcgacgagcgtcccctgatttgcggcgttngtctgggcggatactgggcggaacggattggttttctttgcgatatccgccaggtgatcttcaaccctaatttgttcccttatgagaacatggaaggcaagattgatcgcccggaagagtatgccgatattgccactaagtgtgtgaccaacttccgcgagaagaatcgcgatcgttgcctggtgattttgtcgcgtaatgatgaagcgcttaacagccagcggacatctgaagagttgcatcattattacgagattgtctgggacgaagagcagacgcacaaattcaagaatatctccccgcatttgcagcgcattaaagcgttcaaaaccctcgggtaaatgccctcgtcgcatcaggtaaccttgccggtacctgatgcgctccgaattctgtaagtcggataaggcgttcacgccgcatccgacagtcgagcatcaatgcctgatgcgcctcttatcagacctaccgaacgccctacatacacccctcacgctatatcactctcacaaattcgctcaaataataaacaataaactctgttttttgatnnnnacccggtaaagtcgcctatcttttcagcaacaaaacttgattaacatcaattttggtatgaccaatgcaccattcatgttattctcaatagcgaagaacattttcattgctgtaacctgttgttaattaagagctatgttaataaccattaattaacaattggttaanaaatttaagggggtcacgttgactacgccattgaaaaaaattgtgattgtcggcggcggtgctggtgggctggaaatggcaacacagctggggcataagctgggacgcaagaaaaaagccaaaattacgctggtcgatcgtaaccacagccacctgtggaaaccgctgctgcacgaagtagcgactggctcgcttgatgaaggcgtcgatgcgttgagctatctggcccatgcgcgcaatcatggtttccagttccagctgggttccgtcattgatattgatcgtgacgcgaaaacaatcactattgcagaactgcgcgatgagaaaggtgaactgctggttccggaacgtaaaatcgcctatgacaccctggtaatggcgctgggtagcacctctaacgatttcaatacaccaggtgtcaaagagaactgcattttcctcgataacccgcaccaggcgcgtcgctttcaccaggagatgctgaatctcttcctgaaatactccgccaacctgggcgcaaatggcaaagtgaacattgcgattgtcggcggcggcgcgacgggtgtagaactctccgctgaattgcacaacgcggtcaagcaactgcacagctacggttacaaaggcctgaccaacgaagccctgaacgtaacgctggtagaagcgggagaacgtattttgcctgcattaccgccacgtatctctgctgcggcccacaacgagctaacgaaacttggcgttcgcgttctgacgcaaaccatggtcaccagtgctgatgaaggcggcctgcacactaaagatggtgaatatattgaggctgatctgatggtatgggcagccgggatcaaagcgccagacttcctgaaagatatcggtggtcttgaaactaaccgtatcaaccagctggtggtggaactgacgctgcaaaccacccgcgatccagacatttacgctattggcgactgcgcgtcatgcccgcgtccggaagggggctttgttccgccgcgtgctcaggctgcacaccagatggcgacttgcgcaatgaacaacattctggcgcagatgaacggtaagctgctgaaaaattatcagtataaagatcatggttcgctggtatcgctgtcgaacttctccaccgttggtagcctgatgggtaacctgacgcgcggctcaatgatgattgaaggacgaattgcgcgctttgtatatatctcgctataccgaatgcatcagattgcgctgcatggttactttaaaaccggattaatgatgctggtggggagtattaaccgcgttatccgtccgcgtttgaagttgcattaatcgacgtacactggcggatgtggcataaacgcctcatccgccctggacaaatggtacgagcggtaggcctgataagacgcgttaagcgtcgcatcaggcattccttcagactcctccgaatccttaagtatttccagccattcccgcgcttttcatcttctgtctgatagctgcttttctccttcgcttgcatgattggcataactgcaaagaangaggtattcccgtgaataaatcaatgttggcgggtatcgggattggtgtcgcagctgcgcttggcgtagcggcagtggccagtctgaacgtgtttgaacgtggcccgcaatacgctcaggttgtttctgcaaccccaatcaaggaaacggttaaaacaccgcgtcaggagtgtcgcaacgtcacagtgacccatcgtcgaccggtgcaggatgaacatcgcattaccgggtcggtgctcggcgctgttgctggcggcgtgatagggcatcagtttggtggtggtcgtggtaaagatgtcgccactgttgtgggggcgctgggtggtggatatgccggtaaccagatccagggctctctccaggaaagcgatacttacacgactacgcaacagcgttgtaaaacggtgtatgacaagtcagaaaaaatgctcggttatgatgtgacctataagattggcgatcagcagggcaaaatccgcatggaccgcgatccgggtacgcagatcccgctagatagtaacgggcaactgattttgaataacaaagtataacaaggctgtactctgcaatttggcccctcattcgctcaggctgaggggctttttttgcgacttatttcaccagttcgggccataaacgcaaagtcgttccggcaatctgcatcagtttttccaacgatgcaccttcgcgtgcgctgatcgacatcccctgaataatacaattaaggaattctgccagatgtgtcacgtcacagtgggtcgggatttccccgcgcgcttgtcgttgacataaaaactgctgcaaagtgcgctcttgcatcgcatggcgtgatttcaacgtattggcgatatctcctgaatctggggagagggtggtgcagttgttgatcatgaagcagcctgccggggtgtctttgccggtaaagcagttggcgatggcagcaaaatagtcagccagcgcagactccacgcttttctcttcacaaaacagctgtgcttcatgcttagcggcaaaacgatcgatatagcggtcgagaacggcacgaaataacccctctttgttggtaaattccgcgtatagcgtgggcgctttggctccggtcgcttcgacgaggtccgcaagagaagtcgcttcataaccgtgttgccagaacaatttcatggccttatcaagcgcggcatccctgtcgaacacttttgggcggccacggcttttttttacacattgtgttgagtcagttgccatgatgccgttgtacctggtgactgtgaatgaaaggttattataaaaataatcacctccgttcaccagtccagatcccataaaaataattgctttctatttaactgaaat

SEQ ID NO: 242 - DNA, 3353 bp, Escherichia coli
  Strain O55:H7
  modified_base (7)..(8): a, c, g or t
  modified_base (1547)..(1547): a, c, g or t
  modified_base (2962)..(2962): a, c, g or t
  modified_base (3169)..(3169): a, c, g or t
  modified_base (3350)..(3351): a, c, g or t
ttttaanntaattaatgattgttataaaaaatatcttgtatgtgatccagatcacatctatcatttagttatcgatcgttaagtaattgcttgcgacgtcattcatctgcataaggccactattatgaaaaacgtaaaaaccctcatcgctgcggcgattttaagctccatgtcatttgccagctttgcggctgtcgaagttcagtcaacgccagaaggccaacaaaaagtcggtacaatcagtgctaacgcggggacaaatctgggatcgctggaagagcagctggcgcaaaaagcggatgagatgggcgcaaaatctttccgtattacttctgtaaccggtccgaataccctccatggaacagcagtaatttataaataagcattaaccctcattaatgcctgctactgctgattttttccccgcgacatgccgtgtcgcggggattttttttatccaggatttacagcgtttgtgggctcacttgatgacggcggacatccaccggcatcccggaacggacatccatcacatgttgcatcacttcagcgtcagtttgtgctgcatctttaaatgattgcattgcgctattcagcgtaattggcagcagctgcggatcgtcatcaatcttctctgacagcggctgatgtacttcaaccagacgctcaccgtttggttcggcagagacttttatcggagtgttgatgatattcactttggtgcctggggtgacctggctaaagagtgttttgatatcgtcatcccgcagacgaatacagccagaacttacccgcatgccaatgccgaaatcggcgttcgtaccgtgaagcaaataaacgccgccataggccgccagacgaatcgcatgatggcccattggattatccggtccagccggcactaccgcaggcaactcaattccttgtgccttataccgcgcgcgaatgtttgccgttggcgtccaggttgggtttgcacgcttgtcagaaacggtggtcaccattgtcggtgtcagcgtgtcaccacctaactgaccaatacctattggatacacggttaccgaatttttacccggcgggtagtaatagagacgaagctccgcaatgttgatcacaatgccttcgcgcggcgcgtctggaagtagggtttgcaacgggatcgttaacacgctgcccgcgcgcggtacgtaaggatcaacgccggggttagcctgtaatagagcgagaaagccgacgttatattttttggcgatggcttccagagaaccaccgtcattttccaccacatgaaatttgttttcgccaaccagacgactgcccgctggcggcagcggccaggtgttggcttttgccggtagcgccagcgccacggcagcggcgaacgtaaaaaacgttagccagcgagaaaaacgcgttttgatcatcaccaaaaatccataataaatataaggttattgtaataaacagataagcctgaattatggatggtgacagtgtcggatagtgcagggaagtgcaaagaatttgtaaatgttgcagatgggggngcagaaacgcccccgatttaccattaagcgatcgcgttttcttccagttcacgcataaactggcgtacccattcgatacgcgttttccgctcactcaaatcctgaataaatttcaggcgcgtcggaccatcaaggcggtaatgctgcggctgtttttgcagcaaaccaatcaaccaggccggattaacgtgattcttctcggcaaattcgatcacgccgcctttctcattaccttccagcttcctgatccccagtttctgcgcttgctggcgtagacgggcaatatccagcagggtacgcgccggatccggcagcaggccgaagcgatcgataagctcgactttgatctcttccagttcgttttccgttttggcgctggcaatacgtttatagaacgacagacgcgtattcacgtcaggaatgaaatcatctggcaatagcgacggcatccgcagctcgacttctgtttgctggctggtgagatcttccagcgacggctcgcgtccggctttcagtgcatcgacggcgttttccagcaactccatatacagcgagaaaccgatggtttccattgagccgctttgttcttcgccaagcagttcacccgcgccgcgaatctccagatcgtgcgttgccagcgcaaaacctgccccgagatcttccagcgaggcaatcgcttcaagacgtttttgtgcatcggtagtcatcgcttttggatgcggcgtcagcagccatgcatatgcctgatgatgcgaacgtccgacgcgaccgcgtaactggtgcagttgcgccagaccgaagtgatccgcgcgttcaatgataatggtgttggctgtcgggatgtcgatcccggtttcgataatggttgtacaaaccagcacgttgaaacgttgatgatggaaatcattcatcacccgttccagttcgcgctcgcgcatctgcccgtgaccgatggcgatccgcgcttctggcaccagttctgccagccgttcggcggctttctgaatgttttccacatcattgtagagataataaacctgtcctccgcgcaaaatttcacgcaggatcgcctcgcggaccaccaggctgtcatactcacggacaaaggttttaactgccagacgacgggcgggcggcgtggcgataatcgacaggtcacgcattccgctcattgccatattcagcgtacgtgggatcggcgttgcagtaagcgtcagaatatccacgttcgcgcgcatcgctttaatgcgctctttatgacgcaccccgaagcggtgttcttcatcgacaatcagcaggcctaaatctttaaacttgacgtcactttgcagcagtttgtgcgtaccgatcagaatatcgattttcccttccgccacttccgcaaggatttgcgtctgctctttggcgctgcgganacgggagagcatttcgatacgtaccggccagttggcgaaacggtcgcggaagttgtcgtaatgctgctgcgcgagaagggtggtaggcaccagcaccgccacctgcttgtggttatctactgccaggaaagcggcgcgcatcgccacttctgttttaccaaagccaacatcgccgcacaccagacgatccattgccagcggctgacncatgtcgctaagtaccgcattaatggcctgcgcctgatccggcgtggtttcaaacgggaagctgtcgcagaacaactgatactgctcacgatcgtgtttaaacgcgaagccctctttggcggcgcgttgcgcgtagatatccagcaattccgccgccacatcacgcactttttccgccgcnntc

SEQ ID NO: 243 - DNA, 1162 bp, Escherichia coli
  Strain O55:H7
cgcgcgtgaccacgcatcgccgccaagtttatgcagcggggcattttcttccgcaccacccgcgtaacggctaatcagatgcagcgacgacaccggaacatacaatttggcgtcgttggcataggtgagcatcagatactcgccggtaatgccgcctgcttccagcgtggtcattccggcatagcgcccgacgccgtgctccagatggaccaccggctgaccaatatgcagttccgcgaggttacggatcagtgtatcggggttgatggtgcggcgagaatcctgacgacgacgggcaacgcgttcaccgagcagatcgctttcgcaaatcagcgccagattacgtaccgtatcgacaaaaccatgctctgcagcgccaatcatcagataacgcccacggtcgctggcttcatcaagacgcataatgcgttgcggagcaattttaattcgcgcgagcagttcacccagcgcttcacggcggccttcactttctaccgagaacaccaccggaccgtcgaaagactcgaggaacttacgcagcgcatccagcggcgctttttgttgtgcctgaacggccaggtctggcagtttctggaaacctaaattggcattcgcggcttttgtcggtaaatgttcagtttttagctgcactcggggccagtttttcagctctgagaagagctcgtccacccgcagccagagcgattgtggtggcaacagtgggcgcatcggatcgacgccgcgattctcaaaacgcgccagcgtgtcagcctggaaacgttcggcactgttttccagatcgccagtattcaccagcaaggtattggcagggaaataactgaacagcggcggcagtggttcgctgaagaacaatggctgccagtactcgatcccggcaggtaatgtgcctttactcacttgctggtaaatatgttccggatcgcgcttcacttcgaaggtatcgcgccactggctgcggaacagttcaatcgccgctttatcggtcggaaattcgtgcgcaggcagcaggttgatcgcttctacttcctccagcgtgcgctgactgtcgacgtcaaacacccgcagactgtcgatttcatcatcaaagaaatcaagacgataaggcaactcactccccatcgggaagagatccagcaacgcg

SEQ ID NO: 244 - DNA, 8767 bp, Escherichia coli
  Strain O55:H7
  modified_base (259)..(259): a, c, g or t
  modified_base (504)..(504): a, c, g or t
  modified_base (623)..(623): a, c, g or t
  modified_base (1124)..(1124): a, c, g or t
  modified_base (1178)..(1178): a, c, g or t
  modified_base (1204)..(1204): a, c, g or t
  modified_base (1216)..(1217): a, c, g or t
  modified_base (2269)..(2270): a, c, g or t
  modified_base (2787)..(2787): a, c, g or t
  modified_base (5045)..(5045): a, c, g or t
  modified_base (5051)..(5052): a, c, g or t
  modified_base (7617)..(7617): a, c, g or t
  modified_base (8302)..(8302): a, c, g or t
cgtggcgtattcgccgtgctccatcacctggtcaacatggcgataaccggcgctatccagttgggttcgtaatgcatctcgtgacaggcgctgacctttttccatcaccagcgcatgaccgtggagaaaactgtgcgggcaaacgcgctgcataagtgtattcaccggaacaatcagtacgccacgctgcattgtcggtagctggtaaagggtggaaaggcgcgaggagataatgtcctgatgaggcgaaaaactgtcntaagggagggtttcccagtctgccagattcatcaccatctggtcggtaaactggctaatttcatcatgcaaacgcagggcattttgcatatctggcgcaataagcaccaccggtccggcgtgacgttcggcaatttccgctaccagcgtcgcgcaggcagcgccggttaactcgcccagcagacgctgctcacccgctttgacgggcagcgtataacgatattgttcaggcataacggttgtcanattctcgttaggatatgcctcaacatatgggggcatatctctgataagcaatgctgttcattatccgtaatcgacatggtttagcaaattgaatcgccccggctggggcgatggcttancgggagtaactgacggcagcgggcagtgaaggcggggagaacaacagatcgctgaatgctcgctgtgaaagttttcttaccagcaagcccgcaacagtacagatgaacaaactaacaaaggggtaaaccagcaggagtgtcagttcgacttgcggcgaccagcgtgctgcgttcatttgcgcaagcagagttaagctgaatatctctaccagaattctatgggtagtgtagatagcaatagtgttggagccaatcacattcagcagactggtggaacgcatgccaaaacgttgttcatactgataaaacaacttcatgatcaccacaatcgacaccagcgacatcagcagcgagatagtaaacaaccaggcaccgaccgccagagcagccagcaaagaagccatcagcagatggcggcgcaacggcacctctttaacacaggtcattattgttgcgccaaaccatgcaccaaggctgtaataaggcaaattgcggatcacnctgttcattccccaccacggcgtgggaacgaaattaaccgccacactcagcagnacaaacaaggcgaatagtggcagcgncagacggctaannattttacataccacgaaatagacaattaacgcatacagataccacaagctggtgctggcggtgatcatcccgtgcaggaactcaccggtggaatcggcatacgcggcattggaggcattgcttaaatcgcgctcaggtgccagccactggttcagcgcacttaacgccagccactgcaccacgccccaaagcgccagcacccagaagatgttccagatccgtttatcgagacaatttccccacggtacgctgtcgatatagcggcgaatcaaatagccggatataaagaaaaaaaccggcatacgaaagggtgcaaggtaaagattgaaatagatccagcatttgctcaggacttccgataacggatgctgaaaagtggtcatatgcggataaaaggtaatgaccgagtgataaatcaccaccagacaaatacataaccctttgatctggttaatccatagctctttttgtttcatcaggacaacacgctcttttttaatttacatgcggttgatcctgcgggttatgacccgaggtgtaatgggtatctgtctgtattggatgatttttcagattaagatcaggcggcaagattgatgataaaacatggcaatttagccgattgatttacgggggcttttcagattagccctgacgatcacttacagttcagacgtttacccatcttgctttcgcttatatactcgtgtctttgctacagcaaccagacggatttcatgtaccaacctgtcgctctatttattggcctgcgttacatgcgtgggcgtgcagcggatcgcttcggtcgtttcgtctcctggctttctaccatcggcattaccctcggggtgatggcgctggtcacagtattgtcagtgatgaacggctttgagcgcgagctgcaaaacaacatccttggcctgatgccacaggcaattctctcttctgagcatggctctcttaacccgcagcaactcccggaaacggcagtcaaactggacggcgttaatcgcgtcgcacctattactaccggtgatgtggtactgcaaagnncgcgcagcgtggcggtcggggtgatgctgggtatcgatccggcgcaaaaagatccactaacgccgtatctggtcaatgtgaaacaaactgacctcgagccggggaaatataatgtcatcctcggcgaacaacttgcctcacagctaggcgttaatcgcggtgatcaaatccgcgtgatggtgccatctgccagccagttcacgccgatggggcgtattccaagtcagcgcctgttcaatgtgattggtacttttgccgctaacagtgaagtcgatggctatgaaatgctggtgaatattgaggatgcctcgcgtctgatgcgttatccggcaggcaatattaccggctggcgtttgtggctggatgagccgctgaaagttgactctttaagtcagcaaaaactgcctgaaggcagcaaatggcaggactggcgtgatcgtaaaggcgagctgttccaggccgtacgcatggaaaaaaatatgatgggcttactgctgagcctgattgtcgccgttgnggcgtttaacattattacctcgctggggctgatggtgatggagaagcagggcgaagtagcgatcctgcaaacgcaaggcttaactccgcgacaaatcatgatggtctttatggtgcaaggggccagcgccgggattatcggtgcgatcctcggagcggcgcttggcgcactgcttgccagccagttaaataatctgatgccgataatcggcgtcctgcttgatggcgcggcgctgccggtggctatcgaacctttacaggtcattgttattgcgctggtggcgatggctatcgcgctgctgtctacgctttacccttcatggcgcgctgccgccacacaacccgctgaggctttacgttatgaataagatcctgttgcaatgcgacaacctgtgcaaacgctatcaggaaggcagtgtgcaaaccgatgtactgcacaatgtcagtttcagcgtgggcgaaggtgaaatgatggcgatcgtcggtagctctggttccggtaaaagtaccttgctgcacctgctgggcgggctggatacaccaacctccggcgatgtgatctttaacggtcaaccgatgagcaaactgtcttcggcggcgaaagcagaactgcgcaaccagaagctgggctttatttatcagtttcaccacctgctgccggattttactgccctggaaaacgtggctatgccgctgctgattggcaagaaaaagcccgctgaaatcaacagccgtgcacttgagatgttaaaagcggtggggctggagcatcgtgcgaatcaccgcccatctgaactttctggcggcgaacgccagcgtgtggcgattgcccgtgcgctggtcaataacccgtggctggtactggcggatgaacctaccggtaacctcgatgcgcgtaacgccgacagcatcttccagttgcttggggaattgaatcgcttgcagggcaccgccttcctggtggttactcacgacctgcaactggcgaaacgtatgagccgccaactggagatgcgtgatggtcgtctgacggcggaactgagcctgatgggggcggagtaatggcgatgcctttatcgttattgattggcctgcgttttagccgcggacggcgacgcggcggcatggtgtcgctgatttccgtcatttctaccattggcattgcccttggcgtggcggtattgatcgtcggcttaagcgcgatgaacggctttgaacgcgaactgaataaccgcattctggcggtggtgccgcatggcgaaatagaggcggtggatcaaccgtggactaactggcaggaagcactggataacgtgcaaaaagtgccaggtattgccgccgctgcgccgtatatcaatttcaccgggctggtggaaagtggagcgaatctgcgcgcaatccaggtgaagggcgttaacccgcaacaggaacagcgtctgagcgcattaccctcgtttgttcagggggatgcctggcgcaattttaaagcgggcgaacagcaaattatcatcggcaaaggcgtggcggatgcgctgaaagtgaagcagggcgattgggtgtcgattatgatccccaactcgaatcctgagcataaactgatgcagccaaaacgtgtgcgtttgcacgttgccggtattttgcagttgagtggtcaactcgatcacagttttgccatgatcccgctggcggatgcccaacaatatcttgatatgggttccagcgtgtcaggtattgcccttaaaatgacggatgttttcaacgccaataagctggtacgcgatgcgggtgaagtgaccaacagctatgtttatattaaaagctggattggtacttacggctatatgtatcgcgatatccagatgatccgcgccattatgtatctggcgatggtactggtgattggcgtggcctgtttcaacatcgtctccaccttagtgatggcggtgaaagacaagagtggcgatatcgcagtattaagaacgctgggggcgaaagatggtttaattcgcgccatctttgtctggtatggattgctggcagggctattcggtagcctgtgtggtgtgattatcggcgtagttgtttcactgcaacttaccccgattattgagcggattgaaaagctgatcggtcatcagttcctctccagcgatatctattttattgacttcctgccatcggaattgcactggctggacgtcttctacgtactggtcacagcattgttgctgagtcttttggcaagttggtatccggcgnggcgcnncagtaatattgaccctgcgcgagtccttagcggccagtaaaggcagtacattaaaacaaggagcggcaatgtattacgggtttgatattggtggaacaaaaattgcgcttggcgtgtttgatagcggtcggcagttgcagtgggaaaagcgggtgccgacaccgcgtgacagctatgacgcatttttagatgcagtgtgcgagctggtagccgaagctgatcaacgttttggctgtaaaggctctgtcggcatcggtattccgggaatgccggaaacagaagatggtacgctgtatgccgccaatgtccctgctgccagcggtaaaccgctgcgtgccgacctgagcgcacgtcttgatctcgatgtacgccttgataacgatgccaactgttttgccctttcagaagcctgggatgacgaatttacgcaatatccgttggtgatggggttgattctcggcaccggcgttggcggcgggctgattttcaacggcaaaccgattaccgggaaaagctacattaccggcgagtttggccatatgcgtctgccggttgatgcgttaaccatgatggggctggatttcccgttacgccgctgcggctgtggtcagcatggctgcattgaaaattatctgtctggtcgcggttttgcgtggctgtatcaacactattatcatcaaccgttgcaggctcccgaaattattgcgctttatgatcaaggcgatgagcaggcaagggcgcacgttgagcgttatctggatttattagcggtttgtctgggaaatatcctgaccattgttgaccctgacctggtcgtcattggtggtggcttatcgaatttcccggcaatcacaacgcaactggcggacaggctgcctcgtcatctcttacctgtagctcgtgttccgcgcattgaacgcgcgcgccacggtgatgcgggaggaatgcgtggtgcggccttcctacatctaaccgattaaacaacagaggttgctatgctgtcgcgtcggggtcatcggttaagtcgttttcgtaaaaataaacgccgcctgcgcgagcgtttgcgtcagcgtatttttttcagagataaagtggtgccggaagcaatggaaaaaccaagagtactcgtactgacaggggcaggaatttctgcggaatcaggtattcgtacctttcgcgccgcagatggcctgtgggaagaacatcgggttgaagatgtggcaacgccggaaggtttcgatcgcgatcctgaactggtgcaagcgttttataacgcccgtcgtcgacagctgcagcagccagaaattcagcctaacgccgcgcatcttgcgctggctaaactgcaagatgctctcggcgatcgctttttgctggtgacgcagaatatagacaacctgcatgaacgcgcaggtaataccaatgtgattcatatgcatggggaactgctgaaagttcgttgttcacaaagtggtcaggttctcgactggaccggagacgttaccccagaagataaatgccattgctgccagttcccggcccccttgcgcccacacgtagtatggtttggcgaaatgccactcggcatggatgaaatttatatggcgttgtcgatggccgatattttcattgccattggtacttccgggcatgtttatccggcggctgggtttgttcacgaagcgaaactgcatggcgcgcacaccgtggagctgaatcttgaaccaagtcaggtcggtaatgaatttgccgagaaatattacggcccggcaagccaggtggtgccagaatttgttgaaaagttgctgaagggattataaagcaggaagcattgcctgatgcgctacgcttatcaggcctacaagcggaccacaataccgacgaaagagcgggataaaactttactgtcctgactcattagccacatccttgctaactaaaaaacgggcggtaataccaccgcccgcttgctgaattaacgtcctgctttcagcttctgataatactcttcataaatgctgctggctgcgccaacgtcattctgccattcgccatttttaatggtttcagcatccgggtagagcgtcttatcgttcgccacttctggacttaacagcttacgcgccgcaaggtttggcgttggataaccgatagtttcagcaacctgttttgccacatccgggcgcagcaggaagttgatcaatttcagcgcgccttctttgtttttggcatttgccgggatcgccaggctgtccatccagaatatgccgccttctttcggccacaccacgtcaataggcgtacccgcctggcgtgcaacgaaagcagaaccgttccagatcatgccgaggttaacttcgccttccatgtacgggttagccgggttatcggagttaaacgctgcgacgtttggcatcagttttttcagctcgttatatgcagcttcaatctctttcggatcggtggtgttaccggagtagcccagcttacgtagcgccatctggaacacttcacgggcatcgtcggtcagcagcaggctgcctttgtactcaggcttccacaaatcgncccagctggtgacagatttcggatccaccgcatcaccgttaacgccaatcgccgtcgcaccccagatatacggaatggagtaatcgttattcgggtcaaacggcttattgagcatgtctggatcgagattgctgaagttcgttaacttcgacttgtcgatcttctggatcatcccttctttacgcattttatcgacgtaataggttgaaggaaccaccaggtcataggcaccgtctttgtacgttttcagcttggcatacatggtttcgttcgactcgtaagtcgaatagataaccttaataccggtttctttggtgaactgttcaagcagtcctggcggcacgtactcggtccagttgtagaaatacagcgtgttgttgtcatcggcgtgagcggcgctcatgcccagtgccagagcacccgccgcgagcaggtggcgtgaccattttttcatttaacgtcccctgtgttacctttcgttttatcacgagcaataagctggctggcaataaccatcaccagcgacagcaccagtaatatggttgccagcgcgttaacttccggcgatacgccgactttgaccatcgaataaatttttaacggcagaatttcataactcggcccggtgacgaacgaagaaaccaccacatcgtccatcgacagggtaaagcttaacacccagccngccgccaccgctggcattgccagtggcagaatgatttttcgcagaatggtaaattcgctggcaccgagatctttcgccgcttccagcatccgcacgtcaaaacctttcaggcgcgaatacaccgtcaccaccacaaatggcaggcagaaggtgatatgcgagaacagcagcgaccagaagccaagctgaatacccagcagcataaacagcaccagcagcgaaatcgccatcacgatatctggtgacatcatcaccacaaacagcattccgctaacgaacggcttaccacgaaagcgataacggtacagcgcaactgccgtcagtgaaccgataagcgtagcaaacgtcgccgaaaacaccgccattgttagtgaatgctgcgctgcctgtaacaggctgtcgttgttcatcagcaggctataccatttggtggtaaaaccctgccagttgatgccaaagcgcgag

SEQ ID NO: 245 - DNA, 981 bp, Escherichia coli
  Strain O55:H7
aggagttcacaatcaaaataatgattgggatatacaggtacgcgtagatagcggtcataaaaccgccgcgaagcagtcgaccgatcattcgagttccacctttttgttcagcagacgagaagcgcgccagtaaaccagcaacatcaggcccattacgatagtcagcgtaatgctggtggctgcaccaaacggccagtcacgaatattgaggaactgtaccttgatgacgttaccgatcagcaggtttttcgcaccgcccatcaggtcggacacatagaacaggcccatcgctggcagcatcaccagcagacatccggcaataatccccggcatcgtcagtggaataatgatgcggataaaagtctgtaacttgctggcaccgagatcgcgcgccgcctcaagcaacggcttatccagtttttcgatactggagtacagcggcatcaccataaacggtagcagaatgtaaaccagaccgataatcaccgcactgggcgtgaacatgatacgaattggtgtgtcgataacgcccagccagagcaaaaactcgttgagatagcctttggtgctgaggaaaattttcagcccgtagatgcgaatcagtgagttggtccagaagggaacaatcagcagaaacagcagcagcggacgcaccttgtgtggcagcttcgccagaaaccaggcaaacggatagcccagcaccaggcaggcgagggtggcgatcagcgccatattcagcgagtgcaatagcacttcaaaatagagcggatcgagcagacgtgtgtagttatccagcgtaaagaccattttgacaaaactggcgtcgtcgcgggtcaaaaagctggtgccaatgatcatcaggttgggcagaaagacaaacaacacaagccaaccgacaatagtgacaatcactacattctggaacttacttgtgttcttcatcagccagtacgacctcccagctttctacccaattaatgg

SEQ ID NO: 246 - DNA, 9708 bp, Escherichia coli
  Strain O55:H7
  modified_base (5921)..(5921): a, c, g or t
  modified_base (7699)..(7700): a, c, g or t
  modified_base (9611)..(9612): a, c, g or t
  modified_base (9701)..(9704): a, c, g or t
tggtcgagagagtggtcaaagtcaggatcgtcttcattgaagaattcgctgaccatcaccatcttgccattttccagttcaacaaccgactccagcgtcatgcctttgtagttacgctcgcgaacgtaaccaatcagcccttcagcgtggttgtcgtcgttaatctcttcaacacgtaagtcttccgggcgcagcagaacatgcagtttttgccccggttcaacggcgaagttaacgtagatattacattcgcggccttcaacgttggcgcgtacgcgctgctcgtcgagacgttcgatgacagtggcgttaaacatattgatttcgccaatgaacccggcaacaaacaggtttttcggctcttcgtagatttcacgcggcgtgccgtcttgctcaatgcgaccatcgcgcatcaccacaatcctgtctgacatggtgagtgcttcttcctgatcgtgagtcacgaagacgaatgtaatgccaagcttacgctgtaacgctttcagctcgttctgcatttgcttacgcagtttgtaatccagcgctgagagcgactcatccagcaacaacagacgaggcttgttaaccaccgcgcgagcaatggcgacgcgttgctgttgaccaccagagagctgatgcggtttacgttgagcgaaggtttccagctgcaccatccgcagggcttccatcacgcggggcgtaatttcagcagcgggggttttttgcatgcgcaacccaaaggccacattttcgaacacggtcatgtgggggaaaagtgcgtagctttggaaaacagtgttcacatagcggttttccgccggaacgtgggtgatgtcctcgttatccaacatgatgcgtccggaatcaacagtttccagacctgcaatcaggcgaagaacggttgttttaccgcagccagaagggccaagcagcgtgaggaactcgccattgttgatagtcagatccagctggggaatgacctctttaccatcaaagcatttgcgaattcccgccaattgcaccagcggtgaaagcgaactcggttgtttattcaattttttactctgtcccatgtaaacgcaacggatggcttaccgatgcggggtttgtggttaaccaccttggtgactcttaatgagggcggtaattctacggcaaaccgcttgaatcgccaatctttgttgtgaattactggcttagctttatattcattaaggtaatgctgataaatattcccgcttgcaggggtaaaagtgacctgacgcaatatttgtcttttcttgcttcttaataatgttgtcacaaaaagtgagggtgactacatggataaactacttgagcgatttttgaactacgtgtctctggatacccaatcaaaagcaggggtgagacaggttcccagcacggaaggccaatggaagttattgcatctgctgaaagagcagctcgaagagatggggcttatcaatgtgaccttaagtgagaagggcactttgatggcgacgttaccggctaacgtccctggcgatatcccggcgattggctttatttctcatgtggatacctcaccggattgcagcggcaaaaatgtgaatccgcaaattgttgaaaactatcgcggtggcgatattgcgctgggtatcggcgatgaagttttatcaccggttatgttcccggtgctgcatcagctactgggtcagacgctgattaccaccgatggtaaaaccttgttaggtgccgatgacaaagcaggtattgcagaaatcatgaccgcgctggcggtattgcaacagaaaaacattccgcatggtgatattcgcgtcgcctttaccccggatgaagaagtgggcaaaggggcgaaacattttgatgttgatgccttcgatgcccgctgggcttacactgttgatggtggtggtgtaggcgaactggagtttgaaaacttcaacgccgcatcggtcaatatcaaaattgtcggtaacaatgttcatccgggcacggcgaaaggagtgatggtaaatgcgctgtcgctggcggcacgtattcatgcggaagttccggcggatgaaagcccggaaatgacagaaggctatgaaggtttctatcacctggcgagcatgaaaggcaccgttgaacgggccgatatgcactacatcatccgtgatttcgaccgtaaacagtttgaagcgcgtaaacgtaaaatgatggagatcgccaaaaaagtgggcaaagggttacatcctgattgctacattgaattggtgattgaagacagttactacaatatgcgcgagaaagtggttgagcatccgcatattctcgatatcgcccagcaggcgatgcgtgactgcgatattgaaccggaactgaaaccgatccgcggcggtaccgacggcgcgcagttgtcgtttatgggattaccgtgcccgaacctgttcactggcggttacaactatcatggtaagcatgagtttgtgactctggaaggtatggaaaaagcggtgcaggtgatcgtccgtattgccgagttaacggcgcaacggaagtaagcgaaaagggatgcggcatgtgatgccgcatccggcttaaatccaaacttacccttcgaagaaccaatacccgctattgaccagcgccgcgagcatcgcgaggaatgacggatcttccagcgcatcgccaaaattctccgcagtcagcgcaatgttgctggcgagtgcatccagtgccggacggtgcggggaatcgatcttctcaccattggtatacacgtcgtcgccaatgcgcaatacgcgcagaccacccaggcgcaccagcacatcaccttgtttcagcgcatcgtagatttcatctggctgataaggcggctccggcggcgcgatatccagttcatgacgtgactgggatataaactcgccaaaccattgcttaaagtgttccggctggttgatcaattcgagcatcatctcacgcagtttatccatctcttgcggcagaacgtccgcaggatgagcgcgaggtggaacatcaggatcgctgtagtagttgccgcccagttcgcgttgcagcacataatcggcaaatccgctaattaattcccgcgtatttggcgcgcgaaaacccacggaatagttcatcgcattttccagcgcgtagccttcatgcgggaatcctggcggaatataaagaatatcgccaggctccagctcttcatcgatgatggcttcgaacggatcgacctgtaacagatccggatgtgggcagtgctgtttcatttgcagcttctcgcccactcgccagcgacgacgtccggtaccctgaatgataaacacgtcgtactgatcgagatgcgggccgacgccgccgccaggtacagaaaaagagatcatcagatcatcaatacgccagtccggtagttcacggaacggtcgcatcagcgcggcggtcggctcatgccagtggttcactgcttgcactaacaatgaccagttagtttcaccgagatgatcgtagctttcgaacggaccgtggctgacctgccattttccatcctggtgactgaccagtcgactgtcgacttcgctttccatcgccagacccgccaactcgtctggagagatcgggtcaataaaattattaaagccgcgttttaacaccaccgggcgtttctgccagtgacgttcaagaaaatcgggccagttaagagtgagttggtattccatgttaagcatccacaggctggtatctgcaaccgattataacggatgcttaacgtaatgcgtgaagtatggacatattttatcaattagtgttttttgccgtttcataatgtttcagattgttcattatgtttttgattataaacagatttgtgattttccttgttccagcttgtttcacgttgtagccctttgtgcaacgatcggtgtagttaatggtgtagttaattgtgatgaccggaatcaaaattatgagcagagcacttaacaaactgagcgatacacagctgaggaaaatcaacggcacacccgcccaaaaaacagcctttcttaatgacggtggaaacctgagcgtcaggcattcaaccagtggccttttaacctggtatttcacttacagggccggaacgggaaggggggcaccaccggaacgcattaagctgggaaattatcctgatctgagcctgaaatcagccagggaaaaagccgcccagtgtcgcgcatggctggcagaggggaaaaatccacgtcatgagcttaattacaccgtacaggaagcgttaaagccggtaacggttggcgatgcgctcacctactggcttgagtcgtacgcaaaggaaaaccgcgtggattatgccgccctgaaaaagcgccttaataatcacgtaatacagcacattggtgctatgccgctggataaatgcgagctacggcactggctggcctgttttgaccaggtggcaaagcgaacgcctgttactgccggattcttgctacagacgtgcaaacaggcgcttaagttctgccggaggcggcgctatgcaatcagcaacgttcttgatgatatgagtgtggcggacgttgggaaaaaaccggatataagcgagcgtgtcttaagcaccaaagaactgggcgaattattgcaggcactggacaaaaaaatattctccccctactacatcgcgttaatccgcctcctgattgtgttcggatgccggacggtagaactgaggttatcggagatcagcgagtgggattttaccgaaatgctctggaccgttccgaaggagcacagcaaaacgaaggtagccatattccggcctataccggaagcaatactgccgttcatcacgcagctggtggagcagaacaggcacacgggcttattgctgggggaagtgaaacaggaggccagcgtatcgcagtatggaagattagcgcacaggaggcttaatcaccctcactggtcactgcatgacatccggcgcacctttacaaccatgctgaacgatttaggcgttgatccgcatgtcgtggagcagcttacaggccaccagatgccaggaatgcagcgagtttataatcattcccgttatctggatgcgaaacgcaatgcgctggatatgtggacggagcggttagggatactggcgggaacacatgaaaacgtaaccacgctaccagtagccagaagaaaataatttttttcgtgttttttcagtatgcgcatactggatatgcgaacagatacaacgtgcaacaatgagcaacaatgtggaacaactacgaacaagaggcgaaaaagcgtacggatttataagtagctgatttttaatgtgttactggttttttatacactagcgaatcactctttaaagagcgagaaaaaaggcatggaacaatattttatgcctttgtattaacatgaatttaaaagattttattcttactttttcattttctgtaaatcatacatcctcagtatttgccattcatcactctagcgggaacaatacgacacaataagacacctgatgactctttaagaaacgaaagggggcaatagtgttaagcactgatcggtttatacgtgaaaaagaatgcgaaaaactaaccggccttagccgtacgtgtcgctaccgcctggaaaaggccggacaattcccatcacgtcgtaaacttggcggtcgttccgttggctggtctttatccgaggttctggcctggaaggatagctgcaaggcagttcattaatcacgctggcggcacacagccgccacacatcaatcatctgaacacagagctataaccatgaagattgaatatacgccagaacgtgggcggggattcgttcgccctggtgagactggaaaaccacaaaattggggtttttcaggcataaaaaaagcggccccgaaatggagncgcctttctgaacagataacccgctgcgccttatgtgtatatgatcccaaacataagcacggggatgatagccgctatcaggctggtgggcaatgctatcagtctggttcagttcgttgccatacctgcaatgggcgcgtttccctgtactctttaaggaattgctcaagggcaaaagcacatggcgcgaatctttctgattcatgctctatctttctgcgccgtcttttccgtgccggtgataatgttttggtcaattctttatcggtcattgtgttgtcctgcatagcaatgcgccgtaatacctcacaccacggcgctgatagtttttatcctttgggttctatgccgcggctgtaattctttgcggagaacgcgtttaatccaagtggctaaagatgtgtcgccatcggccttagctgcttcttctagctgcgctctgaagtcttccggtaatcgcatttggtatggaggcgaacgtttttctaatggtgttgacatggtaattaccctttattactatacctacatggtaattaccattgtacttgccattacacaaaaatcaacgccccgcagtgctgggaacacatacggggcgtctaaccaacaacgtaaactaggagccgttatggttgccgtaaatcatataccacaccttgtacacacacaaacggcctttgtgtggcgttttctggcactgagtgccggagaatctcaaatcatccacgtaaccgcctggacggaacgcgaagcgcgtaaccgttgcccgtccggttgtgttgctgtatttgccgcccgtattcgtcaggaggtgcgccatgattaatctgtcacttactgaccttaaccgcattcagtttcgtgagaaattcacagggcagctactggtcaatgtggataaaggtcgcgtggtgtgtaattaccacttaccagatgaagcaattgtcgccacaagggaatcattacaggaaatcacaaaacgtgccggaatgattaacacgaatattcaggggatgctttatgcacaataaaaccacaccggacgcagccgccgaagccatcaaaacgctgatgcacgcgctgattgatatttctgttatcgcggacagggcacataagcacgccaccagcgaaacagaatatgccggtgctttcgttcctcactcactggctgtcatgcaatttagtgctgatacggcgctgaatgaggccaaagctatcctgattgctgattgtgaaaatggggggggttatgcgtgatgatcgttttaattccctgaaacaggaattttccggcgttcctgatgatgcggctgatgcgctttcgtcaatgccagaacttattagagcggcttttttcttactttccacgagagaatataaatcaacggggcttgatgtactgaatatcgccgccgattatgcggaatatgtggcagaggcgcgttatagaagaaaatttcctgaggatgtaagccatgcgtgatatttaccaccaaacaatagaccgcgcatttcttgcactttctcacagtgaaaacatgatggaaatattgcgcatatggcttgaaacacttggcgacaatgaacgcgacaaacaaaaatcaagaattgccacggcattaataacgcttcttgagcctgtaataatggaactgcaagaaatagatctattgcacgacagatataaagaacagcacaccggagaataaaaataatgaaacttaaatattctggcttaactgccagtggcaacactcaccctaaatttacgnncggtgatatttaccgcgaccagtacggcggcacggtaatgattaagggcgtggaagaacggcgcgtaacctaccgccgtgaaggttacgaatatgattgcgtgatgcctgtttatcagttccggcgtgatttttctctggtacagaccgcgccgcataacgtgcccaccagcaacgccagggcacgggcaaacatccagaagctgaaaaccatggttaacggattcaggggcaagaaatgaaaagcgcaccgaacttaaaaaaacagccttacgacaagatgaccgaagtcattatttttgcgggtagtgatgcctgggcacatgcgaaacagtggcaggaacaggacgggcgactggctggcgataatgtgcctcccgttgtgctggctgatgatcaactggatgaactggcagacctgagaatcatcgacgaggggcgctattgtgtccggctgtacaaggcaggccacatcaggccatcaaatattaatgccattgcgcacaagctggcggcggcgggtgtaactgatgcgaattattaccccgaagggatgcacagccatatgcgggagaactggcgcgaatacctggaacgggtgcgcgggaaagagccggcggaagaaaaaaaccaccagcgaaaaaccacgctaccgatgagcgttggatctaccggatacgacacgcaactggattacgtggttaaggggattattccggcggtatcgctatgcagcatatacggggctagcgggtcctataaatcattccttgccggatcgtgggcgtgccatgttgccactggtcgccagtggggaggccgcagggttgcacatggtgcggttctctatgtggttggtgaaggcggtataggtgttccgcgtcgtgtaaaagcctgggaggttgtgcacgatgagcaggtgaaaaatctgtatctggtaaaccgccccatctttccggctgccccgcttgatgttgatgaaatggttatcgctgcccgtcaggtggagcgggaaacgggtaaacctgtacgcatgattattctggatacgctggcgcgttgctttggtgggaatgatgaaaatgattcccgtgatatgggggcgtttatccgtggttgtgacgaactgaaacgacgcacaggggccacggtgctggtggttcaccattccggcaaggatgagacgaaaggcgcgcgcggttccagtgcatttcgtgcttcgctggatgctgaataccggatacgcagggaggacgcaggaagcgaagcgctggttatctcatgcaccaaaatgaaggacgcggaggaactcaaagaagccgcatatgacttacgcgtggtggagctttttaccgacgctgacggtgaattaatcacgtcgctggtggtggtggatgatccgcgccctcctgttgaactggagcgcatcgaggaggcagggaacaagacggaaaaccataccgcgctatgggggtgcatccgttcacgcacacagaacggcgacaagtgcacgatcccgctgttacgtgatgacatgaaaaagctggggtatgaaatgaaaaacttccggcgctggctgtacaagctggaaaaagatggggttattcgtatcgatggggatgatgtagcgccgctataaaagtgaggagcaaaagcgagggggatagaaagagggccaaaattagcccgctctccctcacttttcgacctgtatacatcctcaaaagtgaggggtaaaaaaatacttatgaaacacacacatagaaaaaccgaaaatcccaactgcgacgaagtgagacgcttgaaaaagtgaggcgaaaaagtgagaggttgtgagaaatgacccaaaaacgcagagacagaacagagccaaaatataaagcgttagacatgactgagcacaccttaaagnntgcaatcagaacgatagaccgccacacgcggggaaggatacgcgaaggaacatcccgacctgataagcgcattcatgaccacggcggcnnnnaact

SEQ ID NO: 247 - DNA, 52 bp, Escherichia coli
  Strain O55:H7
  modified_base (46)..(49): a, c, g or t
acgcttacagaacgggagattgccgaagcggaacaggtaacaaccnnnnacg

SEQ ID NO: 248 - DNA, 35 bp, Escherichia coli
  Strain O55:H7
ccgcaggtaaaacagaccagcaagggcacaccgat

SEQ ID NO: 249 - DNA, 4704 bp, Escherichia coli
  Strain O55:H7
  modified_base (191)..(191): a, c, g or t
  modified_base (965)..(968): a, c, g or t
  modified_base (970)..(970): a, c, g or t
  modified_base (2043)..(2044): a, c, g or t
  modified_base (2842)..(2842): a, c, g or t
  modified_base (3232)..(3234): a, c, g or t
  modified_base (4484)..(4486): a, c, g or t
caggacggacaggcgacgttatggttatcggtcatcgcatttggcaaacaggccgacttcctggctaaacatcaaaaaggcgatgttgccagcgtatccggcacgatgcaggtaagccagtggaccggacagaacggagaaacgcggcagggctggcaggttatcgcagacagcgtaatcagtgcccgcgnggcacgtccaggcgggaacagacgcaaaaccacaggcacacagggtaatcagccaccagcgggaggcgatgacccttacggtgatgatatttcgttctgagggggtgacgatggtacatgaccgcatagcggaggaactggaggcgaaaggcttttaccggagggcggcggcgcgatggggtgaagtcatgcagctggtggagacagacaaggaacggcatcacatcacgatgcgacggctggaatgttcaaggaaggcacagagggcaccggagccgccggataatttcggagacctgaaaaaggcagtcgatcgcacttatgccgaaatgggtatagatggtgctggtgatgaaatatggcgcaattaccaggacagctaatcaaacagccggagaaatccggctttttttgcaccagttgaaacggtatggcgcattaccgggttttcgtcacggtcaggcatagttactatctgaaacaaacagacacaacagaggaaaaaaacaatgccgatgaaatttgatgagatattaaaacagcgtgataaataccatgctgacaacatggagacgatgagcatcaatgattaccgcgcattcctggagacgggcgcactgattgaaaaggatcagcatggttttgtgagatgtgctctatccggtgaaatgctggcggtaaatcctgaacagatagatgcattgatagaatttctgaaagagatcagagactgagccagcacacagcacacatagccggagcaatccggctttnnnncncccaaaaaaagcccgataaggtcagagggttcttatcgggcttttgcatatgaggtttttggatgcactggcgttcgtgatcgggataatcatttcataatttgcaacataactcaatatcattgcataaaatgcaattctgattataatcaggactggataaacgtccagttatgatttttttagtcgaagaggaatttcttactatggctgaagagaaaaaaggcggtgtttcggtgtacataagccccgaaatcgtggaggtgctcaagcagcgccacaaaaaaaactatgaagctggcgttgcggctggactggatccgctgatgacgccggagccgtcgataggttcacttgtacgctcttatttacttgcggcgcttgggatgcataaaaattatgggggtgaataatggcaggcaaagcaacggcacttaacactaaccagcttttcatgtacctgaatcgcggggatattgcggattttaaattcagccctctgtttaccacgctgtttttcccgaacgtggcgacattcagcacgcaaaacatcatgctggataccctggacattgaagaagtcaccatgtcggcgttttgttcgcctatggtgggtagccaggttcagcgcgataaagggtacgaaaccagcacaatcaaacctggctacatgaagccaaagcacgaaatcgatccaacgaaaaccatcatgcgcatggctggagaagatccggcacagcttaacgaccctacctatcgccgtatgcgcctgattactggcaacatgcgccgccagataaacgccattaaggcacgcgtggaatggctggcggtgaatgcggtaacgaccggaaaaaacatcattgagggcgaaggcatagaacgctatgaaatcgactggaaaataccggaaaactgcatcatagagcaggccaagggtaaaaaatggtccgagcaggataaagacatgcacgacccaatctatgacatcgagctttatgctgatcaggctggttgccccgcaaacgtcatgattatgggcgctgaggtatggcgcacattacgcagctttnnaaaattccgtgagctgtacgatctttcccgtggttcagaatccgccgccgaactggcctgtaaaaacctgggcgaagtggtgagctttaaaggctatcttggtgatctggcccttatcgtctattccggcaaatacactgacagcgatggtaccgaaaaatatttccttgagcctgatttgctggtcctgggtaacaccaacaataaagggctggtggcctatggtgcgataatggatcaggaagcggtaagaacgggcgcaacacaaaacatgttttacccgaaaaactggattgaggacggcgatccggcgattgagtacgtgcagacacacagtgcaccgcagccggtaccggcagatattcgcaaatttgttaccgtcaaaattggttaacggggggattctatggacactccatacattgagttatttgcaggcagtcagcaggtatccacgacgttggtacattttgccgctgatgctggcgttattcaggaatttaccccgctgatgctggcagacaatggcgagtttaagccgtgggatggtcaggaatctggcaaggctgtttatctgacctcgtaccctgtggacacgtcaaagcagaaatcagcacagtgttacaagacggggatattcaatattgccgccgttaactggcctgagagcgtcgacaccgatgcgaaaaaatgcgccgcctttgcgggttcyggcgtatccgttcagccgctggcccgataagcagggggaacgatggcaacgaatgaaagcatcatgacgctaccgctggcgagtanatttaaagtcgaagcgcgggcaatggctgacagaggtttatcaacctatgaggccgtatatcaactaaacaaactggaagagcaggacaagccgcgcgctgatgcgattatggcgcttcatgagcataaagactatcagccgctgttgcgtgcaatggcaaacgtgccttgtatcgatcttggtacggctaaaagcatccttagcatgaccatagagcaggaacgtccgaaggttgcgccggaacttaccgcagcctttgaaaactttatggacatgcacagcccgcaagccgtatcagctggcatggcatacgatggcagaaaccagggcgatgacggcgacatcgatcgcatactgaaaaccatctgagacaaggccggagaaatccnnnttttttacgggtccttcctggaattatggcccgttacggggcggcgacctcgcggattttcgctatttatgagccttttcagggtggtggtggtggttttgttgtttgatctatctttatgaatgaaaagggaaagatgcaagcaatacaccaacctgaagcagtaattaagttggtgtattaatgaaatctcatctgatgaacaaaaaaaacatggcgaaaagctgccgtgtaagtgcgacagcgttcgacaagtggggagtaactcccgttgagcgtaaaggccgtgaggcgttttatgatgttgccagcgtgatagaaaatagggttaacaatgcaattagccagcttataaacgacaaaggcgagattgacgatgatgaacttttacgagtcaggatcagattactgacagcacaggcagaggcgcaggaacttaaaaacgatcgcgatcgcggtgacgtgattgatactgagttttgcctgtacgcgctttcaaagctggcgagtcagatttcatcaatcatggacagcctcccgcttactatgcaaaggagcttcccacagattacccccgccatgctggacaggcttaaaagggaagtggttaaagcctgtaatgccagtgccagagttgccgacaacctcccacagatactggctgattacttgaaagaaacaaccggaaacgtaccggaaaagttgctacagaagaaaggcgagtaacagacgcgcaattattgaacaaaaatgagaaaggatctgataatggcattttctggctaaaatgcctcgtgtcagatcctttctttttttaatattttcattgttaaacagtctgttacagagaagaagatcggatctgacttttgccggaaaattctcataaacagataaaaaccgcgaggtcgccgccccgtaacgggccataattccaggaaggacccgacgacaccagactatcagagcgatgggggcacaatgacagaagccgaactactgggattaatccgccgcgtcgccggaatcagccagcagcatgacgaacaggccacacagccggacagcgtgaccgctgaaaattatgtgcgtgttgtagcggaagtgatgcgccgtgatggtatagaacttaatggcgttgatatgcgcaacatacggaaccgcgttcttgaaatgctggcctacaatcgccgcgttgaactgtatcgggagaaagaaaaaataacgtaccactggaagaagccggaacnnntgcggcggtaacttgctgatattcccgataacgcaaaattgcgctggctacatccctcacatctgaggactgttaatcagaaggccggaatatattcacaaactacgaaattttcgtagtttaattaatggtcagattaatcgctaacccgctgatattttcggaaacctcaatttgaggaagtcggaagcgtcacccttcatattctgaatggtcat

SEQ ID NO: 250 - DNA, 168 bp, Escherichia coli
  Strain O55:H7
gaccacgcagaccatcaaggcaaccacaacgaacatcgttacggttggagcttttaccccactgggggaaaggtattacgataatcataacacctaccgaacaggtaaaacccaccagcctgattaacagttaaccggaaaaaaaatccggtagccccgttatgggga

SEQ ID NO: 251 - DNA, 8300 bp, Escherichia coli
  Strain O55:H7
  modified_base (8252)..(8252): a, c, g or t
tcgacattaacgcccctcatgaattggtgcgcttccccctggaaagattacccgcctgtatatttcttgtgtctatttgttccacgttgtttcatacagtgcaccgaacggtgtagttaatggtgtagtcaatttgctgtttttagcactttttgcagtgtgggttgtttaattaaatcaatgggttgccttgctgtggtgataaaaggacatatttattcatctttcggcgtagaatgctggcgaccaaaaatcacctccatccgcgcaccgccaagcatgctctctccggcgacgattttaccctcatattgctcggtgatttcgcgggctaccgccagccccacaccttgcccagggcgtaaagtatcaacccgttgaccacggtcgaaaatgacctctcgcttgcttaatggaataccggggccatcatcctcgaccacaatatagagatgctcgtcggtttgccttgcagaaatttcgacaaactcgaggcaatatttacaggcattatccagtacattgcccatcacctcgacaaaatcgttctgctcaccgacaaagctgatctctggcgaaatatcgagagagatattgacccctttgcgttgatacactttgttcagcgccgaggtgagattgtccagcagtggggcgaccggatgcagctcgcggctgagcaatgtcccgccgcgcatactggcacgatgcaggtagtagccaatttgctgtgaaatgcggctgatttgctccagcattaccggttcagcatcactgacgctcatcttttcactacgtagagaacgcagcgtactttgcagcaccgccagtggcgttttcagactatgggtcaggtcggtgagcgttgtacgatatttgtcgtaacgttcgcgttcactttttaacaatcggttcaggtttcgtaccagactggtcagttctcgcgttgtggctggattgagcaattcgcggttatgttcttccagttcgcggacttcttttgccagggcttcgatggggcgtaaactccaccaggcggcgacccacagcagcgggatcactaacagcagattggctgagagcacatagataaaccagctccagaccatataggaactttttagctccaccggaatggtatccaccaccacaatggttaactttggcatccgcgatgttgccgggtagacgtttaccgccaccgagtgggtcatctccgcgtcgtcatcatcttcccgcacttcctgcaactgttgctgtatcgaatgatctccactcagcaagaggctggtatcgttaacatccgcttcaatttcatgaaaaccattcgatttcagccagtcaggctggatcatcttcatcagccagggcacgtcacgttgcgcccataaaagctgcccgttctcatcataaattagcgtcatggtggggctttgcttgtcgatattttcgggtaactcgacatgcaacttattgttttcccacttcgcaagggtatagaacagattgctctcgccacgtaacagccgaaacgtagttttatcgaaactgacgctataaccgatcagcgcgaccattccgtaggcaagcgaaagcaccagtactaccgctgccgttgccaacagaaaacgtacccgcagcgagagcgggaaaaaaagacgcagtaattttttcatcagcgcaattcgaacaaatagccctggccgcgaacggtagtaatcacttcttgcggatattgtgcctgaatttttttgcgcagacgtcccatcagtacatcaatggtatggctttcccgcagctccgcatccggatagagttgtagcattaacgaatctttgctgaccactttgccattattgcgtatcaacgtttccataatggtgtattcgaacgcggtcagtttgatcacttcgtcattaatagataattcacggcgagagagatcaacctgaaacggggggagcgaaatgacctgtgaagccaggccgctattacgccgcattaatgcctgcattcgcgccatcacctcttcaatatgaaacggtttagtcacgtaatcatcagcaccggcacttaatacttcgactttgtcctgccagctttcacgggcggttaataccagaatcggcagtgaaacatcattgctacgccagcggcaaatcagtgacagaccgtcctcgtctggcaatccgagatcgacaatcgcaatatccggtaaatgttcattgagataataatcggcttctttggcatcttctgcatcatcgacctgatgaccagcatcctgaatctgaactttaaggtggtgacgtaacaacgcattgtcttcaacaaccagtacgcgcatttttatttctccctgtcttaattattaaaatagtgtaacgcgattatgtggttatgggggtaaacattaaataaaccagcgggggaggggaggtaaagtgaaaaaataaaaagcggataatcttaataagcaggccggacagcatcgccatccggcactggtacgagtttatttcagctcatcaaccatggtgatggcgcgaccaatgtagttagccggcgtcatcgctttcaggcgggctttctcttcttctggcaacgccagaccgtcgataaactgcttcatgccttcggcgtcaacgcgcttaccgcgagtcagctctttcagcttctcgtacggtttttcgatgccatagcgacgcataactgtctggattggttctgccagcacttcccagttgtgatccagctcatccagcagatggtcacggttcacttccagtttgctcacgcctttcagggtggattgatacgcaatcagcgcataaccgatacccacgccgaggttacgcagcacggtggagtcggtcaggtcacgctgccagcgggaaaccggcagtttgcttgccagatgctgcaataccgcgttggaaaggcccagattcccttcggagttttcgaagtcgatcgggttaactttatgcggcatggtggaagaaccaatctcaccagcaatggttttctgtttgaagtggttaagggcgatataaccccagacgtcacggtcaaagtcgatcagaatggtgttgaagcgcgcaacgcaatcaaacagttcggcaatgtagtcgtgcggttcaatctgggtagtgtatgggttccattgaatacccagcgaggtgacgaactcttcgctgaactgatgccagtcaacttccgggtaagcggcgatgtgggcgttatagttaccgaccgcgccgttgattttgccgaggatctccacctggttaagctggcggtactggcgctccatacggtaggcgacgtttgccatctctttaccgatggttgacggcgtggctggctgaccgtgggtacgggacagcagcgggatatcgcgatactgaacggcgagatctttaatgccatcaattagttgacgccagtacggcaggatcacttcatcacgcgcggttttcagcattaatgcgtgggagaggttattgatatcttccgaagtacaggcaaagtggatgaattcagaaaccgcgtgcagttccgggatctccgccactttttctttcaggaaatactcaaccgctttaacgtcgtggttagtagtacgctcgatggttttgatgcgtgcggcatcttcttcgctgaaattggcgacaattgcatcaaggtaaccgattgcgtcggcagcaaaagcaggaacttccttgatcgctgcgtgcgcggccagtttttgcagccaacgtacttcaacttgtacacggaatttcagcaaaccatattcgctgaaaatcccgcgcagcgcgctgactttatcgccgtagcgtccatcgacaggggaaacggcggtcagtgaggataattccatagatcacaactccggggttaaatgagcaagaatttgttttgcctgagtggtcaggcgattacgagaaaacatcagttgcagacgtccgccgccgacctggtgccagagcacggcggcgcgaatgcctgccagcagggttgcgcgaactttcgcctgcacttgtgggctttgcagtacagcaggggaaccggtgacctgaatgcgcgggccaagcgggctgatcacatcaacatagatagcagccatcgcgctcatcagcgtttcggactgtaaatcgaagtgttcgagctggcgttgcaggccgttgatccggttgcccagagtgtcgagcgcacctttcgctgaggagagtttgcgcttaagcaccatcaggctgagtgtgtagcgggttaattcggcgtttaagccctggcgactgctggcattgagcacgccgagcagggtttccagcccgacgcgcaggttggcttcgctaccgccaaaaaccgccagcgtcgagctggggttcatatcaataatactgttgagtgagacgtgtagcgcatcggcatcacaatgcccctggtgagcgagttgttgcaccaggcgtgccgactgacaaataccggccagggcgagggtgatgtcatagtaattctttgccacgttcactgcttccttgttttaagtaaagataataatcagatcggcagcggcagacgctgctcaataataccgccaccgaggcacacttcaccgttatagaagacggcagactggcccggcgtcacggcggcaacgggctcatcgaaaatcacttcaatgcgatcatcgtccagcgccttgacggtgcaggggatatcggtctggcgatagcgggtttttaccgtgcaacgcatagtaccggtgaatggttcacgatcgacccagtgcagctgctgggcaatcagaccgacagacatcagacgcgggtgttcatggccctgcgcaacaatcagaatgttgttttcgacgtctttatcgaccacataccacggttcttcggtgccttctttggtgccaccgatacccagacctttgcgctgaccgagggtgtgatacatcagcccctgatgctcaccaatttcatcgccatcgactgtaatgattttgcccggttgcgccgggagataacggccaaggaactcgcggaatttacgttcgccaatgaagcaaatgccggtagagtcttttttcttcgcggtgaccagaccaagatcttcagcaatcttacgcacctgcggtttttccagttcgccgaccgggaacaggctttgcgcaatctgctcatggctgagcgtataaaggaagtagctctggtctttattgctgtccagaccacgcagcaggcggctcttgccatcgacatctgcccgacgaacgtaatgaccggtagcgatataatcggcacctaaatcttcggcggcaaattcgaggaaggctttaaatttgatctctttgttgcacagaatatccggattcggcgtgcgaccggctttatattcggcaaggaacagttcgaagacgttgtcccagtactcggcagcaaagttaacggtgtgcagttcaatgccgagcttgtcgcagacagcctgggcatcagccagatccgctgccgctgtgcaatattcctcaccgtcgtcttcttcccagttcttcataaacaggccttcgacctgatatccctgttgttgcaacagccaggcagaaacggaggaatcgacaccgccggacatgccgacgattactttttttgcggtttcagacattggatcactcacgacattgaacttcaaggcggcgtattctatcacgcagccttttagatgacaccctttgtaaaaggccagttaaaatcgccaatcatctccagcggatagcgttgcccgctttgataacaacggatactttccgccaccagcggcgaacgaagatttgacgcctgtaaaatttcttcggcgctgacccaacgacagcagtcgatatcgctgtcatgaggctgggtcgggcatatttgctcaagctcaatggcaaagaggaaacgcaaaaacggcgttttatctggcgcaatccactgatgcatacgaataaagtgttgcggctgcgcgctgatgccggtttcttcccacagctcacgggcggctgcttccactaaggtttcatcggcttccagatgcccggcaggttggttccataaggctttaccattaatcgtctcttcaacgactaaaaatttaccctctgcgtgcactacgcaagcaacggtaacgtgcggtttaaacattgtgcatccttattctgttgcttctcgccattcgccattggcaaggttatccaaagagtaatcacccatcgcatagcgaatcagtcgcagcgtggggaaaccaacatgggcggtcatgcggcgcacctggcgattacgtccttcatataaggtgatcttcagccagctggtgggaatacttttgcgttcacgaattggtgggttccgcggccataaccacgcgggttcgtcaaccagctccgcgcctgcgggcagggtagggccatcatttaaggttacgccattgcgcaaggcttcaagtgcgtcttgtgtgggaataccttccacctgcacataatagatttttccggtgcgtttgcccggctgggttaaacgcgcctgcaacgcgccgttattggtcagcaccagtaacccttcgctatcgcggtcaagacgacctgctgcataaacgccctgaaccgggatgaattcttttaatgttttgcgtccggcttcatcggtgaactgcggaagaacatcgtagggtttattgaacaggatcacacgcgtgggctggttttcaggtttacgcctggtagaacgttgtgagctgaatcgcttaacctggtgatttctaaaagaagttttttgcatggtattttcagagattatgaattgccgcattatagcctaataacgcgcatctttcatgacggcaaacaatagggtagtattgacaagccaattacaaatcattaacaaaaaattgctctaaagcatccgtatcgcaggacgcaaacgcatatgcaacgtggtggcagacgagcaaaccagtagcgctcgaaggagaggtgaatggaaagtaaagtagttgttccggcacaaggcaagaagatcaccctgcaaaacggcaaactcaacgttcctgaaaatccgattatcccttacattgaaggtgatggaatcggtgtagatgtaaccccagccatgctgaaagtggtcgacgctgcagtcgagaaagcctataaaggcgagcgtaaaatctcctggatggaaatttacaccggtgaaaaatccacacaggtttatggtcaggacgtctggctgcctgctgaaacccttgatctgattcgtgaatatcgcgttgccattaaaggcccgctgaccactccggttggtggcggtattcgctctctgaacgttgccctgcgccaggaactggatctctacatctgcctgcgtccggtacgttactatcagggcactccaagcccggttaaacaccctgaactgaccgatatggttatcttccgtgaaaactcggaagacatttatgcgggtatcgaatggaaagctgactctgccgacgccgagaaagtgattaaattcctgcgtgaagagatgggcgtgaagaaaattcgcttcccggaacattgcggtatcggtattaagccgtgttctgaagaaggcaccaaacgtctggttcgtgcagcgatcgaatacgcaattgctaacgatcgtgactctgtgactctggtgcacaaaggcaacatcatgaagttcaccgaaggcgcgtttaaagactggggctacgagctggcgcgtgaagagtttggcggtgaactgatcgacggcggcccgtggctgaaagttaaaaacccgaacaccggcaaagagatcgtcattaaagacgtgattgctgatgcattcctgcaacagatcctgctgcgtccggctgaatatgatgttatcgcctgtatgaacctgaacggtgactacatttctgacgccctggcagcgcaggttggcggtatcggtatcgcccctggcgcaaacatcggtgacgaatgcgccctgtttgaagccacccacggtactgcgccgaaatatgccggtcaggacaaagttaacccaggttctattattctctctgctgagatgatgttacgccatatgggctggactgaagcggctgacctgattgttaaaggtatggaaggcgcaatcaacgccaagaccgtaacctatgacttcgaacgtctgatggaaggcgctaagctgctgaaatgttcagaatttggtgangcgatcatcaagaacatgtaatcactacatgtgttaaatattgaaacg

SEQ ID NO: 252 - DNA, 2912 bp, Escherichia coli
  Strain O55:H7
  modified_base (378)..(379): a, c, g or t
  modified_base (385)..(386): a, c, g or t
  modified_base (1278)..(1278): a, c, g or t
  modified_base (2904)..(2904): a, c, g or t
ctgagatattcaattttccagtgccggatgaggcacaaaaggagcggcgcgtggcagatctcgatgatggttatacgcgcattgcaaatgagttgctggaagctgtgatgctggccggattaacacagcaccagcttctggtcttcctggctgtcatgcgcaaaacatatggctttaataaaaaactggattgggtgagcaacgagcaactttccgaattgaccgggatattgccgcacaagtgttcttctgcaaaaagcgttctggtaaagcgtgggattcttattcagagcgggcggaatatcggcattaataatgtggtcagtgaatggtcaacattacccgaatcaggtaagaaaaataaagtttacctgaaannggtaannttacctgaatcaggtaagaaaagtttacccaaatcaggtaaaggcgtttacccgaatcaggtaaacacaaaagacaaactaacaaaagacaatataaaacctttttcgtccgagaattctggcgaatcctctgaccaaccagaaaacgatcttcctgtggagaaaccagatgctgcaattcagagcggcagcaggtgggggacagcagaagacctgaccgccgcagagtggatgtttgacatggtgaagaccatcgcgccatcagccagaaaaccgaattttgcagggtgggctaacgatatccgcctgatgcgtgaacgtgacggacgtaaccaccgcgacatgtgcgtgctgttccgctgggcatgccaggacaacttctggtccggtaacgtgctaagtccggccaaactccgcgacaagtggacccaactcgaaatcaaccgtaacaagcaacaggctggcgtgacagccggaaaatcaaaactggacctgacaaacactgactggatttatggggtggatttatgaaaaacatcgccgcacagatggttaactttgaccgtgagcagatgcgccggatcgccaataacatgccggaacagtacgacgaaaagccgcaggtacagttggtagcgcagatcatcaacggtgtgttcagccagttactggcaactttcccggcgagcctggctaaccgggaccagaacgaactgaacgaaatccgccgccagtgggttctggctttccgggaaaacgggatcaccacaatggaacaggttaacgcaggaatgcgcgtagcccgtcggcagaatcgaccatttctgccatcacccgggcagtttgttgcatggtgccgggaagaagcatccgttatcgccggactgccaancgtcagcgagctggttgatatggtttacgagtattgccggaagcgaggcctgtatccggatgcagagtcttatccgtggaaatcgaacgcgcactactggctggttaccaacctgtaccagaacatgcgggccaatgcgctgactgacgcggaattacgacgcaaggctgccgatgaactgacctgtatggcagcgcgaattaaccgtggtgagacgatacctgaaccagtaaaacaacttcctgtcatgggcggcagacctctaaatcgtgttcaggcgctggcgaagatcgcagaaattaaagctaagttcggactgaaaggagcaagtgtatgacgggcgaagaggcaattattcattacctggggacgcataatagcttctgtgcgccggacgttgccgcgctaacaggcgcaacagtaaccagcataaatcaggccgcggctaaaatggcacgggcaggtcttctggttatcgaaggtaaggtctggcgaacggtgtattaccggtttgctaccaaggaagaacgggaaggaaaggtgagcacgaatatgatttttaaggagtgtcgccagagtgccgcgatgaaacgggtattgttggtatacacaacttagcatcgaaggcctattgttttcgacaggaggccatcgaaatgacactatggtaccgtctttacccaccgccttctgctaagtttaggaatacaagatgttgctgccgttaaaaaatagtcgtaatttctattagaatttgggcaatataaccagcacatagataagggagtcgttttatgcacgaactatttgtgctggttttgagcacctgtgctagcctcagcaatatgtcaggttgttcagtggacgtagtgaatgtcaacaccacaaaagagccggtaaacgtcttttatagcaggaaagactgcgaagaaagcatgaaaaacattatgctaaatcatgctctataccatgaagtatcaggcagagagccatatatggcaaagtgcgaacaagtatttgtctcaaaaagtttaatgaaataattggccaaaaacgacatataacaaactcttataggagcttaacgtggaagattacttagtttttggtttaggttatgaaggcgatataaagaacgatgaagcagggcttgataagataagcgtggtaacgaaatcggtagtgcgttctaccaattccaatgaaccagtggtttaccaagtgactgagtttaaagaatttaatgttgtgagacatcaagcgtttgatagtgaatactacaacatagcattcgatgtcttaccatcccgcgtccgtattgatgctgcaatccgtaaatatcaccccaagaaatcctcctcagcttagtaagctttgattttccattatcaaccagcaataataatgtcctcggagcctgaacaactccggtgacttctgcgctaaacggggacgtttatgcgcacatacaatccaaactctcttctcccttcactgatgcagaaatgcacctgtggttctttgcatccaacgtttgacctctgcggaggtgaagcgtgaacctcccacaagacggtatcaaattgcatcgcggtaacttcactgctatcggccagcagatccagncttatctg

SEQ ID NO: 253 - DNA, 1235 bp, Escherichia coli
  Strain O55:H7
  modified_base (1057)..(1057): a, c, g or t
  modified_base (1233)..(1233): a, c, g or t
ggaaaatgctttcgcatggtgcttaaaccgtggcgtgagaaacgcagtctttcccagaatgcactcagccacatgtggtacagcgaaatcagtgaatacctcatcagcagggggaaatcgttcgctacttcagcatgggtaaaagatgctctcaaacacacatacctcggttatgaaaccaaggacctggttgatgtcgtaaccggcgaaatcactactatccagtcgttacgccatacctccgatcttggtaccggagagatgtatgtcttcctgtgtaaggttgaagcctgggcgatgaatattggctgccacctgactattccacagagctgcgagttccagctgctgcgcgacaagcaggaggcgtaatggctacaccgcttattcgtgtcatgaacggacacatctacaaagtaccaaatcgtcgtaagcgtaaacctgagctgaagccatccgaaataccaacactgctcggatataccgccagcctggttgataaaaaatggttgcgactggcagcaaggaggaatcatggctgatttgagaaaagcagcgcgtagtcgggaatgccaagtaagaatccctggcgtatgtaatggcaaccctgaaacgtctgtactggcacatatccggctgactggattgtgcggcaccggtaccaaaccgccagacttgattgccaccattgcatgttctgcctgccacgacgaaatcgaccgccgcacacattttgtcgatgctgcatatgcaaaagaatgcgcgctggaaggtatggcgagaacacaggttatctggctgaaagagggggttattaaggcgtgaatacctacagcatcacattaccttggcctccgagcaataatcgctactaccggcataatcgcgggcgcacgcacatcagcgcagaagggcaggcataccgtgataacgtcgcccgaatcatcaaaggctccatgctggatatcggcctggctatgccagtgaaaatccgtattgagtgccacatgccggatcgccgtcgccgtgacctggataatctgcaaaaagccgcttntgacgcactcaccaaagcaggtttctggctggatgatgcacaggtcgttgattaccgtgttgtgaagatgcccgttaccaaaggtgggaagctggagctgaccatcaccgaactggggaatgaatgatgtttgagtcttatatggcagaacgtcttcgccaccgctggatgcgccngc

SEQ ID NO: 254 - DNA, 4471 bp, Escherichia coli
  Strain O55:H7
  modified_base (2461)..(2461): a, c, g or t
  modified_base (4412)..(4415): a, c, g or t
  modified_base (4467)..(4467): a, c, g or t
cgttttcctggttctgttttgaccgattaccggatactgaagaattacgccaaaacactgaaaggagctgccgcatgaatacccaatatttacagtatgtccgcgagcaactcattgtggctaccgctgatttgagcggagcaacgaaaggacagcttgaagcctggctggagcatgcacaatttgatactggtacatacaaacgaaagaagccgcgcattctggatgaggtaactggcaggatgattacgctggataatccgccgatttccggtaagcagtcgtacgcaaaaggttcatccattgcactggtcagccaggttgagttctcaacctcgtcatggcgccgcgcggttctgtctctcgaagaacatcagaaagcgtggttgctgtggagttacagcgaaagtgttcgctgggaacatcaggtcaccataacgcagtgggcatggagcgagtttaagactctgttgggtaccaggaaaattgcaggtaagacactggaacgtttgaagaagttgatctggctggcggcacaggatgtgaagaacgagctggcagggggtaagacctatgaataccaggagctggcatcactggtgggagtgacatcaaaaaactggtctgagacatttactgaacgctgggttgcaatgaaacacatttttctacagcttgatagccaagctttattgcttttaacgaaaacacgttcaaaacaaaagaccacattttcacagcaagatattgcaaaactggattaaaaatcatatattttatgtaaatctgatattttgccaatgttgtacgcactggcagtaatccaaattcaagcccgaggtttaaagccttgggcttttctgtttctgaacggtgagtagccttccaacctaccccagccagggggtcttcagctgttgagttgatattgcttagccctctgttgccagctacatgctggcttttttattctaggcttgtggggagcatcaactccgtgctttgtcgttaaattaccccgtgagcctgatttctgacatttaacgtcccggccttttgtcggcggcgaaacattggctattcatatgcacgaaaaagagagccttgccggagcgttctggctcgttttgctgatcatcgcaggttggggcggtctggtccgctacctgatagatgtgaagcagagtaaagcaacgtggagttggataaatgctctggctcaaatagtggtatcaggattcaccggtgttattggtggcctgatcagcatcgaaagtggattcagtatttacatgattctcgcgacagcggggattagtggtgcgatgggttcggttgcactgacgtacttctgggaacgactgacaggggtgaaaaatgcaaaatcttaatcctcagcgtaaagccttcctcgatatgttggcgtggtcagaaggaacggataacgggcgacaaccgacacgtaaccacggttatgatgttattgttggcggcgaactgtttactgattactccgatcaccctcgcaaacttgtcacgctacaccccaaactcaaatcaacagccgccggacgttatcagcttctttcacgctggtgggatgcttaccgtaaacagcttggtttgaaagacttctcccccaaaagccaggacgcagtggcattgcagcagattaaagagcgtggtgctttacctatgattgatcgcggtgatatccgtcaggcaatcgaccgttgcagtaatatctgggcttcactgccgggcgctggttatggtcagttcgagcataaggctgacagcctgattgcaaaattcaaagaagctggcggaacggtcagagagagtgaggtatgagcagaataaccgcgattatctccgctctgctcatctgcatcatcgtctgcctgtcatgggctgttaatcattaccgtgataacgccattacctacaaagcccagcgcgacaaaaatgccagagaactgaagctggcgaacgtggcaattactgacatgcagatgcgtcagcgtgatgttgctgcgctcgatgcaaaatacacgaaggagttagctgatgcgaaagctgaaaatgatgctctgcgtgatgatgttgccgctggtcgtcgtcggttgcacatcaaagcagtctgtcagtcagtgcgtgaagccaccaccgcctccggcgtggataatgcagcctccccccgactggcagacaccgctgaacgggattatttcacccttagagagaggctgatcactatgcaaaaacaactggaaggaacccagaagtatattaatgagcagtgcagatagagctgcccatatcgatgggcagctcatgcaattattgtgagcaatacacacgcgcttccagcggagtataaatgcctaaagtaataaaaccgagcaatccatttacgaatgtttgctgggtttctgttttaacaacattttctgcgccnccacaaattttagctgcatcgacagttttcttctgcccaattccagagacgaagaaatggtgggtgatggtttcctttggtgttactgctgccggtttgttttgaacagtaaacgtctgttgggcacatcctgtaataagcagggccagcgcagtagcgagtagcatttttttcatggtgttattcccgatgctttttaaagttcgcagaatcgtatgtgtagaaaattaaacaaaccctaaacaatgagttgaaatctcatattgttaatatttattaatgtatgtcagatgcgaaggatcgtcactgtattcccggattaactatgtccgcagccctgacagggaaactcctctgcgggagtgtccgggaataattaataacgatgcacacagggtttagcgcgtacacgtattgcattatgccaacgccccggtgctgacacggaagaaaccggacgttatgatttagcgtggaaagatttgtgtagtgtactgaatgctctcagtaaatagtaatgaattatcaaaggcatagtaatatcttttatgttcgtggatatttgtaacccatcggaaaactcctgctttagcaagattttccctgtattgctgaaatgtgatttctcttgatttcaacctatcataggacgtttctataagatgcgtatttcttgagaatttaacatttacaacctttttaagtccttttattaacacagtgttatcgttttctaacacaatgtgaatattatctgtggctagatagtaaatataatgtgagacattgtgacgttttagttcagaataaaacaattcacagtttaaatcttttcgcacttgatcgaatatttctttaaaaatggcaacctgagccattggtaaaaccttccatgtgatacgagggcgcgtagtttgcattatcgtttttatcgtttcaatctggtctgacctctttgtgttttgttgatgatttatgtcaaatattaggaatgttttcaattaatagtattggttgcgtaacaaagtgcggtcctgctggcattctggagggaaatacaaccgacagatgtatgtaaggccaacgtgctcaaatcttcatacagaaagatttgaagtaatattttaaccgctagatgaagagcaagcgcatggagcgacaaaatgaataaagaacaatctgctgatgatccctccgtggatctgattcgtgtaaaaaatatgcttaatagcaccatttctatgagttaccctgatgttgtaattgcatgtatagaacataaggtgtctctggaagcattcagggcaattgaggcagcgttggtgaagcacgataataatatgaaggattattccctggtggttgactgatcaccataactgctaatcattcaaactacttaacctgtgacagagccaacacgcagtctgtcactgtcaggaaagtggtaaaactgcaactcaattactgcaatgccctcgtaattaagtgaatttacaatatcgtcctgttcggagggaagaacgcgggatgttcattcttcatcacttttaattgatgtatatgctctcttttctgacgttagcctccgacggcaggcttcaatgacccaggctgagaaatttccggaccctttttgatcaagagcgatgttaatttgttcaatcatttggttaggaaagcggatgttgcgggttgttgttctgcgggttctgttcttcgttgacatgaggttgccccgtattcagtgtcgctgatttgtattgtctgaagttgtttttacgttaagttgatgcggatcaattaatacgatacctgcgtcataattgattatttgacgtggtttgatggcgtagatgcacgttgtgacatgtagatgataattattatcattttacgggtcctttccggcgatccgacaggttacggggcggcgacctcgcgggttttnnnnatttatgaaaattttccggtttaaggcgtttccgttcttcttcgttataacntaat

SEQ ID NO: 255 - DNA, 5935 bp, Escherichia coli
  Strain O55:H7
  modified_base (5)..(5): a, c, g or t
  modified_base (121)..(124): a, c, g or t
  modified_base (1777)..(1777): a, c, g or t
  modified_base (1789)..(1789): a, c, g or t
  modified_base (1831)..(1831): a, c, g or t
  modified_base (1888)..(1888): a, c, g or t
  modified_base (2032)..(2032): a, c, g or t
  modified_base (2056)..(2056): a, c, g or t
  modified_base (2630)..(2633): a, c, g or t
  modified_base (2676)..(2676): a, c, g or t
  modified_base (3704)..(3707): a, c, g or t
  modified_base (5198)..(5198): a, c, g or t
  modified_base (5454)..(5454): a, c, g or t
  modified_base (5536)..(5536): a, c, g or t
  modified_base (5574)..(5574): a, c, g or t
aaaanaccctctgaaaagaaaggaaacgacaggtgctgaaagcgagctttttggcctctgtcgtttcctttctctgtttttgtccgtggaatgaacaatggaagtcaacaaaaagcagctnnnngacattttcggtgcgagtatccgtaccattcagaactggcaggaacagggaatgcccgttctgcgaggcggtggcaagggtatgaggtgctttatgactctgccgccgtcataaaatggtatgccgaaagggatgctgaaattgagaacgaaaagctgcgccgggaggttgaagaactgcggcaggccagcgaggcagatctccagccaggaactattgagtacgaacgccatcgacttacgcgtgcgcaggccgacgcacaggaactgaagaatgccagagactccgctgaagtggtggaaaccgcattctgtactttcgtgttgtcgcggatcgcaggtgaaattgccagtattctcgacgggctccccctgtcggtgcagcggcgttttccggaactggaaaaccgacatgttgatttcctgaaacgggatatcatcaaagccatgaacaaagcagccgcgctggatgaactgataccggggttgctgagtgaatatatcgaacagtcaggttaacaggctgcggcattttgtccgcgccgggcttcgctcactgttcaggccggagccacagaccgccgttgaatgggcggatgctaattactatctcccgaaagaatccgcataccaggaagggcgctgggaaacactgccctttcagcgggccatcatgaatgcgatgggcagcgactacatccgtgaggtgaatgtggtgaagtctgcccgtgtcggttattccaaaatgctgctgggtgtttatgcctactttatagagcataagcagcgcaacacccttatctggttgccgacggatggtgatgccgagaactttatgaaaacccacgttgagccgactattcgtgatattccgtcgctgctggcgctggccccgtggtatggcaaaaagcaccgggataacacgctcaccatgaagcgtttcactaatgggtgtggcttctggtgcctgggcggtaaagcggcaaaaaactaccgtgaaaagtcggtggatgtggcgggttatgatgaacttgctgcttttgatgatgatattgaacaggaaggctctccgacgttcctgggtgacaagcgtattgaaggctcggtctggccaaagtccatccgtggctccacgccaaaagtgagaggcacctgtcagattgagcgtgcagccagtgaatccccgcattttatgcgttttcatgttgcctgcccgcattgcggggaggagcagtatcttaaatttggcgacaaagagacgccgtttggcctcaaatggacgccggatgacccctccagcgtgttttatctctgcgagcataatgcctgcgtcatccgccagcaggagctggactttactgatgcccgttatatctgcgaaaagaccgggatctggacccgtgatggcattctctggttttcgtcatccggtgaagagattgagccacctgacagtgtgacctttcacatctggacagcgtacagcccgttcaccacctgggtgcagattgtcaaagactggatgaaaacgaaaggggatacgggaaaacgtaaaaccttcgtaaacaccacgctcggtgagacgtgggaggcgaaaattggcgaacgtccggatgctgaagtgatggcagagcggaaagagcattattcagcncccgttcctgancgtgtggcttacctgaccgccggtatcgactcccagctggancgctacgaaatgcgcgtatggggatgggggccgggtgaggaaagctggctgattgancggcagattattatgggccgccacgatgatgaacagacgctgctgcgtgtggatgaggccatcaataaaacctatatccgccggaatggtgcagaaatgtcggtatcccgtatctgctgggatattggcgggattgacccgacnattgtgtatgaacgctcgaaaaancatgggctgttccgggtgatccccattaaaggggcatccgtctacggaaagcctgtggccagcatgccacgtaagcgaaacaaaaacggggtttaccttaccgaaattggtacggataccgcgaaagagcagatttataaccgcttcacactgacgccggaaggggatgaaccgcttcccggtgccgttcacttcccgaataacccggatatttttgatctgaccgaagcgcagcagctgactgctgaagagcaggtcgaaaaatgggtggatggcaggaaaaaaatactgtgggacagcaaaaagcgacgcaatgaggcgctcgactgcttcgtttatgcgctggcggcgctgcgcatcagtatttcccgctggcagctggatctcagtgcgctgctggcgagcctgcaggaagaggatggtgcagcaaccaacaagaaaacactggcagattacgcccgtgccttatccggagaggatgaatgacgcgacaggaagaacttgccgctgcccgtgcggcactgcatgacctgatgacaggtaaacgggtggcaacagtacagaaagacggacnnnnggtggagtttacggccacttccgtgtctgacctgaaaaaatanattgcagagctggaagtgcagaccggcatgacacagcgacgcaggggacctgcaggattttatgtatgaaaacgcccaccattcccacccttctggggccggacggcatgacatcgctgcgcgaatatgccggttatcacggcggtggcagcggatttggagggcagttgcggtcgtggaacccaccgagtgaaagtgtggatgcagccctgttgcccaactttacccgtggcaatgcccgcgcagacgatctggtacgcaataacggctatgccgccaacgccatccagctgcatcaggatcatatcgtcgggtcttttttccggctcagtcatcgcccaagctggcgctatctgggcatcggggaggaagaagcccgtgccttttcccgcgaggttgaagcggcatggaaagagtttgccgaggatgactgctgctgcattgacgttgagcgaaaacgcacgtttaccatgatgattcgggaaggtgtggccatgcacgcctttaacggtgaactgttcgttcaggccacctgggataccagttcgtcgcggcttttccggacacagttccggatggtcagcccgaagcgcatcagcaacccgaacaataccggcgacagccggaactgccgtgccggtgtgcagattaatgacagcggtgcggcgctgggatattacgtcagcgaggacgggtatcctggctggatgccgcagaaatggacatggataccccgtgagttacccggcgggcgcgcctcgttcattcacgtttttgaacccgtggaggacgggcagactcgcggtgcaaatgtgttttacagcgtgatggagcagatgaagatgctcgacacgctgcagaacacgcagctgcagagcgccattgtgaaggcgatgtatgccgccaccattgagagtgagctggatacgcagtcagcgatggattttattctgggcgcgaacagtcaggagcagcgggaaaggctgaccggctggattggtgaaattgccgcgtattacgccgcagcnnnngtccggctgggaggcgcaaaagtaccgcacctgatgccgggtgactcactgaacctgcagacggctcaggatacggataacggctactccgtgtttgagcagtcactgttgcggtatatcgctgccgggctgggtgtctcgtatgagcagctttcccggaattacgcccagatgagctactccacggcacgggccagtgcgaacgagtcgtgggcgtactttatggggcggcgaaaattcgtcgcatcccgtcaggcgagccagatgtttctgtgctggctggaagaggccatcgttcgccgcgtggtgacgttaccttcaaaagcgcgcttcagctttcaggaagcccgcagtgcttgggggaactgcgactggataggctccggtcgtatggccatcgatggtctgaaagaagttcaggaagcggtgatgctgatagaagccggactgagcacctacgagaaagagtgcgcgaaacgcggtgacgactatcaggaaatttttgcccagcaggtccgtgaaacgatggagcgccgtgcagccggtcttaaaccgcccgcctgggcggctgcggcatttgaatccggactgcgacaatcaacagaggaggagaagagtgacagcagagctgcgtaatctcccgcatattgccagcatggcttttaatgagccgctgatgcttgaacccgcctatgcgcgggttttcttttgtgcgcttgcaggccagcttgggatcagccgcctgacggatgcagtatccggcgacagcctgactgccggagaggcacccgcggcgctggcgttatccggtgatgatgacggaccacgacaggcccgcagttatcaggtcatgaacggcatcgccgtgctgccggtgtccggtacgctggtcagccggacgcgggcgctgcagccgtattcgggaatgaccggttacaacggcattatcgcccgtctgcaacaggctgccagcgatccgatggtggacggcattctgctggatatggacacaccgggcgggatggtggcgggagcatttgactgtgctgacatcatcgcccgtgtgcgagacataaaaccggtatgggcgctggccaacgacatgaactgcagtgcaggtcagctgcttgccagcgccgcctcccggcgtctggtcacgcagaccgcccggacaggctccattggcgtcatgatggctcacagtaattacggtgctgcgctggagaaacagggcgtggaaatcacgctgatttacagcggcagccataaggtggatggcaacccctacagccatctaccggatgatgtccgggaaacactgcagtcccggatggatgcaacccgccggatgtttgcacagaaggtgtcggcatataccggcctgtccgtgcaggctgtgctggataccgaggctgcagtgtacagcggtcaggaggccattgatgccggactggctgatgaacttgtgaacagtaccgatgcgatcaccgncatgcgtgatgcactggatgcacgtaaatcccgtctctcaggagggcgaatgaccaaagagactcaatcaacaactgtttcagccactgcttcgcaggctgacgttactggcgtggtgcaagcgacggagggcgagaacgccagcgcggcgcagccggacgtgaacgcgcagatcaccgcagcggttgcggcagaaaacagtcgcattatggggatcctcaactgtgaggaggctcacggacgcgaagaacaggcncgcgtgctggccgaaacccccggtatgaccgtggaaacggcccgccgcattctggccgcagcaccacagagtgcacaggcgngcagtgacactgcgctggatcgtctgatgcagggggcnccggcaccgctggttgcaggtaacccggcatctgatgccgttaacgatttgctgaacacaccagtgtaagggatgtttatgacgagcaaagaaacctttacccattaccagccgctgggcaacagtgacccggctcataccgcaaccgcgcccggcggattgagtgcgaaagcgcctgcaatgaccccgctgatgctggacacctccacccgtaagctggttgcgtgggatggcaccaccgacggtgctgccgttggcattcttgcagttgctgctgaccagaccagcaccacactgacgttctacaagtccggcacgttccgttatgaggatgtgctctggccggaggctgccagcgacg

SEQ ID NO: 256 - DNA, 975 bp, Escherichia coli
  Strain O55:H7
  modified_base (48)..(48): a, c, g or t
  modified_base (50)..(50): a, c, g or t
gaaaaaacggaccgcgtttgccggaacggcaatcagcatcgtttaacntnacccttcatcactaaaggccgcctgtgcggctttttttacgggatttttttatgtcgatgtacacaaccgcccagctgctggcggcaaatgagcagaaatttaagtttgatccgctgtttctgcgtctctttttccgtgagagctatcccttcactacggagaaagtctatctctcacaaattccgggactggtaaacatggcgctgtacgtttcgccgattgtttccggtgaggttatccgttcccgtggcggctccacctctgaatttacgccgggatatgtcaaacccaagcatgaagtgaatccgcagatgaccctgcgtcgcctgccggatgaagatccgcagaatctggcggacccggcttaccgccgccgtcgcatcatcatgcagaacatgcgtgacgaagagctggccattgctcaggtcgaagagatgcaggcagtttctgccgtgctcaagggcaaatacaccatgaccggtgaagccttcgatccggttgaggtggatatgggccgcagtgcggcgaacaacatcacgcagtccggcggcacggagtggagcaagcgtgacaagtccacgtatgacccgaccgacgatatcgaagcctacgcgctgaacgccagcggcgtggtgaatatcatcgtgtttgacccgaaaggctgggcgctgttccgttccttcaaagccgtcagggagaagctggatacccgtcgcggctctcattccgaactggagacagcggtaaaagacctgggcaaagcggtgtcttataagggaatgtatggcgatgtggccatcgtcgtgtattccggacagtacgtggaaaacggcgtcaaaaagaacttcctgccggacaacacgatggtgctgggtaacactcatgcacgcggtctgcgcacctatggctgtattcaggatgcgg

SEQ ID NO: 257 - DNA, 102 bp, Escherichia coli
  Strain O55:H7
ccggcgcgagagttcaccatgattcagtcagcaccgctgatgctgctggctgatcctgatgagttcgtgtccgttcaactggcgtaatcatggcccttaggg

SEQ ID NO: 258 - DNA, 146 bp, Escherichia coli
  Strain O55:H7
tggaggagtccatgaagaaagatgaactgattgcccgtctccggtcgctgggtgagcaactgaaccgtgatgtcagcctgacggggacgaaagaagaactggcgctccgtgtggcagagctggaagaggagcttgatgacacggat

SEQ ID NO: 259 - DNA, 33 bp, Escherichia coli
  Strain O55:H7
tgcgctgaccggacatgaaaatgaggtggtatc

SEQ ID NO: 260 - DNA, 577 bp, Escherichia coli
  Strain O55:H7
  modified_base (365)..(365): a, c, g or t
  modified_base (491)..(491): a, c, g or t
  modified_base (493)..(494): a, c, g or t
  modified_base (499)..(499): a, c, g or t
acgctgcataccgatgcacttcacgccacgcgggatgaacctgtggcatttgtgctgccgggaacggcgtttcgtgtctctgccggtgtggcagccgaaatgacagagcgcggcctggccagaatgcaataacgggaggcgctgtggctgatttcgataacctgttcgatgctgccattgtccgcgccgatgaaacgatacgcgggtacatgggaacgtcagccaccatgacatccggtgagcagtccggcgcagtaatacgtggtgtttttgatgaccctgaaaatatcagctatgccggacagggcgtgcgcgttgaaggctccagcccgtccctgtttgtccggactgatgatgtgcggcanctgyggcgtggagacacgctgaccatcggtgaggaaaacttctggatagaccgggtttcgccggatgatggtggaagctgtcatctctggcttgggcggggcgtaccgcctgccgttaaccgtcgncnntgaangggggatgtatggccataaaaggtcttgagcaggccattgaaaacctcagccgtatcagcaaaacggcggtgcctggt

SEQ ID NO: 261 - DNA, 63 bp, Escherichia coli
  Strain O55:H7
ggccattaaccgcgttgcttcatccgcgatatcgcagtcggcgtcacaggttgcccgtgagac

SEQ ID NO: 262 - DNA, 38 bp, Escherichia coli
  Strain O55:H7
  modified_base (31)..(31): a, c, g or t
acgccggaaactggtaaaggaaagggccagnctgaaaa

SEQ ID NO: 263 - DNA, 76 bp, Escherichia coli
  Strain O55:H7
atccgcaggccagaatcaaagttaaccggggggatttgcccgtaatcaagctgggtaatgcgcgggttgtcctttc

SEQ ID NO: 264 - DNA, 695 bp, Escherichia coli
  Strain O55:H7
  modified_base (205)..(205): a, c, g or t
  modified_base (336)..(336): a, c, g or t
  modified_base (546)..(546): a, c, g or t
  modified_base (690)..(690): a, c, g or t
gcgtcgtaaaaaggggcagcgttcatccctgaaaggtggcggcagcgtgcttgtggtgggtaaccgtcgtattcccggcgcgtttattcagcaactgaaaaatggccggtggcatgtcatgcagcgtgtggccgggaaaaaccgttaccccattgatgtggtgaaaatcccgatggcggtgccgctgaccacggcgtttaaacanaatattgagcggatacggcgtgaacgtcttccgaaagagctgggctatgcgctgcagcatcaactgaggatggtaataaagcgatgaaacatactgaactccgtgcagccgtactggatgcactggagaancatgacaccggggcgacgttttttgatggtcgccccgctgtttttgatgaggcggattttccggcagttgccgtttatctcaccggcgctgaatacacgggcgaagagctggacagcgatacctggcaggcggagctgcatatcgaagttttcctgcctgctcaggtgccggattcagagctggatgcgtggatggagtcccggatttanccggtgatgagcgatatcccggcactgtcagatttgatcaccagtatggtggccagcggctatgactaccggcgcgacgatgatgcgggcctgtggagttcagccgatctgacttatgtcattacctatgaaatgtgaggacgntatgc

SEQ ID NO: 265 - DNA, 66 bp, Escherichia coli
  Strain O55:H7
  modified_base (9)..(12): a, c, g or t
  modified_base (59)..(59): a, c, g or t
  modified_base (63)..(63): a, c, g or t
ccaaatccnnnngcaccggtgaaaggtgccgggaccaccctgtgggtttataaggggancggngac

SEQ ID NO: 266 - DNA, 830 bp, Escherichia coli
  Strain O55:H7
  modified_base (9)..(10): a, c, g or t
  modified_base (123)..(123): a, c, g or t
  modified_base (457)..(460): a, c, g or t
  modified_base (462)..(464): a, c, g or t
  modified_base (479)..(479): a, c, g or t
  modified_base (560)..(562): a, c, g or t
  modified_base (741)..(741): a, c, g or t
ctttcagannatgactggtcgcgtctggcaaaagttaaagacctgacgcccggcgaactgaccgctgagtcctatgacgacagctatctcgatgatgaagatgcagactggactgcgaccggncaggggcagaaatcygccggagataccagcttcacgctggcgtggatgcccggagagcaggggcagcaggcgctgctggcgtggtttaatgaaggcgatacccgtgcctataaaatccgcttcccgaacggcacggtcgatgtgttccgtggctgggtcagcagtatcggtaaggcggtgacggcgaaggaagtgatcacccgcacggtgaaagtcaccaatgtgggacgtccgtcgatggcagaagatcgcagcacggtaacagcggcaaccggcatgaccgtgacgcctgccagcacctcggtggtgaaagggcagagcaccacgctgaccnnnncnnnccagccggagggcgnaaccgacaagagctttcgtgcggtgtctgcggataaaacaaaagccaccgtgtcggtcagtggtatgaccatcaccgtgannngtgttgctgcaggcaaggtcaacattccggttgtatccggtaatggtgagtttgctgcggttgcagaaatcaacgtcaccgccagttaatccggagagtcagcgatgttcctgaaaaccgaatcatttgaacataacggtgtgaccgtcacgctttctgaactgtcagccctgcagcgnattgagcatctcgccctgatgaaacggcaggcagaacaggcggagtcagacagcaaccggaagtttactgtggaagacgccatcagaac

SEQ ID NO: 267 - DNA, 190 bp, Escherichia coli
  Strain O55:H7
  modified_base (116)..(116): a, c, g or t
  modified_base (182)..(182): a, c, g or t
gatgtccctgtggcataaccatccgcagaagacgcagatgccgtccatgaatgaagccgttaaacagattgagcaggaagtgcttaccacctggcccacggaggcaatttctcatnctgaaaacgtggtgtaccggctgtctggtatgtatgagtttgtggtgaataatgcccctgaacagncagaggac

SEQ ID NO: 268 - DNA, 130 bp, Escherichia coli
  Strain O55:H7
ctgtttctgcgggaaagtgttcgacggtgagctgagttttgccctgaaactggcgcgtgagatggggcgacccgactggcgtgccatgcttgccgggatgtcatccacggagtatgccgactggcaccgc

SEQ ID NO: 269 - DNA, 778 bp, Escherichia coli
  Strain O55:H7
  modified_base (90)..(90): a, c, g or t
  modified_base (211)..(213): a, c, g or t
  modified_base (220)..(221): a, c, g or t
  modified_base (227)..(227): a, c, g or t
  modified_base (453)..(453): a, c, g or t
  modified_base (508)..(508): a, c, g or t
  modified_base (537)..(539): a, c, g or t
  modified_base (541)..(542): a, c, g or t
  modified_base (601)..(601): a, c, g or t
  modified_base (676)..(679): a, c, g or t
agtacccattattttcatgatgttctgctggatatgcacttttccgggctgacgtacaccgtgctcagcctgtttttcagcgatccgganatgcatccgctggatttcagtttgctgaaccggcgtgaggctgacgaagagcctgaagatgatgtgctgatgcagaaagcggcagggcttgccggaggcgttcgttttggcccggacgggnnngaagttnnccccgnttccccggatgtggcggacatgacggaggatgacgtaatgctgatgacagtatcagaagggatcgcaggaggagtccggtatggctgaaccggtaggcgatctggtcgttgatttaagtctggatgcggccagatttgacgagcagatggccagagtcaggcgtcatttttccggtacggaaagtgatgcgaaaaaaacagcggcagtcgttgaacagtcgctganccgacaggcactggctgcacagaaagcggggatttccgtcgggcagtataaagcngccatgcgtatgctgcctgcgcagttcannnanntggccacgcagcttgcaggcgggcaaagtccgtggctgatcctgctgcaacagggtggncaggtgaaggactccttcggcgggatgatccccatgttcagggggcttgccggtgcgatyrccctgccgatggtnnnngccacctcgctggcggtggcgaccggtgcgctggcgtatgcctggtatcagggcaactcaaccctgtccgatttcaacaaaacgctggtcctttccggc

SEQ ID NO: 270 - DNA, 622 bp, Escherichia coli
  Strain O55:H7
  modified_base (4)..(4): a, c, g or t
  modified_base (7)..(7): a, c, g or t
  modified_base (271)..(271): a, c, g or t
  modified_base (306)..(306): a, c, g or t
  modified_base (316)..(316): a, c, g or t
  modified_base (337)..(337): a, c, g or t
  modified_base (352)..(352): a, c, g or t
  modified_base (391)..(391): a, c, g or t
  modified_base (423)..(423): a, c, g or t
  modified_base (430)..(430): a, c, g or t
ggcnggnctgacggcagatcgtatgctggtcctgtccagagccgggcaggcggcagggctgacgtttaaccagaccagcgagtcactcagcgcactggttaaggcgggagtaagcggtgaggctcagattgcatccatcagccagagtgtggcgcgtttctcctctgcatccggcgtggaggtggacaaggtygctgaagccttcgggaagctgaccacagacccgacgtcagggctgacagcgatggcacgccagttccataacgtgacngcggagcagattgcgtatgttgctcagttgcagcnttccggcgangaagccggggcattgcaggcngcgaacgaggccgcnacgaaagggtttgatgaccagacccgccgcctgaaaganaacatgggtacgctggagacctgggcagacangacagcncgggcattcaaatccatgtgggatgcggtgctggatactggtcgtcctgataccgcgcaggagatgctgattaaggcagaggctgcgtttaagaaagcggacgacatctggagtctgcgcaaggatgattatttcgttaacgatgaagcgcaggcgcgttactgggatgatcgtgaaaaggcccgtcttgcg

SEQ ID NO: 271 - DNA, 224 bp, Escherichia coli
  Strain O55:H7
  modified_base (45)..(45): a, c, g or t
  modified_base (96)..(96): a, c, g or t
  modified_base (117)..(117): a, c, g or t
  modified_base (168)..(168): a, c, g or t
  modified_base (180)..(180): a, c, g or t
aagaaggctgaacagcagagtcaacaggacaaaaatgcgcagcancagagcgatactgaagcgtcacggctgaaatataccgaagaggcgcagaangcttacgaacgtctgcagacnccgctggagaaatataccgcccgtcaggaagaactgaacaaggcactgaangacgggaaaatnctgcaggcagattacaacacgctgatggcggcggcgaaaaagga

SEQ ID NO: 272 - DNA, 39 bp, Escherichia coli
  Strain O55:H7
agccgggataaagtgattagtgaggacggtgagctgatc

SEQ ID NO: 273 - DNA, 76 bp, Escherichia coli
  Strain O55:H7
  modified_base (3)..(6): a, c, g or t
  modified_base (15)..(16): a, c, g or t
ctnnnncggaatccnnatcttgctgagcgggaagacctcgtgcagggggaactgccgttttctgtgtccgtgctga

SEQ ID NO: 274 - DNA, 34 bp, Escherichia coli
  Strain O55:H7
tgacacagatgataagtgttctgaagccggtgtt

SEQ ID NO: 275 - DNA, 44 bp, Escherichia coli
  Strain O55:H7
  modified_base (3)..(5): a, c, g or t
  modified_base (11)..(12): a, c, g or t
  modified_base (42)..(43): a, c, g or t
ggnnnattcanncggatatccgtggcaggagcagccgggagnng

SEQ ID NO: 276 - DNA, 113 bp, Escherichia coli
  Strain O55:H7
  modified_base (10)..(11): a, c, g or t
  modified_base (15)..(18): a, c, g or t
cgcaggcggnnatcnnnntctgggtgcgcggtcagtccggccgggaaatcacggcagcgtcacgacttcatgtgctgagtggtccatggcgtgaccggatcctgaacgttgtc

SEQ ID NO: 277 - DNA, 17 bp, Escherichia coli
  Strain O55:H7
  modified_base (3)..(3): a, c, g or t
gcncgtgccggatgcga

SEQ ID NO: 278 - DNA, 30 bp, Escherichia coli
  Strain O55:H7
ggcgtctggaaattctctgtcggctgggag

SEQ ID NO: 279 - DNA, 23 bp, Escherichia coli
  Strain O55:H7
aaaccctgctggatttttcgggg

SEQ ID NO: 280 - DNA, 51 bp, Escherichia coli
  Strain O55:H7
  modified_base (5)..(5): a, c, g or t
tcagncgcgatttgcagcttctgagtggtgcggaaaataaccgggtgctgc

SEQ ID NO: 281 - DNA, 50 bp, Escherichia coli
  Strain O55:H7
  modified_base (2)..(3): a, c, g or t
cnncgatggcgggatggaatccggtgtccatatccgtggtgttaatccgg

SEQ ID NO: 282 - DNA, 97 bp, Escherichia coli
  Strain O55:H7
  modified_base (27)..(27): a, c, g or t
gaatatgccaccgcacccgtttgtgcncccggcgtttgatgtgcgcagtgaacaggcagctcaggtggcgattgcgcggatgaaccgggccattgat

SEQ ID NO: 283 - DNA, 38 bp, Escherichia coli
  Strain O55:H7
  modified_base (3)..(3): a, c, g or t
ggnggatttgtatccttatctggcgcatcttgccggcg

SEQ ID NO: 284 - DNA, 36 bp, Escherichia coli
  Strain O55:H7
tttatgccgggactgtgacgcaggcgcgtcagatac

SEQ ID NO: 285 - DNA, 26 bp, Escherichia coli
  Strain O55:H7
ggagtttcaggtcacggtgtgacttt

SEQ ID NO: 286 - DNA, 23 bp, Escherichia coli
  Strain O55:H7
ctgctttgtatgaacgctcacag

SEQ ID NO: 287 - DNA, 35 bp, Escherichia coli
  Strain O55:H7
  modified_base (10)..(13): a, c, g or t
agttcctggnnnnagtgcgtcagcacacctggtca

SEQ ID NO: 288 - DNA, 23 bp, Escherichia coli
  Strain O55:H7
tggtaccgctggcgtttgtgaaa

SEQ ID NO: 289 - DNA, 33 bp, Escherichia coli
  Strain O55:H7
  modified_base (26)..(26): a, c, g or t
  modified_base (28)..(29): a, c, g or t
  modified_base (31)..(32): a, c, g or t
tactgacactttcagtaaagccaatncnnannc

SEQ ID NO: 290 - DNA, 81 bp, Escherichia coli
  Strain O55:H7
ttctgcagaacagccgcagagcattacctctgatgcgtgtacagtaacggttaatggtgcgggcggataaggcttatggca

SEQ ID NO: 291 - DNA, 59 bp, Escherichia coli
  Strain O55:H7
  modified_base (14)..(15): a, c, g or t
tctgaaaacactgnngctggccagactgtcggggttccgtcataaaacggtgaaggtgc

SEQ ID NO: 292 - DNA, 115 bp, Escherichia coli
  Strain O55:H7
  modified_base (2)..(3): a, c, g or t
  modified_base (62)..(63): a, c, g or t
  modified_base (86)..(87): a, c, g or t
gnnagaggcctggtatctgtggcaggaagtgctcaatggtgatggagaggatgacgataccnngtcggtggtggcgaaaacccgcnntaacctggaagcggatgtgacgctgttc

SEQ ID NO: 293 - DNA, 1 bp, Escherichia coli
  Strain O55:H7
g

SEQ ID NO: 294 - DNA, 41 bp, Escherichia coli
  Strain O55:H7
aaaaagtagcccgcccggaaattcgctttctgatgcgactt

SEQ ID NO: 295 - DNA, 29 bp, Escherichia coli
  Strain O55:H7
  modified_base (14)..(14): a, c, g or t
  modified_base (27)..(28): a, c, g or t
tatccgaactgcgncacagcctgagtnng

SEQ ID NO: 296 - DNA, 41 bp, Escherichia coli
  Strain O55:H7
  modified_base (26)..(26): a, c, g or t
gatgatgtggatggagttcgacaggntatccccgctgggtg

SEQ ID NO: 297 - DNA, 132 bp, Escherichia coli
  Strain O55:H7
tcgtgaaagcggttttcggggcacaggggatgaatgttgcactgaaggacgccatgctctgctggggcgaggatgaggataagccggaggtggatccgtttgcggcgctggaagacgcgctgagccttgcag

SEQ ID NO: 298 - DNA, 31 bp, Escherichia coli
  Strain O55:H7
aggtgaatggcgacgttacgtgaactgatta

SEQ ID NO: 299 - DNA, 51 bp, Escherichia coli
  Strain O55:H7
tcggcaaattcacagtcattccagtcggagatccagcgggcgtcccgtatg

SEQ ID NO: 300 - DNA, 33 bp, Escherichia coli
  Strain O55:H7
  modified_base (29)..(32): a, c, g or t
tgaatattaccggaccctgcagaatggcnnnng

SEQ ID NO: 301 - DNA, 29 bp, Escherichia coli
  Strain O55:H7
gtgaatgcccgtctgaaacaggcgtcgca

SEQ ID NO: 302 - DNA, 69 bp, Escherichia coli
  Strain O55:H7
  modified_base (36)..(37): a, c, g or t
attttcgtcatcacagaaagtgctgatggatatcanncagcggacaggcacggcattttcggataatgc

SEQ ID NO: 303 - DNA, 23 bp, Escherichia coli
  Strain O55:H7
gttcggctgcctcgatgcgtgaa

SEQ ID NO: 304 - DNA, 23 bp, Escherichia coli
  Strain O55:H7
  modified_base (12)..(13): a, c, g or t
acagggctgaanntatccggtgc

SEQ ID NO: 305 - DNA, 39 bp, Escherichia coli
  Strain O55:H7
tcatacgtgcactggctgcgggtatgggcgtggcccgta

SEQ ID NO: 306 - DNA, 24 bp, Escherichia coli
  Strain O55:H7
gctgggggtattgcgtgatgaata

SEQ ID NO: 307 - DNA, 31 bp, Escherichia coli
  Strain O55:H7
tgaacggtgttgccggacagattgataatgt

SEQ ID NO: 308 - DNA, 22 bp, Escherichia coli
  Strain O55:H7
tggcccggtactttggcaatat

SEQ ID NO: 309 - DNA, 28 bp, Escherichia coli
  Strain O55:H7
accgtctgctggggctggggaatgaact

SEQ ID NO: 310 - DNA, 219 bp, Escherichia coli
  Strain O55:H7
ggccaccctggatgataaacagcagagtgccctgacaaaaacagagcgtgagctggccctgtccagactgaaaggggaagaaaaagagcgtgtccggctgggatatgcggcggatgacctcggttttgtgggtgatccgtatcaggaggcgagacaacgttatatcagtaatgccctggaagcctggcgcaataacgaggcgaataaacccaaatcccg

SEQ ID NO: 311 - DNA, 25 bp, Escherichia coli
  Strain O55:H7
aagcagcagaaagagcaactggcac

SEQ ID NO: 312 - DNA, 161 bp, Escherichia coli
  Strain O55:H7
  modified_base (31)..(31): a, c, g or t
  modified_base (36)..(36): a, c, g or t
  modified_base (114)..(117): a, c, g or t
tacagagctggcgaagctgaagtaccagacngcgcngggcgaactgaaaaccctgacggagatgcagaagcaggaactgctgcgtaacgcgaccctgattgaccagcaaaaaannnnggaacagttgcgatcccgggaagagacactgaagaatgagaatg

SEQ ID NO: 313 - DNA, 157 bp, Escherichia coli
  Strain O55:H7
  modified_base (61)..(63): a, c, g or t
  modified_base (106)..(107): a, c, g or t
cgtgcgtcgaatgatgctgaactgctggggtacgggcagggggaacgagccagagaacgcnnncgggagttgcagcagatccgcgacagcttccgccagaaggatnnggaccttcagtctcagtatcagaccggggataacagtgaggatttttaca

SEQ ID NO: 314 - DNA, 252 bp, Escherichia coli
  Strain O55:H7
  modified_base (3)..(3): a, c, g or t
ggnagccttttatgccgaatcggatgtgcagcgtgcggactggcagaaagggctgcaggagggattcagtaactgggtggataatgcgtccgattacgcctcacaggcagcacagcttgcgacggagggtatctcagggatggtgaataacatcacggagatgctgaacggaaataaagtggaatggcgcagctgggcctcatcagtgctgcaggaaatatcaaaagttcttatgaatgccgcgattgtcaa

SEQ ID NO: 315 - DNA, 71 bp, Escherichia coli
  Strain O55:H7
  modified_base (3)..(6): a, c, g or t
  modified_base (28)..(28): a, c, g or t
  modified_base (67)..(67): a, c, g or t
gannnnggcaaacggtatgtccggtgcnggaggatttcttggcagcattggtgactggctgggcggngcgg

SEQ ID NO: 316 - DNA, 23 bp, Escherichia coli
  Strain O55:H7
  modified_base (10)..(11): a, c, g or t
tgcaaaaggnngcgtgtatacct

SEQ ID NO: 317 - DNA, 51 bp, Escherichia coli
  Strain O55:H7
  modified_base (47)..(50): a, c, g or t
cctgagcgcgtacagcaacagcattgtggacacgcccacgtactttnnnnt

SEQ ID NO: 318 - DNA, 28 bp, Escherichia coli
  Strain O55:H7
gggccgggctgatgggggaagccggacc

SEQ ID NO: 319 - DNA, 79 bp, Escherichia coli
  Strain O55:H7
  modified_base (12)..(13): a, c, g or t
  modified_base (29)..(30): a, c, g or t
  modified_base (33)..(35): a, c, g or t
  modified_base (37)..(38): a, c, g or t
gggcggcggatnnctcgctgggcgtacgnnccnnngnnagtatgaacggcagtgctggtctggtgtattccccggtcta

SEQ ID NO: 320 - DNA, 49 bp, Escherichia coli
  Strain O55:H7
tcagaatgacggggctaacggacagatagggccggaggcggcaggcagt

SEQ ID NO: 321 - DNA, 52 bp, Escherichia coli
  Strain O55:H7
ttgaccagcgggtgcaggcggtgatgctgtccatgcgacgtgacggaggaat

SEQ ID NO: 322 - DNA, 54 bp, Escherichia coli
  Strain O55:H7
  modified_base (50)..(53): a, c, g or t
tgcaggtgagtgagaagccgtcggtggtgagggtgcggtttggtgacggnnnng

SEQ ID NO: 323 - DNA, 60 bp, Escherichia coli
  Strain O55:H7
  modified_base (38)..(38): a, c, g or t
ataacgcccggtacagtgatttcagctgtacgattgancaggtggtgaactgatgcagga

SEQ ID NO: 324 - DNA, 27 bp, Escherichia coli
  Strain O55:H7
tggtgctctgggaaatygacctgacgg

SEQ ID NO: 325 - DNA, 3252 bp, Escherichia coli
  Strain O55:H7
  modified_base (2)..(2): a, c, g or t
  modified_base (68)..(69): a, c, g or t
  modified_base (80)..(81): a, c, g or t
  modified_base (83)..(84): a, c, g or t
  modified_base (317)..(317): a, c, g or t
  modified_base (423)..(424): a, c, g or t
  modified_base (445)..(446): a, c, g or t
  modified_base (719)..(719): a, c, g or t
  modified_base (744)..(744): a, c, g or t
  modified_base (806)..(807): a, c, g or t
  modified_base (1075)..(1075): a, c, g or t
  modified_base (1078)..(1079): a, c, g or t
  modified_base (1099)..(1099): a, c, g or t
  modified_base (1948)..(1948): a, c, g or t
  modified_base (2047)..(2048): a, c, g or t
  modified_base (2200)..(2200): a, c, g or t
  modified_base (2907)..(2907): a, c, g or t
  modified_base (3186)..(3186): a, c, g or t
  modified_base (3250)..(3250): a, c, g or t
cnctgacggtgtcsaatctgttcggtctggtcaccggaatggcggaggacctgcagagcctggtgggnnccacggtggtnngnngccgggtgtatgcccgttttctggatgcggtgaattttgtggcgggcaatccggaagcggacccggagcaggagctgagcgaccgctgggtggtggagcagatgtcagagctgacggccatgacggcctcgtttgtgctggcgacaccgaccgagacggacggggcgctgtttccyggtcgcatcatgctggcgaacacctgtatgtgggattaccggggmgatgaatgcggntatmacggtcckgcrgtggcggatgagttcgacaaccccaccacggatatccgtaaggacagatgcagcaagtgcatgcgcgggtgtgagatgcgcggcatggtgnntaattttggcggtttcctttnnattaataaactttcgcagtaaatccaatgacacagacagaatcagcgattctggcacacacccggcggtgtgtgcctgcggagtcgtgcggcttcgtggtgagaacgccggagggggagcggtatatcccttgtgtgaatatctctgcagagccggaggcgtattttcgtatcgcaccggaagactggctgcgggcagagatgcagggtgagattgtggcgctggtccacagccaccccggtggtctgccctggctgagcgaggccgaccggnggctgcagataaaaagtgcactgtnctggtggctggtctgccggggggaaattcataaattccgctgtgtgccacatctgacagganngcgctttgagcacggggtgacggactgttacacgctgttccgggatgcataccatctggcgggaattgatatgccggattttgagcgtgaggatgactggtggcgcaacggtcagaacctttacctggacaatatggcggtcacaggcttttaccgggtgcccctgtcctctgcacaggcgggcgatatcctgctgtgctgctttggcgcatcggtggccaatcatgccgccatttactgcggcaacggtgagctgcttcaccatctnccnnaacaactgagtaaacggganaggtattccgaaaaatggcaacgacgaacgcattcagcctggcgtcaccgccactggcacgtatctgccttcacggggatttacaacgatttggcccgccgcctcagcctgtatgtgaacacggcagcggaagccatccgtgccctgtcgatgcagatgcckggattccgccgtcagatgaacgaaggctggtaccagatacgtattgccggtgaggacacggcaccggaggcggtgtacgcccgtcttcacgaacagctgggtgagggaacgatcatccacattgtgccgcgactggccggggccggaaaaggtggactgcagattgtgctgggggcggcagccatcgtgggctctttcttcactgccggggcatcaatggcgttatggggttcagccctggcagccggtggtttttctgccaccacgatgctgttttcactgggggccagcatgatactgggtggtgtggctcagatgctkgccccgaaggctaaagtaccggagtacaaaagcacggataacggtaaacagaacacgtacttttcgtcactggacaatatgattgcccagggtaacccgatgccggtgccttacggggaaatgctggttggctcccggcgaatctctcaggacatcagtacccgtgatgaaggcggtggcgggaaggtcgtggttatcgggcggcagaggtaaaaagaataaaaaaatcccgcagtgttgcggagctgcgggagagttacgaagattaactatagagaattattcttatgtcacgacaaaaaacattaacgcagagaaattattagtaccacagtcagtttgtgaaaatgtgaagatattcagaanttttattcagtgatgatacaggcatcctccgggatgcctgttgtttttgtgcgtaacagttatcacagtaaagggtgagacaatgggcaaaggtggcgnnaggcgcacacgccggttgaggcaaaggacaatcttaagtccacgcagatgatgagcgtgattgatgccattggtgaagggccgattgaaggtccggtgaagggrctgcagagtattctggtgaacaaaaccccgctgacggacactgacggnaatcctgtgatacayggtgtgacmgcggtctggcgcgccggggagcaggagcagacaccaccygaaggctttgagtcctccggggcggaaaccgcactgggcgtggaagtgacgaaggcaaagccggtgacgcgcaccattacatccgcgaacattgaccgcctgcgggtcaccttcggggtgcagtcactggtgcagaccacgtcaaagggtgaccgaaacccgacatccgtccgcctgctgattcagttacagcgtaacggtaactgggtgacggaaaaggatgtcaccattaacggcaagaccacctcgcagtttctggcgtcggtgattctggataatctgcctccccgtccttttaacatccggatggtccgggagacagcggacagcacctcggaccagctgcagaataagacgctctggtcgtcatacaccgaaatcatcgatgtgaaacagtgctacccgaacacggcgattgtggggctgcaggtggatgcggagcagtttggcggtcagcagatgacggtgaactaccatatccgaggtcgcatcatcctggtgccgtcaaactatgacccggaaaaacgcacttacagcggyatctgggacggcagcctgaaaccggcatacagcaacaacccggcctggtgcctgtgggacatgctgactcacccgcgctacggcatgggaaaacgtctgggggnggcggatgtggacaagtgggcgctgtatgccatcgggcagtactgcgaccagacggtcccggatggtttcgggggcacagagccgcggatgacctttaatgcgtacctgtcacaacagcgtaaggcgtgggacgttctcagtgatttctgctcggcgatgcgctgtatgccggtatggaacggccagacgctgacgttcgttcaggaccgcccgtcggatgtggtgtggccgtacaccaactgcgatgtggtggtggatgataacggcgtggggtttcnctacagcttcagcgccctgaaggaccgccacacggcggtggaggtgaattacaccgacccgcanaa

SEQ ID NO: 326 - DNA, 358 bp, Escherichia coli
  Strain O55:H7
ggcagacctccacggaactggtggaagacccggaagccatactgcgctacgggcgcaacctgctgaagatggatgcgttcggttgcaccagtcgcggtcaggcccaccgtgccgggctgtgggtgataaagaccggactgctggaaacgcagacggtggatttcacgctcgggtcacaggggctgcgtcacacccccggtgacatcattgaaatctgtgataacgactacgccggtaccatgaccggcggacgtgtcctgtccatcgatgccgccagccgcaccctgacactggaccgtgaggtgaccctgccggagacaggtgccgccacggtgaacctgattaacggcagcggtaa

SEQ ID NO: 327 - DNA, 1750 bp, Escherichia coli
  Strain O55:H7
  modified_base (643)..(643): a, c, g or t
  modified_base (1065)..(1065): a, c, g or t
  modified_base (1072)..(1072): a, c, g or t
  modified_base (1623)..(1624): a, c, g or t
catcactgcacaccccgcgccggaccggatacaggtcagcaccctgcctgatggtgtggagacatacggtgtatggggactctccctgccgtcactgcgtcgtcgcctgttccgctgtgtttccatccgggaaaacacggacggcacctttgccatcacggcggtgcagcacgtaccggaaaaagaagccatcgtggataacggggcgcactttgacggcgaccagagcggcacggtgaacggggtcacgccgccagcggtgcagcacctgaccgcagaagtcaccgcagacagcggggaatatcaggtgctggcgcgctgggacacgccgaaggtggtgaagggggtgagttttatgcttcgcctgaccgtggccgcggatgacggcagtgagcggctggtcagcacggcccggacgacggaaaccacataccgcttcacgcaactggcgctggggaactacaggctgacagtccgggcggtaaatgcgtggggacagcagggcgatccggcatcggtatcgttccggattgccgcaccggcagcgccgtcacagattgagctgacrccgggctattttcagataactgccacgccgcatcttgcggtttatgatccgacggtacagtttgagttctggttntcggaaacgcggattaccgatatcaggcaggttgaaaccacagcccgctaccttggcacggggctgtactggatagccgccagtatcaatatcaaaccgggccatgattattacttttatatccgcagtgtgaacaccgttggcaaatcggcattcgtggaggccgtcggtcgggcgagcgatgatgcagaaggttacctggattttttcaaaggcaagataaccgaatcycatctcggcaaggagytgctggaaaaagtcgasctgacggaggataacgccagcaaactggaggagttttcgaaagagtggcaggacgctaacgataagtggaatgccatgtggggcgtcaaaattgagcagaccaaagacggcaaacattatgtcgcgggtattggcctcagcatggaggacacggaagnaggcaanctgagccagtttctggttgccgctaaccgtatcgcgtttattgacccggcaaacgggaatgaaacgccgatgtttgtggcgcagggcaatcagatattyatgaacgacgtgttcctgaagcgcctgacggccccsaccattaccagtggtggaaatccaccggcattttccctgacatcagacggaaagctgaccgctaaaaatgcggatatcagtggcagtgtgaatgcgaackccgggacgctcaacaatgtcacggtaaatgaaaactgtacgattaagggcatgctggaggcgactcaggtcagaggtgacttcgttaaagctgtatccaaatcattcccgaaacaggctggtacgtggggtaacacggaaacaccaaacgggacggttacagtcaccatcagygatgatcataactttgaccgtcaaatcattattccgcccattatctttaacggaatagcgtatagctatccgggaagtggtaataacccgggaggtacaagttacacgggttatggttttgaagttcgcaaaaacggtgtatnnatcgcatccagagaaactaaaggggccattcccggtagttacagtgcagttattgatatgtctagtggtggtggtagcgtcactctggagtttaagattttccagaaaggcaatcagggggcaggc

SEQ ID NO: 328 - DNA, 78 bp, Escherichia coli
  Strain O55:H7
  modified_base (54)..(55): a, c, g or t
  modified_base (69)..(70): a, c, g or t
  modified_base (72)..(74): a, c, g or t
acggtgattgtgaccaaaaaagcggcttccggcatcagtattcgttgaaatatnnataaccccaataanngnnntcag

SEQ ID NO: 329 - DNA, 214 bp, Escherichia coli
  Strain O55:H7
  modified_base (4)..(4): a, c, g or t
  modified_base (7)..(8): a, c, g or t
  modified_base (71)..(71): a, c, g or t
  modified_base (158)..(158): a, c, g or t
  modified_base (182)..(182): a, c, g or t
cctnttnnattgcagaaaagcgagaggtaattatgcgtaaastttgtgcagccattttgtccgcagccatntgtctgkccgtatccggtgcgcctgcatgggcgtctgaacatcagtccacrctgagcgcggggtatcttcatgyccggacgaacgyncccggcagtgatgatctgaacggnattaacgtgaaataccgttatgagtttacgga

SEQ ID NO: 330 - DNA, 23 bp, Escherichia coli
  Strain O55:H7
  modified_base (2)..(3): a, c, g or t
tnnttacgtccttcagttatgcc

SEQ ID NO: 331 - DNA, 879 bp, Escherichia coli
  Strain O55:H7
  modified_base (2)..(3): a, c, g or t
  modified_base (35)..(35): a, c, g or t
  modified_base (265)..(265): a, c, g or t
  modified_base (353)..(353): a, c, g or t
  modified_base (403)..(403): a, c, g or t
  modified_base (408)..(408): a, c, g or t
  modified_base (519)..(519): a, c, g or t
  modified_base (543)..(543): a, c, g or t
  modified_base (670)..(670): a, c, g or t
  modified_base (871)..(874): a, c, g or t
gnnacagcgatacccgctggcatgaagattccgtncgtaaccgctggttcagcgtgatggcggggccgtctgtgcgcgtgaatgaatggttcagcgcgtatgcgatggcgggtgtggcttacagccgtgtgtcgactttctccggggattatctccgcgtaactgacaacaaggggaaaacgcacgaygtkctgaccggaagtgatgacggtcgccacagcaacacgtctctggcgtggggagctggcgtgcagtttaacccgancgaatccgtggccattgatattgcttatgaaggctccggcagtggcgactggcgcactgacggtttcatcgtgggtgtcggttataanttctgattagccaggtaacacagtgttatgacagcccgccggttcaggcnggctnttttgtggggtgaatatggcagtaaagatttcaggtgtactgaaagacggcacaggaaaaccggtacagaactgcaccattcaactgaaagccagacgtaacagtaccacngtggtggtgaacacgctggcctcngaaaatccggatgaagccgggcgttacagcatggacgttgagtacggtcagtacagcgttattctgttggtggarggattcccgccgtcacatgccgggaccatcaccgtgtatgaagattctcaanccggtacgctgaatgattttctcggtgccatgacggaggatgatgcccgtccggaggcaytgcgtcgttttgaactgatggtggaagaggtggcgcgtaacgcgtccgcagtggcacagaacacggcagccgcgaataagtcagccagtgatgccagcacatctgccagtgaggcggcaacccatgcgactgatgctgcannnncagca

SEQ ID NO: 332 - DNA, 281 bp, Escherichia coli
  Strain O55:H7
  modified_base (267)..(267): a, c, g or t
cggctcagtcagcgtcttccagcgcaggaacggcatcaacaaaggccactgaagcctcaaaaagtgctgccgctgcagagtcctcaaaaagtgcggcggctaccagtgccggtgcggcgaaaacgtcagaaacgaatgcggcagcgtcagaacaatcagccgccacttctgcatccaccgcgaccacgaaagcgtcagatgctgccacctcagccagggatgcgtcggcttcaaaagaggcggcaaaatcatcagaaacgaacgcancctcgagcgccagt

SEQ ID NO: 333 - DNA, 14 bp, Escherichia coli
  Strain O55:H7
agcttcctcggcaa

SEQ ID NO: 334 - DNA, 43 bp, Escherichia coli
  Strain O55:H7
gccagtgcagcgtcaacaagtgccgggcaggcctcagccagtg

SEQ ID NO: 335 - DNA, 731 bp, Escherichia coli
  Strain O55:H7
  modified_base (305)..(306): a, c, g or t
tccgcttcaacagccacaacgaaggctggcgaagccactgaacaggccagcgcagcagcgaggtctgcttccgcagcgaagacatccgagacgaacgcgaaagcgtcggaaaccagcgcagaatcctcaaaaacggctgccgcatcgtcagccagttcggcggcgtcatcggcatcatctgcgtctgcttcaaaagatgaggcgaccagacaagcgtcagcagcgaagggcagcgccacgacggcatccacgaaggcgacagaggcagctggcagtgcgacggcggcagcacagagcaaaagtanngcggaatctgcagcaacgcgcgccgagacagcggcaaaacgggcagaggatattgcatccgccgtggcgcttgaggatgcgagcacgacgaaaaaggggatagtacagctcagcagtgcgactaacagcacttccgagtcactggcggcaacgccaaaagccgttaaggccgcgtatgagctggctaacgggaaatacaccgcacaggatgcaacgacagcacagaaagggatagttcagcttagcaacgcgaccaacagcacatctgaaatgctggcggcaacgccaaagtcggtaaaggcagcctatgaccttgctaacgggaaatatactgctcaggacgctacgacagcacaaaaaggaattgtccagctcagtagtgcaaccaacagcgcatctgaaacgcttgccgcgacaccgaaagc

SEQ ID NO: 336 - DNA, 4271 bp, Escherichia coli
  Strain O55:H7
aagcagctaatgataatgcgaatggtcgggtaccttctgcccgtaaggtgaatggtaaggcgctttcagcggatataacactgacgccgaaagatattggtacgcttaactcaacaacaatgtcattcagcggtggtgctggttggttcaaattagcaacggtaaccatgccacaggcgagttctgttgtttcaattacgttgattggtggcgcgggatttaacgtggggtcacctcaacaggcaggtatatctgaacttgttttgcgtgcaggtaatggtaatccgaaggggattactggtgctttatggcagcgcacatcgacagggtttacaaattttgcctgggtcaatacatctggtgatacttacgatatttacgttgcaatcggaaattatgcgactggtgtaaatattcaatgggattataccagtaatgccagcgtgacgattcatacgtcaccagcatattctgctaataagccggaagggttaacggacggtacagtttattcactctatacgccatcagggcagttttatccgcctggcgcaccaatcccgtggccatcagataccgttccgtctggttatgccctgatgcaggggcagacttttgacaaatctgcttacccgaaactcgcagccgcttatccgtcaggcgtgatccctgatatgcgtggctggacgattaagggcaaacctgccagtggtcgtgccgtattgtctcaggaacaggacggcattaaatcgcacacccacagcgccagcgcatccagtacggatttggggacgaaaaccacatcgtcgtttgattacggcactaaatccacgaataacaccggggcgcatacgcacagtgtgagcggtacagccgcaagtgccggaaaccatactcatagtgtcacaggcgcatcagcagtcagccagtggtcacaaaatgggtcagtacataaggtagtgtctgcggccagtgtgaatacaagtgctgcaggagcgcacactcatagtgtcagcggcacagccgcatctgcaggtgctcacgcacatactgtcggtattggtgctcatacgcactctgttgcgattggctcacatggacacaccatcaccgttaacgctgctggtaacgcggaaaacaccgtcaaaaacatcgcatttaactacattgtgaggcttgcataatggcattcagaatgagtgaacaaccacggaccataaaaatttataatctgctggccggaactaatgaatttattggtgaaggtgacgcatatattccgcctcatacaggtctgccagcaaacagtacctatattgcaccgccagatattcctgctggctttgtggccgttttcaacagtgatgagggatcgtggcatctcgttgaagaccatcggggaaaaaccgtctatgacgtggcttccggcgacgcgttatttatttctgaacttggcccattaccggaaaatgtcacctggttatccccggaaggggagtttcagaagtggaacggcacagcctgggtgaaagatgcagaagcagaaaaactgttccggatccgggaggcggaagaaacaaaaaacagcctgatgcaggtagccagtgagcatattgcgccacttcaggatgctgtagatctggaaatcgcaacggaggaagaaacctcattgctggaagcctggaaaaagtatcgggtgttgctgaaccgtgttgatacatcaactgcacctgatattgagtggcctacgaaccctgtcagggagtaatcattgggattatgccgcagcacgtcttaagcaagaacgtgctgcggttggatgctattttttccctgaagcggaaaacattactacagtaccttgaaccttggttttaacattctcgaaatgctctgagagtatatgtgttaagccttcttcggaatcttttgtgtttgaaaagatgcctttctgattgtaaatgcgcatcagtttttgaccgaagctattgtgcacaactccatcgccaagaattgtggctccgtatagagttccatcgtcagttaaggcctgcgcagcattgcgtattacacagctttttgtagatatatttccaggcaggcagtgaagaaggtaaaacatggaaatggaatcaaattgaccatgtaacgccgcgggataaggttcaaaaacatcatggctaattttatgtttaatttttgattccccagcccttgtagatgccgcgttcaggctagcttcgttcaaatccattaaagatatcagactactctcaggtacgtgagtaaggtaaaacccagttccaacaccaatatccagatggttgttacctaaatgttccagaaagtgtggaaggaggtgttcctttgtaggacatccccatgcaagccgatttgatactcccaaaacccaccagtcataaagctttagggtaagtggtgtgtaaattttagccccatcatctgtgttttttttcattaatttcaccatgttatagttttatttgtgaattaaatcaattatggcgatgaattacaaggggttaaatgctgccgcagcatagcgatattgaaatagcctggtatgcttcgatacagcaggagccgaatggctggaagaccgtcaccacacagttctacatccaggagttcagtgagtatattgcgccactgcaggatgctgtagatctggaaatcgcaacggaggaagaaagatcgttgctggaggcatggaataaatatcgggtattgttgaatcgtgttgatacatcagtagctctgggtatgaagctgattgtaactcatgttacagtaacggttattgctatctcgaaggtgcaaaatgtatattgatttgatattttataaatttacttcgaatctggcacgtcaacttttgattaaagtaatatcagttttcggcgaaaaaagaccgtgtacatgagacgatttcatacaagaataaccaaaatatgaatatgctcccaatgcaatatatgttttgcattgggagcaaatagcggaatattttgaaattattgtatttctgcttcagaatttcctgggcagtatatattttctattttttgtggagtgatcaggtgatgtacaattgctttatctacacataaattaactccggtggagagctaatgtatgcccatcaccatttattgttagtaacgggctggaaaatttctctgccatcttacgggcattaatccagggcgttgttgggtcgtatttgtgtgctacaaacagtaaaccagagggcagaacagtatttttcaggcgagttttgttcaggtcgctatgtattggccataattcacaaaaatcaggtgaatcggaacgtccattgtcaaagttaatagccgggaaggcattcgcaagagcgtcttttcgggattttcgctcttctggtgttaattgctcatccccctgatctacacaaaggattacccccgaagcatcacttgactcttctgaggctatcggagcactgagcgcagtttcaatttcattactgacaatcccctgagagaactggcgtatggcagttgcaagggttggccatgatgaacgccatagcagaaggtctgttgttaatgatatgagttcatctgaagatatattttctcccttactgtctaataaaggtttgtgatgtaattttaataatagctcatggaactgagttattgccttatctctgtctgaagaaagcgggcaactttttgtacgcgcacaccaggatgcaaagcgatcaaacgtttcctgataactctgtgcctgtttgagttgccatgtgaagttgtcctccaggtcatcgatatcgacgactccatcaagaacgatagatcttatgttgtagggaaaacgttctgcatataaggctgcaatttgagttccatacgaatacgccacggctgtcagttgtttatcccccaaggcttgcctaatacgatcaatatcgtatacagcctcgttagagccgatatggcgaatgacttcggctccggtattatggatacaggcattaattttatttaatacttgttgcttttcggttatgttttcctgagtctctgtatctgattgccggcagtttattgtcggagtggactgtccgacgcctcgaggatcaaatccaataatatcccatgactcacgaagatttgtgactggccagtcaaagttaatataaggatttatgcctggtaacccgggaccaccacttattatcaggatacttcctttatgcttgcttt

SEQ ID NO: 337 - DNA, 233 bp, Escherichia coli
  Strain O55:H7
gcaattttgtcaacgctagtttgacttgtgattttttttcataagaagcatctccgcctgtgtctgtatattttaatggaacagacaaataaccacatagtaagtcaggagacggtttttcctcaccaaaccagtggttgaattgactggccatacaggattgccactgtatctgctgggcagatacggttactggtagaagtaacgttaaaacaactttgaaatgagtaatt

SEQ ID NO: 338 - DNA, 1291 bp, Escherichia coli
  Strain O55:H7
  modified_base (912)..(912): a, c, g or t
  modified_base (1259)..(1259): a, c, g or t
  modified_base (1287)..(1288): a, c, g or t
gtgtctctgaatatcggaataaagataaaatttgaatatattgaggtcttgtgttgcggtaagagattacacgttatgacataggttaaatgcttacaaaattagtggatattgtctacttgtaactgtaaacaaattccccggggttatacaataccaccggggagaaaatctggttaacttcgttaaaaggtgtacttaagaccagcagtagtgatgaagttatagttttctatgcctgcaccatttttgctgtagtctgaagtgttatcattgtgatcataaagtgaagtattaccttttttattcgtaacccgattccatgcgccttcaacataaacttttgcgttaggtgttacgtaataacctgcattgactgcaacagaatagtaattttggtctttgactttactgcgataagtgattctttttcctgggtcatagtgctcatcgttatcagatgcttccacccagccgctgtatttaaatgtgccacctagctcaaaatcttcataacgataacttccagtcaagccaatgtagggcattttaaaacgttgtttgtagccgattgctctttctccattcgggaaggagccgatatcatctctgaatccctcctcagaactgtagatataggaaccacctctggctgtaaagctataacggctttcctgatatccggccatgagtcccaggcggtaattgggttcgttgaggagccagcctttgatattcagatcaaattcgttggcataattgagttgtgtatcagggtgtctactttcatccgtccaggttccggggttactggaatccatccagtcctgatcgaccatattgccacctcggctgccgagagttgtccagccagcagccccgatagatatctggggcatcaaatcccaattnattgcacctttaataattgcagcgttattgaatttccagtcgagttgactgacttttcggcctccttcttcggctagataaacacgctcttttgtttttccgctcagagttccaagactaatgtccgcatttatgttgtcaggagtaaacgataaagtctcggtagaagcaaaagagctgatcgcaataggggttgtcaggattattcccagaagtttcgcccgcataaaaggtctccattcaatcgttttaatgattgaatatgtattttttatatctaacttaatgagtcaattgtatattgtttaactgtttatagtttgtttaagtttgaattattgtttcgntttattcattctttatgggcaacttgcnnagt

SEQ ID NO: 339 - DNA, 652 bp, Escherichia coli
  Strain O55:H7
  modified_base (25)..(26): a, c, g or t
  modified_base (78)..(79): a, c, g or t
  modified_base (81)..(84): a, c, g or t
attgttgtggtttaatatgctggannttttctttttgctgatatttttatctgtctatagttattcatttatacgcanntnnnnaaaaaaaatattattttaggtatttctacagtacatttgacacgatgattaacctctatgtagctaggtttttgtaaagaaactgtgcgtcactgtatccaggactgttatgtgccaaataaggaagttgaagttaccagctcttactctaaagctattacgtatagaaaaaatgcatttgagacgtgtaaaatcatttatttaatcgcaatttatgtaatggcataatcaggtcggtgaaagaggggagaagaatggataaaagagctaaaaatcagatagtcgatagcgatattgcacgtttgttactcaagctcagaaagtctcgaaacttgactgttacagagcttgcccaacgatctggtgtcagtcaggcgatgatcagcaaagttgaacgaggcacttcaagccccagtgcaacaatacttagtcggttagctaatgcactgaatattacgctatcaaagctttttgcagagcttgagatgcaacagaattcacttgtacttttggctgaccagcaacaacattggattgatgaagaaacaggcattacccgctggtcttt

SEQ ID NO: 340 - DNA, 770 bp, Escherichia coli
  Strain O55:H7
  modified_base (3)..(4): a, c, g or t
  modified_base (387)..(387): a, c, g or t
tgnngcgggtgccgggtttgagcagacgctgaccggaatgacagtggggatcgacagccgtaatgatattcctgaggggattgcgacgctgggcgcttttatgggttattcccattcacatatcggttttgatcgtggaggacatggcagtgtggacagttattctctgggcggctatgccagttgggaacatgaaagtggtttctatctggacggtgtcgtgaagctgaaccgttttgaaagtaacgtagccggtaaaatgagcagcggtggagccgccaatggcagttaccatagcaacgggctgggcggtcacattgaaaccgggatgcgatttaccgatggtaactggaacctgacgccgtatgcctcgttaacggggttcancgctgataaccccgaatatcatttatccaatggcatggaatcgaaatcagtcgatacccgcagtatatatcgtgaactgggtgcaacgctgagttacaacatgcgtctggggaacggtatggaagttgagccgtggctgaaggcggctgtgcgcaaagaatttgtcgatgataaccgggtgaaagtgaatagtgacggtaatttcgtcaatgatttgtcgggcagacgtggaatataccaggcaggtattaaagcctcattcagcagtacgttaagcgggcatcttggggtggggtatagcaacggtgctggtatggaatccccgtggaacgcggtggctggtgtgaactggtcgttctgaccatcaacgattaaactgcgct

SEQ ID NO: 341 - DNA, 7757 bp, Escherichia coli
  Strain O55:H7
  modified_base (653)..(654): a, c, g or t
  modified_base (938)..(939): a, c, g or t
  modified_base (1428)..(1428): a, c, g or t
  modified_base (4543)..(4546): a, c, g or t
  modified_base (4823)..(4824): a, c, g or t
  modified_base (4826)..(4827): a, c, g or t
  modified_base (6487)..(6487): a, c, g or t
  modified_base (6811)..(6811): a, c, g or t
cagttttcgtttacaggatgttaaaagagaaaattctggggtaaaaaaagcccgccagttacggcgggaaacctcatcctatgggagaacaatgaataatgaaattgcggggttatcatctcccagtatatcaacactaacaataaggttatttactcaaccaggcataaatattttgttttgtgcgtgggaacagccttaaggtgtaaagggggaggtggaaatagcaatgaggagtatcagcaagaatactcgccgctttaccacaacgtggatgagagggatgaaaaactcaaggcagagataactctgccttgaagataaatgcgcttttacagcgggattatttcagctcttctgcttccggtaaggtcacgttcagctcaagaatagaaatatcgccatctttttgctcaagctgtacggttaccatctcaggatcaatttgtacgtatttacaaatgacctcaagaatatctttacgcaactgcggcagataatgcggttctgcatcgctgcgacggcgttcagcaacaataatctgcagccgttcttttgcaatgttggctgtatttttcttccgcgagagaaagaaatcgagtaatgccataacttatcctccgaacaagcgtttgaggaagcctttcttctcnncttcaatgaagcggaaaggacgttcttctcccaacagacgttctacggtatctgcgtaggctttacccgcatcggcgttaatgtcgagaatgaccggttcaccctggttagaggcgcgcaatactgattgatcctctgggatcacgccgacgagtttgatgcgcaggatctccagcacatcttccatgctcagcatgtcacctctgcttacgcggcctgggttatagcgcgttaacagcaggtgctctttaataggctcttcgccattttctgcgcggcgtgannttgacgccagaatgcctaaaatacggtcagagtcgcgtactgaggagacttccgggttggtggtaataatggcttcgtctgcaaaatagagtgccattaacgcaccggtttcaatccctgccggggagtcacaaacgataaattcaaaatccatcgctttcagatcatcaagaactttagcgaccccttcacgggtgagggcatctttatcgcgtgtttgcgatgccggcagaatatagagattttcagtacgcttatctttaattaacgcctgatttagcgttgcatcgccctgaatgacgttgacgaaatcgtaaacgacccggcgttcacaacccataatcaggtcgagattacgcaggccgatatcaaaatctatcacgacagttttctttcccttctgggccaaaccagtggcgatggccgcgctggaggttgtcttaccaacaccccctttgcccgaagtaacaacaataatgcgtgccatanaaattccttgttaaaaagggatcaatttaacggttgaacggtcaaagcgttttcgactaactgcagtcgcgccgctttgccataaaattctgctgggatttgatcactcagccagtattcacctgcgatggacaccaattccgccatcaggttcgtacaaaatatttgcgtttcccggtcaccacttgcccctgccagcgcacgaccgcgcatcatgccatagacatgaatgttcccatcggcaatcaattcggccccagcgctaacgtggcttgtaacaatcagatcacattgtggagcataaatacgctgaccggaacgcaccggggtatctattaaacgcgtttttgtgaccggcgttgtattttgcgctggagcctgcggtgcgggagctggacgtggcgctttttcctttccttccgtcaggataggcagccccattttttcaatttcggctttaagttgcgcatctttgcagccacttacgccaataacccgcaaaccggttgccgaaaccgccttatgcatcgctgaccagtttaccgggtcttccagtgcactgacgttgagtacaacgggggcatgttttaaaaatgcgggggcctgagcgattttgtcttccagcgcctgatggataaccttaggttctgcctcatgcagatgaaccacagataaagtgaagctactgcctttaagctcgattggcgtgtttgacatcctggccttactcaattagctattaatcatcgccagcgcgcgatgatgttccgaagactataaggcatgttatagtctggattatattgaggcaagtcaccctcccatttattcagagtaaaagtctattctgtgataaatggcgctgattcatagcttaaaaaatacccttgtcaatcaacccattgccgtcgtacttttgattcttcttatttacgcttcctttttccgcaccctaatcgtgacagcatctccagacctgtttaaatatccagtattgaggcaagtgtattttttcaccacgccaggctttcttaactttccattttttgcagcatcattaaagaacagatacccgttatcttaatatccgccacagaattgctctatcatagaaaccgcagaagacgtctgatacttctgtcaggtcatcgtaactcgtccaggtcagcggttttgattacggattgatgatgaaatgagcataagtgttgtacggttggattatcaggatgtgctatgaatatgatgcgtattttttatatcggattgtcaggtgtggggatgatgttctcatcaatggcgtctggacatgacgctggcggacttcaatctccggcgtgcggcgttgtttgcgacccgtatatttgtgtgaactcagatggcatttccccagagttaacaaggaaatatctcagcgaaaaagccgctgaaaacttacaatcattacaaggctacgatcccagcgaatttacattcgctaacggtgtattttgcgatgttaaagaaaaattatgccgtgatgatcgttattttggtgtagatggtaagcggagtggaaaaatcaatcaaaccaccacaaagatgttatttatgtgtcgtgagtgatgtcttgtttacattatgttctattcgtcattaacctcttgagcgacagagaggagtggggcgtcaacgtttatgacggggagactccccgtcggttgacatttacttaatttgaatatcgacgttatattttttagttttgtttttacgggcgtcgtttcgggtttgcagcactcgcagctcatatttgccagaagcagggagtgagtattgtccgtgactatcgagttcaggggaatatctggataaatcaacagaatcatcgattcctggcccgaagaggtaagtatcagcgccttcattagagatactcacatgcactttctgaccttttttggcatagaaggtatatgtatcgtaatcgtatccctttatttcgccggagtactgagcgctgctatggccttttctgaactcaacattgacattcttacccgcagcaaagctcgtggaggttagcagtgcaagcagcaatacagccttactgatgctcttgattttcattggtagtctcctgttcagaatgagtacgatgaactgttataatataacaatcccttacgggagaattccagtggctttcctgcgttcggtaaaatcccgtcgcggcatttttgccggggggattacttataaagggggcatggactcaacaaaccgtagaaatttacagctggctggcttgtggcgcgggtttcattgatgttagcttatgccaaaacctggcatcttaaagagtaaaagtatgttttgtgtgatttatcgaagcagcaagcgtgaccagacctatttatatgtcgaaaaaaaagacgatttttcgcgtgttcctgaggaactgatgaaaggttttggtcagcctcagttagcgatgattctgccgctggatgggcggaagaaactggtcaatgccgatattgaaaaggttaaacaggcattaaccgagcaaggttactatttgcagttaccgccaccacccgaagatttgctgaagcaacatctttccgtcatggggcagaaaacagacgacactaacaaataaccgatatccggcggtggcattatctttgtcggcgcgggttttcatatccacgataaggtgaggggaacgttatgtatcaacatcacaactggcaaggtgcgctgctggattatccggtgagtaaagtagtttgtgttggcagtaactatgccaaacatattaaagagatgggcagcgcagtgcccgaagagccagtgctgtttattaaaccagaaacggcactgtgcgatctgcggcagccattggcgatcccatccgatttcggttcagttcatcatgaagtcgaactagcggtgttgattggcgcgacgctgcgtcaggctacggaagagcatgtccgcaaagccattgccggttacggcgtggcgctcgatctgacgttgcgtgatgttcagggaaaaatgaagaaagccgggcagccgtgggaaaaggctaaagcgtttgataactcttgtccgctttccgggtttnnnnccgcggcggaattcaccggcgatccgcaaaatacaacgctgggcctgagcgtaaacggcgaacaacgccagcaaggtacgactgcggacatgatccataaaatcgttccgctgatcgcttatatgagcaagttttttaccctcaaggccggtgacgttgtgctgacaggcacgcctgatggcgtcggcccgttgcaaagcggtgatgagctgacagtcactttcgatgggcattctttgacaactcgcgttttgtaatactttttgccgcctgaaanngnnggcaaaacttgcatcgctgtgccagactggttataaggtgcgttttaacgtaatggcggaacacctgatgagcgatgtacctttctggcaaagtaaaaccctggacgaaatgagcgatgcggaatgggagtcgttgtgtgatggttgcggtcagtgttgcctgcataaactgatggatgaagacaccgacgaaatctacttcactaacgtcgcctgtcgccagctcaatattaaaacctgtcaatgtcggaactacgaacgtcgtttcgagtttgaacccgactgcattaaattaacccgtgaaaatctgccaacattcgaatggctaccaatgacctgcgcttatcgtttgctggcggaaggtaaagatttacctgcgtggcatccgctgcttactggttcgaaagcggcaatgcatggtgaacgtatctctgtgcgtcatatcgcagtgaaagaatcagaagtgattgactggcaggatcatatcttaaataaacctgactgggcgcagtgataaatttaatagatgttgatgggggctttcttaatatacgtctggatgctcgccatttcgtagccctgtttttgaaagcgctctgtcataatgagagttacccgataccttattatcaacaggtaactctcaatctttaaaaaacgtctgtatttttaaatgtgataaactttataccttgagtacatggagagaataattgctgatcagacttcaggtacctcaaagagtgtcttcttaccgtgtcttttctgatactcattacaggtgttaatcattttattggccgcttcttttagcaaagaaagcattaaatcatcataatcaacatagaatctggttgtttcagtttccgtttttatctccccgatggcggctatttcggtggttaatttcaatttggcggcatcgatatctttattcgcttgtttaaccgtgttagacagggtggtaaagaaactctgcacagattttaacttgttcttcaattctggaatcagtttcccttcaactacgcccgcagcaatagaataggaaatgattaaaccaaatggaccggcgacgacaccggctgcggcaccggcatacgcttccttcctgattttatctacctgtgactggaaatagctgcttttttctgaaaaatcattggttaactggctatctaacgccagcagtttcccggaagcgttgttgaaactttgtgagcttaccagcagggatttttgcgcttcattcagcttcgtgatgccgtcatccagtaacttaatgagaatgtctttctgggcggatgctttcttctcattatactcatcaaatagcaaaatatacgctgcgagcaattgcgtcgcaacaccacaccattcatacactgtttgggttgcttcaaaatacttatcctggctatccattagtaaggttttaatattgccaactaaaacggaggctgcctgtgaatactcctgtttaaagcgacttaactcttttatggtttcatcaaaggtctgccaggggatgacctgatcgagatatttattataaagatccaatgctccatctgcggtttcgattgcgtttttaactacctctaccgttttatctgcaacgatttcagtcataatcattcgcctctttaaatatataaantgtaatgaaactcctgttttacaactattaatgaattttacttcatctaattcatagttagccgggagagatgcgtcaatgtctttatttctattaatatgataaatatcaaacaatgtttaatgtcattatggcgaatgcttctattctattttttagccgggtgatatttttcatttctgctggatgagcgtcgtcgccagaaggccgcgtgagcacaggataagagaacgaaaaatcagcagtctatgcagcgacaaatattgatagcctgaatcagtattgatctgctggcaagaacagactactgtatataaaaacagnataacttcaggcagattattatgttgtttatcaagcctgcggatctccgcgaaattgtgacttttccgctatttagcgatcttgttcagtgtggctttccttcaccggccgcagattacgttgaacagcgcatcgatctgaatcaactgttgatccagcatcccagcgcgacttacttcgtcaaagcaagtggtgattctatgattgatggtggaattagtgacggtgatttactgattgtcgatagcgctattaccgccagccatggtgatattgtcatcgctgctgttgacggcgagtttacggtgaaaaaattgcaactacgcccgacggtacagcttattcccatgaacagcgcgtactcgcccattaccatcagtagtgaagatacgctggatgtctttggtgtggtgatccacgtcgttaaggcgatgcgctgatgtttgccctctgtgatgtaaacgcgttttatgccagctgtgagacggtgtttcgccctgagttatggggtaaaccggtggttgtgctatcgaataatgacggttgcgttatcgcccgaaacgctgaggcaaaggcgcttggcgttaaaatgggcgatccctggttcaaacaaaaagatctgtttcgtcgctgtggcgtggtttgctttagcagcaattatgagctttacgcagacatgagcaatcgggtgatgtcgacgctggaagaactatcgccccgcgtcgagatttacagtattgatgaggcattctgcgatctgacaggtgtgcgtaattgtcgcgatctgactgactttggcagagaaattcgcgcaacggtgctacaacgtacccatcttactgttggtgtggggatcgcccagaccaaaacgctggctaagcttgccaatcatgcggcaaaaaaatggcagcggcagacgggtggggtggtggatttatcaaatctg

SEQ ID NO: 342 - DNA, 2986 bp, Escherichia coli
  Strain O55:H7
  modified_base (859)..(859): a, c, g or t
  modified_base (1970)..(1970): a, c, g or t
  modified_base (2294)..(2294): a, c, g or t
agcgtaaattaatgtctgctctccccgtggatgacgtctgggggattggacggcggatcagcaaaaaactggacgcgatggggatcaaaaccgttctcgatttggcggatacagatatccggtttatccgtaaacattttaatgtcgtgctcgaaagaacggtgcgtgaactgcgcggtgaaccctgtttgcaactggaagaatttgcaccgacaaagcaggaaattatctgttcccgctcgtttggtgaacgcatcacggattatacgtcgatgcggcaggccatttgtagttacgctgcccgggcggcggaaaaacttcgcagtgagcatcaatattgtcggtttatctccacatttattaagacgtcaccatttgcgctcaatgaaccttattacggcaatagcgcgtcggtaaaactgctgacgcccactcaggacagcagggatatcattaacgccgctacgcgatctctggatgccatctggcaagcgggccatcgctaccaaaaagcgggcgtgatgctgggggatttcttcagtcagggagtcgcgcagctcaatttattcgatgacaacgctccgcgccccgggagtgagcaattgatggcggtaatggatacactgaatgctaaagagggcagaggaacactctattttgccgggcaggggatccagcaacaatggcagatgaagcgagccatgctttcaccacgttatacaacgcgaagttctgatttactgcgggtcaaataaacacagcggcaggaaaaaagcgctcccgcaggagcgccgaatggattagcgaccgaacaggtcacgttttttcgctttaaacggctgggaaatcaccaccagcnccgcgacaatcaggtaagcgataaaaataccgagcagccactgcggcatttccagacctaaaaaatcccactgacgctcggcgcaatcgccagaggcgacaaacacttgcggcacccatttatccagcggcagccattccgggaaacgaaccataaaatcacaggtggcaaacggcgaaggatagagctgaagcatggtgtgctcgtaagttaactgcacaccgcggaacgcactatacaaccagataaccatcgctacataacgcagtggcgtttttggggcgatcgcgccaatcagcgcagcacccagaacgccgaataatgcgcagcgttcataaatacagagcacgcaaggtttcagtaacatcacatgctggaaccacagcgccgtcagttccagtgccagagcagtaaacgccatcaacagccacgcgccccggccttgtgaacattggttcaaaaatcgtaacataatcatttccctgcaatatgcatagagtgcgcagtttaaaccaattcattcgctgcgccaccaggaggcagcaaaaataggacgcaattggacaattatcgggcgaaaaggcaaaccgggcatttatatgcccggtaagttgttatcaaagcgttgctatccagcccatttgcataaaccattcggttacaggggcaagcgtaaactcgacgcagagcagtccgacgagtgtcaggacgagggtgtaaggcagggccatccacaccatgcggccataagagaggcgaatcaatggcgcgagtgcagaggtcagcaggaacaggaacgcagcctgaccgttcggcgtagcgacagagggcagattggtaccggtattaatggcgaccgccagcagctcgtattgcttcaacgtgatagcgccactttccattgccgctttcgcttcgttgatataaatcgtccccacgaagacgttatccgaaatggatgacagcagaccgttgaaaatatagaacagcgacagctgagcatgttccgatgcctgcaacacaaactgaataatcggcgaaaacagttgttggtcgataatcaccgcgactaccgagaaaaacaccgtcaacagtgcggtgaatggcaganattcggtgaaggctttaccgatagcatgttcatcggtgacaccggtcaatgatgttgccagaataatgactgacaaaccaatcaagccaacttccgccagatgcaacgccagcgcagtcaccagccagacgccaataatcgcctggacaatcagacggattttatcctgacgggtacgctggtggcggctttgatcgtcaaactgttgcaacacttcgcggactttctccggcagcgtttcaccgtagccaaaccaacgcagcttctctaccagcaggcaggttaacaggccacaaatcagaaccggaacggtcaccggcgacntgcgcaggaagaaatcgccaaaatgccagccagccgctttagcgatgatcaggttctgtggttcgcccaccatggtcattacgccgcctaatgcggtgccgacaccggcatgcatcatcaggctacgcagaaagccacggaactgttccagaaccactttgtaatgcttgtcgatatgactatcgtcttgcaggtcggtgtcttcggtacgggaagaggctacgcgatgataaataccataaaaaccgacggcaacgctgatcaccaccgccacgacggttaaggcatcgaggaacgcggagaggaacgctgccgccacgcaaaaagagagcgacagcagcattttggagcgaatgcttaacagcaaacgggtaaatatgaacagcaatagctgtttcataaaatagatacccgccaccataaacatcagtaacagcaagacttcaagatttgccgccacctcttcacggacgtgttccgcgctggtcatgccgatgaataccgcttcgatagccaacaggccaccggggagcagcgggtagcatttcagggccatcgccagagtgaaaataaattccgctaccagcaaccagccagcgacgaaagggctgatgaggaaaattaacggatttacgattaagaaaatgatgagggcgagtttgtaccagtcgggggactggcccaaaaaattg

SEQ ID NO: 343 - DNA, 8505 bp, Escherichia coli
  Strain O55:H7
  modified_base (2579)..(2579): a, c, g or t
  modified_base (2588)..(2589): a, c, g or t
  modified_base (4301)..(4301): a, c, g or t
  modified_base (8399)..(8399): a, c, g or t
cgcggccccaggagatctccatgatggtttcccttaccttacaaataatcaatgatgtttttatgtttaaacgcaaagcttaacggtcaggcaggagtgaggcaagtcttgatagtcaaggggaaagagatgcggaaaatgaagccttgatcccttttttcttctttttgtctgctatcagcgtagttagccctctggtatgatgagtccaactttgttttgctgtgttatggaaatctcactatggtcattaaggcgcaaagcccggcgggtttcgcggaagagtacattattgaaagtatctggaataaccgcttccctcccgggactattttgcccgcagaacgtgaactttcagaattaattggcgtaacgcgtactacgttacgtgaagtgttacagcgtctggcacgagatggctggttgaccattcaacatggcaagccgacgaaggtgaataatttctgggaaacctctggtttaaatatccttgaaacactggcgcgactggatcacgaaagtgtgccgcagcttattgataatttgctgtcggtgcgtaccaatatttcaactatttttattcgcaccgcgtttcgtcagcatcccgataaagcgcaggaagtgctggctaccgctaatgaagtggccgatcacgccgatgcctttgccgagctggattacaacatattccgcggcctggcgtttgcttccggcaacccgatttacggtctgatccttaacgggatgaagggactgtatacgcgcattggtcgtcactatttcgccaatccggaagcgcgcagtctggcgctgggcttctaccacaaactgtcggcgttgtgcagtgaaggcgcgcacgatcaggtgtacgaaacagtgcgtcgctatgggcatgagagtggcgagatttggcaccggatgcagaaaaatctgccgggtgatttagccattcaggggcgataatcccttccgtttaaaaaacaaacccctcaaacgaggggttttttgttgtttttacagatttcccattctcggcgggcaacgttccagcaactcgacgctgccgtcttcgttttgctgttccagcatcacatcaaatccccacaggcgatgcacatgcttcagtacttctttgcgcccccgatccagcggtgcgcgattatgtggaatgtaacgcagcgtcagcgaacggtcgccgcgcaaatccacgttccagatctgaatattcggctccagattacttaagttatattgcgacgatagccggttacggatctcccgataaccttcttcattatgaatagcggaaatctccagataattatgccgatcatcatccagcacggtgaagaagcggaaatcacgcatcactttcggcgacaggaactggctgataaaactctcatctttgaaatcacgcatcgcgaaatgcagcgtttccagccagtcggaaccggcgatatccgggaaccagtatttgtcttcttccgttggcgactgacaaatccgtttaatatcctggaacatggcgaacccgagggcatacgggttgatgccgctgtaccacgggctgttataggggggctggaagaccacattggtgtggctgtgcaaaaactccagcataaaacgttccgttactttcccttcatcatacagatggttaaggatggtgtagtgccagaaggtggcccagccttcgttcatcacctgagtctgtttttgcggataaaaatactggctcaccttacgcacaatacgcaggatttcacgctgccatgattccagcagtggcgcatttttctccataaaatagagcaggttttcttgtggttcggacggataacggcgcgcttcagcaaccgttttctcttcctcgcgcttcggcagggtacgccagagcatattgacctgactttgcaaatactcttcgcgacttttctgccgggctttctcttcttgcagcgagattttttgcgggcgtttgtaccggtccacgccgtagttcatcagcgcgtggcacgagtccagaagccgttctacttcatcaacgccataacgttcttcgcactcggtaatatatttacgggcaaaaatcagataatcgacaatcgaactggcgtcggtccagctacggaataagtaattgtttttgaagaaagagttatgcccatagcaggcatgagccatcaccagcgcttgcatggtaatggtgttctcttccatcaggtaagcgatacacgggttagagttaatgacgatttcataggccagtccttgctgaccgtgcttatacagccgttcagtctcgataaactttttaccgaatgaccagtgcggatagttaattggcatgccgacgctggagtaggcatccatcatctgttctgaggttatcacttcaatctggtgcgggtaggtatccagccggtagagtttcgccacccggtctatctctgccagataaacatccagcaggtcgaacgtccagtcgggtccatcgctcaaacgtgtggtgtccttattcatagaatcgatcgtcgccatacgcgcacctcattgttgtcggcgctctctgngtggagcanntcattgttgtcggcgctctctgtgtggagcacctcatttcaagcatagaacacctgttaaaaaccgcgtcgccggagaatttttttctttgcgatttcttattatcagagtgccactaatccgtttctgaacggaattttatgctggataaaaagggcgttcagcaggagatactaaagacgccatattgccgcagagtcagggagatgtgagccagctcaccataaaaaagccgtatgttgaataatattttcaactgagttatcaagatgtaattagattattattcttttactgtatctaccgttatcggagtggctatgcgagttgtcatactgggaagtggtgtggtaggcgttgccagcgcctggtacttaaatcaggcaggacatgaggtcaccgtcattgatcgggagccgggggccgccctggaaaccagtgccgcgaatgccgggcaaatctcccccggatatgctgcaccgtgggcggcaccaggtgtgcctttaaaagcgattaaatggatgttccagcgccatgcgccgctggcggttcgtctcgacggtacgcagttccagttgaaatggatgtggcaaatgttacgtaactgcgacaccagccactacatggaaaacaaagggcggatggtgcgtctggcggaatacagccgtgattgcctgaaagcattgcgcgccgaaaccaatattcagtatgaagggcgtcagggtgggacgctgcaactgttccgtaccgaacaacagtatgaaaatgcgacccgcgatatcgccgtgctggaagatgccggcgtaccgtatcagctgctggaatccagccgcctggcggaagtggagcccgcgctggcagaagtagcgcacaaactgatgggtggtctgcaattgcccaatgatgaaaccggagactgccagctgtttacccagaatctggcgcggatggcggagcaggcgggggttaaattccgctttaatacgcccgttgaccaactgctttgcgacggcgagcaaatctacggcgtgaagtgtggcgatgaagtgattaaggccgatgcgtatgtgatggcgtttggttcttactcgacggcgatgctcaaaggcattgttgatattccggtgtatccgctgaaaggctactcgctgaccattccaattgcgcaggaagatggtgcgccggtatccaccattcttgatgaaacctacaaaatcgccattacccgtttcgataaccgcattcgtgttggcggaatggcggaaattgttggttttaataccgagctgttgcaaccgcgtcgtgaaacgctggagatggtggttcgcgatctctatccacgcggcggtcatgtcgagcaggcgactttctggacgggtctgcgcccgatgacgccagacggcacgccggttgtcgggcgtacacgctttaaaaatctgtggctaaataccggtcacggcacgctcggctggacgatggcttgcggttccggtcagttgttaagcgatctgctctctggtcgcacgccagcgatcccatatgaggatctaagcgtagcgcgctacagccgtggatttacgccatcacgtccgggccatttacatggcgcacacagctaaggaaacgagatgacccgtccgatacaggccagcctcgatctgcaggcattaaaacagaatctgtccattgtccgccaggccgcgccgcacgcncgcgtctggtcggtggtaaaagcgaacgcttacgggcacggtattgagcgtatctggagcgcgctcggggctaccgatggctttgcattacttaacctggaagaagcaataacgttacgtgagcgcggctggaaaggaccgatcctgatgctggaaggatttttccatgctcaggatctggaaatgtatgaccagcaccgcctgaccacctgcgtacacagcaactggcagctcaaagcactgcaaaatgcgcggctaaaagcaccgttggatatttatcttaaagtgaacagtgggatgaatcggttgggcttccagcccgatcgcgtgcttaccgtctggcagcagttgcgggcgatggcgaatgttggcgaaatgaccctgatgtcgcattttgccgaggcggaacatcctgatggaatttccggcgcgatggcgcgtattgagcaggcggcggaagggctggagtgtcggcgttcgttgtccaattcggcggcgactctgtggcacccagaagcgcattttgactgggttcggcctggcattattttgtatggcgcttcgccgtccggtcagtggcgtgatatcgccaatactggattacgtccggtgatgacgctaagcagtgagattattggtgtccagacgctaaaagcgggcgagcgtgtgggctacggcggtcgttatactgcgcgcgatgagcagcgaatcggcattgttgccgcaggatacgccgacggttatccgcgccacgcgcctaccggtacccctgttttagtggacggcgtgcgcaccatgacggtggggacagtctcgatggatatgctggcggtcgatttaacgccttgcccgcaggcgggtattggtacgccagttgagctgtggggcaaggagatcaaaattgatgatgtcgccgccgctgccggaacggtgggctatgagttgatgtgcgcgctggcgttacgcgtcccggttgtgacggtgtaacttgttgtaagtcggatcggaggcaacgtcttctggttgcaaaaaaaatcatccatccggctggtcagcaactgtagttgttaatgtgacagagccattgcccatgatagtgcccattaaaaggatggacactatttccccggaacctgaactcaccgcacaggcgttctacataaaacgcttacgcttcattgttgactcgaactcgacttcagataaatcacgcttcacccttgatgcagattcgggttcatgttcagaatgttgattaacaggctgcgagtcctgttgtctttccagactcaacaggcccaactgttgattcaagagctccaggtcctcctgtaccttcacgcgctccaggagtaccgggtcctccaggtgctccagagcctcgaggtccagttcctcttggtactccagcttctccagcttcttcaggttcaccaggccctccctgtccaaaaagtccaaaagctcctccagaccctgctggtttttcaggccctcgacggctttgagcagcgtcggtaaattgtctttgtcccacgggttaccattacagctaaacaccttcaggcttcggggctgcggcaccggtacagttttaaactggttttctccacagtagtatatgattagtttgggcggcagccgtggtgaagagatcaaatcgttactagaacagtcaaataccttcaggcgagtcaagttctcaagcacctcatcaggtattgagttaatattgttgccagcacaggacagtttatacaggtactggggcatcgacggcggtaaaaattccaagaagttttcagaacagttaatcactctcaggttagtcgacagctcaggcagccagataatatagttttcatagcacttcagtaccatcagtttcgggggctgcaccttcggtaacaagatcaaaaagttctccatacattcaagcactctcagcccctttggcattacctccggtaaagcggtcaacacgtttctactgcagttaaattcaatcagatgtggaggcaaattttcagggagtgaagtcagtccaaggttgctaagatcgagcatactctgtcttgttatgagacattccttcattctgcgcaatgcttctgcccggtcttcactctggcttgctgactggttttcttccaggatatcttccttgatttctttcagtctttctttcaggtcttcttggggaatttctgactgtttgttttgccggttttcttccaggacgtcgtgcagttttttttgcaggttttcttgcaaaccatcctgctgtatagcccattcgcaccatttggcgaccatcatgaactcgttatgttgctgattcaggggagtccccaacgtgatgatggtattgttgtccacctgtatgttcactttgcccgcgatactgaggtcaatgatctgccagggggcatcaccccagctgaatttttgcgggctgagatacttcatgttctgcaacatttgattcttgagttccaccgacaggaagagccgccctggcgggcgtcgtacgcctgtgttaacggaagatgggggaatggcgggggcgaatgggcagatgtctttaaagctagccataatgctacgtatccttgaaataaatatcctctggcagcgccggagacgtgaatgtggtcaccgcaaaggagccacaggacgtcatttgcgctgatataactactcatcgttgactttttccctggtcagaaatgccgtgtcgggtctggtacatgctgtattacggcccaggcagctctgacgtattaaagaagatacgagagcgaacgacccgaaaataatcgttattaagcaaaggaataactataagaaatcgctcatgcatccggtgctataggcggatgaaacgccactacagatactgagcactctgaaacgcgtattgcgtgggctacgtcagcgcggcaggttgcgtgggggaatatgttcaggcgatgtcaggctggggcccatgatggttgacggggataccggtaatgcggggctggttattcttcacctgttgcagtcggaagaagccattacgctgactttcttgagccggtgttttgagtttattagccagagcctgcaatggtttgtcatccataatttaaccttcttctgatgttggaatgtgcatatcaaaatcaggaaatgacaagtttatatacaggctcaggctgcgttaagcaaagcatcgtaaccggcgatagatgcttcattaaatttaagattcagcttcctcttcagccactcgaacgccaatcttcaacacttcattatcttctttctcggccaccgtccagatcatcccggcaaactctacctggtcaccgacaaccggtgccgcgcctaacaactgctggacaatttcacccagcgtttgttgcttatcacgatattctcgcccgtcttccaggccatatatcagcgccacatctgcatatttggcgctggcttcgagaatgaagtcaccaaagaagcgttgatccagcgcgaccggcggcgactggctgaacagtttaccgagcgccgggagatcgcgttcccgaccaattacacacaacacatcgccttcgcgcagtcgggtgctgccggtaggatgaagcaactggttatcacgaaacagtgccgcaatacgcgtctcttttggcatatgcaaatcgcgcagtgccgcgcccacgcaccatttatcggcactcaattgataaacaaactgctcccacggattttccggatgaatatccaggccaacgcgtgacaccggacgtccgacgggcggaaccaccactttggcttttttcgccgcccacgagagtgatgttccctgcaagagcagtgaaaccagaaccacaaagaaggcgacattaaagaacagacgtgcattctccagccccgccatcatcgggaacacggccagaataatcggcaccgcgccgcgtaatcccacccagctgataaacacgcgctcacgcagattgaagccacggaatggtagcaatccggcaaataccgaaagaggacgggcgaagaaaatcatccatgcggacaaaatgagcgccggaatggcaataggcngcagatcgcttgggttaaccaacagccccagcaccaggaacatggcgatttgcgccagccaggcgaggccgtcgaaattttgcaggatgccgtagcggttgcgaat

SEQ ID NO: 344 - DNA, 5964 bp, Escherichia coli
  Strain O55:H7
  modified_base (362)..(362): a, c, g or t
  modified_base (4635)..(4638): a, c, g or t
  modified_base (5447)..(5447): a, c, g or t
attacccagcagaaaaccgcacagataaacagccagaataccgctaccttccagcgccgtggttaaagcaaaaattaaaataccgccgcttaatgccagcaatggatataaaccggcgggcagggcgatgcgattaatcatttgcagcagtaaataaccaccgccaagaccgatgacaatcccgaggccaaattgctgcagaatatcgaccacgaacatccaactgacactgctttcatgctgctggatcatcgcaatcagggtaatcgtcagaaagaccgccattggatcattactgccggattcaatttccagcgtcgagccaacacgttcgttaagccccttaccacccagcagagaanagaccgctgcagcatcggtggagccgacgatagcgccgattaataagccttcaatcaaatcaagattaaacagccacgccgccatcatgccggttaaaccagaggtgataagtacgcccagcgtcgccagcgacagcgccggtcctaacgccacacgaaaggaactggcctgagtgcgcatcccgccatcgagcaaaataatcgccagcgccaggttacttaccatgtaggcgaaggggtaattatcaaatgggataccgccgacgccatcgactcccgccagcatgccgatcgccagaaaaataaccagaataggaatgccaagacgagaagaaaatgaactaagtaatatactgctggtaacaaggatggatcctaagatgaaaaggctaattattgttgtggcatccaacggtcggttactcctgattacgctgtctcttatataaaccctaccatattagcggcagagacagcgttttacttagccctgaagcgtgattttttttacattttaagaacaggatgaccgctaatcgtcaactgagtgccttcccgggtgttagtaagaatggcatgtgcgcccaacggcagcgtaaccgtgcgttgttcatgaccaaaatcgaggccggtaatgagtggaatcgacaggcgggaacgcaaaaatgcgtacactgactccaggttgtaacctgcgtcataatcattaggcgtactgccgctaaagctaccgagaataatcgccttctgacgtggcaaaattcccgcatgatagagctgcaacagcatacgttcgacgcggaaagggtgctcgttaatatcttccagcaccagaataccgttctcaatttttggcatccacggtgtaccgatcagtgaaatcagcatcgcaagattgcctccccacaacgtgccttcggcccgacatgtcgggccttccccttgccattcaatggtaaaggtttcattgcgtaacgccagccagaaatggtgctcggtaaaggtgttcagttcatccgcgccaaagtttgctaccagcatggggccgctaaaggtgatgacattgccttgcgccagaagaccgcactgaatggcggtaaaatcgctatgcccgcatatgagcaacgggtcatattgttggcgagccaccagtgcctgccagtcaatatctgccagtaaacgactggcaccgtaaccgccgcgtacagccagcacgatggtgttgggggtagtcagtctggcaagggaattgagatcttccagacgctccgtttccgtacccgcaaaacgctcacaacgacgggcaataacctcgacgttattgacttgatgccccgcgtcggtaaggcgctggataccacgcagcgcggcgtgctgtttaatgcagtaacccgatggggcaattaagtgaaacagagacatggcaattccttgctgacaacagatacgaaatgtatatcatgccgcttaggtgtgccgttgtcacctcaacggcgattccaggctataaggatagaagaagtgaaattgagatggtttgcctttttgattgtgttattagcgggttgttcatcaaagcatgactatacgaacccgccgtggaacgcgaaagttccggtgcaacgtgcgatgcagtggatgccaataagccagaaagccggtgcagcctggggcgtcgatccacaattgatcacggcgattatcgctatcgaatcgggtggtaatccgaacgcggtgagtaaatcgaatgccattggtttgatgcagttaaaagcttcaacctccggacgtgatgtttatcggcgtatgggctggagtggtgagccgacgaccagcgagctgaaaaatccggagcgtaatatttctatgggggcggcttacctgaatattctggaaaccggcccgctggcaggcattgaagatccgaaggtactgcaatatgcgctggtggtgtcatatgctaacggggcaggtgcgctgctacggactttctcgtcagatcggaaaaaggcaatcagcaaaatcaacgatctggatgctgacgagttcctcgatcacgtagcgcgaaatcatcctgcgccgcaggctccgcgctatatctacaaacttgagcaggcactggacgcgatgtaaatcagtcgcgtactttgtccgctttctcccgggcttcccgctcgagagagaaaataatccgctgtaattgccgctccaccgtcgggctgacgttaagaaaacggaagctcagacggggagtggtgatggtttcattcttgccatcaatcactttgcgctcgctgatggagattaactgggcgtcaaagtgaaaaacaccccattgccccatgttgacttcaatctgagcgaagcgcataccttcgtgcaacccggcaggttttgctgtttccagtaatgcgcccatgccgcctaacgacaaatcatacaggcggaaacgtaacgtactgttatccgccagtttggtctggcaaaaataaggcggatggagtggggcggagatgcggaaatatcggcgtcgttgtacaaaccataaggtgggaggcggtacggtaataaatgccggaagctgcaagtattcactctgctgtagttgttcaacagtaaactcgactttcgcaccctgagtttcggcggtaatggtaatgtgctgtgcctttagcacggcgatgttgtcttcggcttgactgccgaaatccagcaccagtttatccggggttattaccagtattttgctgatcagctgcccgccaatccaactgagacgcaaaggaattgcggctttgtgcaaatcgcgtaacacgcccaggacggctaacggattttgtttcaggaactgctcatggtaatgactcacgcggaaaaactcctgactgacaaactgtctttggtttatcggtcacagttaacaaaacttaatacaaatgcgtgaatattttttacatgttgttcttaaatcagccgacatacgcccagcatcgatcccgcccttgcctatacttagagcgttgacgtaagcatttcttgcgtccgattcatcgaaacgagggcctgaacatgggaattattgcctggattatttttggcctgatagccggcattatcgccaagctaatcatgccggggcgtgatggtggtggatttttcctgacctgtattctcgggatagtcggtgcggtggtcggcggctggctggcgaccatgtttggcattggcggctccatcagcggttttaatttgcacagcttcctggtggcggtggtgggagctattctcgttctgggcgtattccgcctcctgcgaagagaataagattttcataaggcggatagcgatacagatgccgctatccgctttcacatcagaacgtatactcgacacctgcccagaaattgcgaccttcttcaataaacccttcactgtaggcatattgggtatcaaacaggttattgaccgacgcattgacgctgaagccatgacctaaggtgtaatcggctcgaatgtgggtcaccgcaaaaccggcggctttttgtgaaccgtcactgttactgtagctggaggaacgcgcctcttccgacagcgttacgcttaacggctcccacggtttgagagtcatccatgcggtcattgtctgcgttggcagatcggttatcttgccgatgtctttacgtttggcgtcagcgtggatcagggcgtagctcaatcctacatccagtatattgctgattttccccttaataccggcatccagaccgctgtaatccaccgtgccgctgttctgattttgaatggtatcggcatcgatattgtgcgagaggatggcatcactcacccggttatagtaaacgctgacctcaaatccccagtcgtgcgtgaaggcaccattccaggttaaatccaccccgcgagcgcgttccggcttgagctgcgggttaacaatcgctatctggttatacgcaggtttggatgtggtatagcgttctttcagcgtcggaaagcgtttgcggtcatagtacgaaagcgccagcgtgtcttcattgacaaagtggtatttccccatcacctgccagttaaaagctgactgattgttgtcgtcataatgggtgatgctgccatctttctcgtgttttttcgcttctacgctatcgcgccagtcatagctgattccagccacaacatcgacattatcggcagcagcccattgatattcactggcgagcgaccaggtacgatcttcatagcgatcgtaagcggcgtgcgnnnnacctttttcccggtgtacgtcatctttccagttaacggcaaacgacagcagatcgttttcacgcacatcggctgccagttgtaatccggcaccgtcgctgtaatcggaataatggctgtagctgccttttttatttttcaaatcagccagcgagttgtacatcatcagcgtattttcaaaggtgtcgcgatacagccgacttttcagggtaaaacgatcgtttagttgggtcgttccctgataataaaaactttctttgtcatactctggccactgccagtagcgtgatttttgaccacaatttccgctgtatggcgggttatctttttcaccatcctgcttaatgtaagtcagtgtgtattcatcgttttcacgtggtgtaaatccgagcttcacaatgccgcgtttatcatcagccgatgaattaatcatcttgccgtgtttgcctgcaatatcattatttacaccatgcggcaggccgagaaaatcctgctttagctggctaccgctgacttgcaaataccccagttcgctgctggcggcaaatgaagcatgcatatcataggcattgtcctggctacggctccatccctggcgatatcccagacttgcttccagaggttttgttggcttctgggtggtgatattaatggctccgcccatctgattaggtccctgaagcagcgacgaataccctttggaaacttcgactgcccccagattgttggtcagaatccgcgccagatcgaggttgccgtcatagggaacataaatgggcacaccgtcgaaatagaccggcacctgccgantatcaaagccacgaacttttacctgttcttcgttgcggctgcctgacttttgcagcaccacgccggggacgacacttaatgcctgagcgacattctgtttatccagggccttcatggtgggttgatcgagaacggtggtcgtcgtcgatgataccggactggaccatacggtcagcgagtcgctctcctgagccgctacggcctgctgggtaaaggcaagtgataatgctgtgcagagataatgttttttgagtctcatagaataaattccgtttaacaaagaattaaatagaggctgcgggttgcagactgactttaatgtcagccggtgccgcgtaataaggcgcggaggtaataaagaggcgaatgccgcagtcgaggtaatttttgagtgtcgtcagattaattccgccggtcagagccagcgtgcagtggggagccagcgacggcgctatttgcgcaatttcagttgcctgttgcggactaaatttgtcgagctgaagtacgtctggttgcg

SEQ ID NO: 345 - DNA, 9417 bp, Escherichia coli
  Strain O55:H7
  modified_base (3611)..(3614): a, c, g or t
  modified_base (3903)..(3903): a, c, g or t
  modified_base (5011)..(5011): a, c, g or t
  modified_base (6117)..(6117): a, c, g or t
  modified_base (8007)..(8007): a, c, g or t
gcggcgattgcctctttcggcgtgtcggcttcaacaacaattttcttctcgggtgcgtggcgacgtaactgattgattgcgcctgaccagtcctgattgtcatgaagaaaatggcggtggttggcaaacaataatatggtttccgcacatccggcacgatgaatcagtcctccggcagccagaattgcctgcgaggccagtaagcgggtgcccggaattgcttttcgggtgcaggcgatattgccatcaggataacgttcacgaagtaacgccagcatttgatcgagataatcagaaacaccgcaactccactccagcacattctggattgccttccatccctgatgaagtgctgcggcattaccctgcgcacggattagccgctgacccgcgttcgcttgtgaaccgtcgctgaccgcgtcatcaatagttaatcccagcgtagttaacatcttacacgcgacagaaacgccgctgacgcagccgccctgacggagaaaaaactctatatagccatgctggtgtccaatatttaatgctctcgtggtcaggtcaccgccctggatatcttccagaagtaacgcatcgatttgtgcctgagaaaggaaaatcatcgcagtgcctcctgcggtacgctatcccaccagatgagcgcccagtcgcggctggcaggggcgagggcacgagcatcttgttgttgataccagcgatataaccgctcacgctcatcgtcgttaagcgcgccaagactccagctgacgttctgctcaaaacgttcccaggtgctgttatcctgttggcaattttgtccacggataaaatcaacgtgggcataaattcccatctgatacaggacgttgagcgcaaagatatagttgggtaattcgatcacttcccgaccagccgcccgctgaatggctggagagacgaacgaggtgctgaccagatgagtcgtatagacgcgaagccgtgcctgattattcagtttgctcattgcctggcgcatatcagccaccagagtggagcgggaagccacggcaatatcgcagcgtggcaggtcactccagtcctcttcccaggcgcgctggatcaagtggacattgtctgccttcagcgcggcggcgcgacgggcggcaacgttcagcatcccctgactgtaatcaacgccataaatcgtcgtgagtttgtcagccagcgccagcgatacggtacccggtccgcagcccatatcgaataaggtctgagcgccttgtaggtcaattttagcgatcagttgttgcaggtagctgtccgtaggcgaggcgcaattttccgccattttttccgcccgttgatcccagtgatccggcgttttttctgtgcggtgggccagcttgagttgctgcagataaaggtctgcaaaatcaatatcatcaatgagcatgatttttccttagtggctaattgcagagaggtgatgatgaatctggtcggcagaaacccgatacagggcagccagtttgtttgttgttaactgttcggtcggtaagccttgtgttactcgtccatctggctctacctggataatgctgtcggcaatggcgttggcatggagcggatgatgagtcgacattaacattgtcatgccgttatttttgagctgtgccagcgtgtccagtagttggatctgatgaccgaaatcgaggctggaggcaggctcatccagtaacaacaagcgcggttgctggacgagtgcacgggcgattaaagccagctgacgttcaccgccgctaagcgtattccagcgtcgtgccgccagatgcaaaatgcccagcttttccagttgctccgtggctttcaggcgttcttgcttaccgggaacggaaaaagcgcctatggtgggggccaggcccatcaacaccatatccagcacactaaaagcaaaaataccgtcgtgcgcctgcggcacccaggcaatagcctgcgcgcgctggcgatggctgagtgtctgcacagggaggctatccagtaagacctcgccttttaataacggtataacgccaagaatggagcgcatgagtgtggttttgccgcaaccattggctcctaacagacaacaaattgttccttgcgacagggtgaaggacacgtcgcgtagcaccggatggcgggagtaacccagagacgcatgacggacggcaagcaaagtcactggcgacctccgcgtaacaacaaaagcaggaaaaacggtgcgccaacaaaagcggtcagaatgccaagtgggatttctgttgttccaatgctgcgtgccagcgtatcggtaagcaggagcagaatcgcgccagtacacattgccatgggcaacagctgctgatggttatgaccggtcaacaagcgggcaatgtgcggaacgaccaggccgacccaaccaattatgcccgctattgctaccgtactggcggtgattagtgtggcgcagacaatcaatacaaagcgcagacgcgtcacgttcagtcccagcgaacgggcttcgtcgtcggaaagcgtgagtaaattcatgcgccagcggagaaaaaacaggggcaaggagcctatgagaatgatcggtgcagcatagcagagatcgcgtaaggtcacggtggacagtccccccagcaaccagaaggtaattgacggtaactgggtgtaaggatcggccagcgttttaattagcgatatccccgctccgcacaacgttcctaacgcgatgcctaccagcaccagggttaagatcggatcgtggcgggtcacccgacgcgtaatcaaccagacgcccgcgaccaccatcagcccgccacaaaatgcgtacagctggatgtaaacaatggataatccccacagaattgccgtgcaggcaccaagtccggcaccggcggagacgcctaaaatatccggtgaaactaagggattacgcaacattccctgataggtggttccggctcctgccagcgccgcgcccagtaacagcgcagcaagaatacgcggcacgcggatttgccagaagacaatttgttcctgcacaggaacattttcttgacgaagaattagcgccagcagttgctgcatatcgagatgataagccccacttacggcggcaaaagtgatactgatagctgccagcagcaaaatacatccgtttacgattctcattaggtcgccaccaatttttgatagtcggcgtcactgagtgaacaatgccagaacagttgggcgtaatgctgcatgtcacttttaaactggcgattgatggcgggatccagccaggcgtgaagtctgcgtaatcccagaagacggttgattcccggtggggcatccagccagccaaagggcaagccacttaaaaataagatgcgttgttctgcaacggctttcacgccatgccagagaggatcacgacgaataaaatctgcagtaacggcctcctgaaccagaataatatccggctgccagcgcaggagattttccatggaaacctgtgtcaggccttggcgatcggctatttgcgcgacgttgtgcaaacctaataattccgccgcctcggtatgcaacgaaccctttaagcccgtctccagccctcgagggccgcgcgcagnnnnaaagcggaggttagcggcgggtgaggcggcgaatgcctgagcttcaccaacgaagcggctggcgagattggcttgttctgcggcgcgatgctcttcgcctaacgttttgccaagcgttgttaactgttctgctgattgcgccagtttcccgttaagcaataaccagggtatttgtgtctgttcgctaacctgccgtgcctgggagatccaggtttcatccgtattgccgcaatcaacgaccaaatcgggatgtaacgccataagcccttccagcgagagtgtgctggcncgcccggcgagtcgtcccagcctgggtaactggcgaatgtgctctgacaatggaattaatgcctgacgggcaaaatcaaaagaggaaaaaccgaccattttttctggcgcgacagccagcaatagcaaatcggcgggcgcacctgcgctgacgatgcgtgtaatgttttgggcttcgggaagcgtcagtgaggcccagaatttgactgattgtgcaaaagaaggcagatgatgcaggaacaacgtcgacgcaagaatctgtgtaaacctccgtctggttagtgacataagttatatcctgataattaaaaccgctatatatttacatatatatcgaaaaaaatcatgtttgatgtcaaaatttgtctaaagagacagaatgatttgcttgttgcttaaataacactttgttccacaagaaaattgtcagggagaatggcggagtggcgaaaaatataaatagaggtgtactgattaacaaattgataaaataaaataaaattaaaatcttctctgatataagaaaataaaagcatagaccgtagaatggggggcatttcgtggcgaaaaaagagcaatgccaattttatgcacataatggcattgctcgatatacagcaaagttaaggcgtaggttccgcctctttttgttttaccggctgtgttgttgattcactgagtggacgcgtcgccggaacattgtcacacggttgctctttcgggcagatcaaatccagcattttcagcgtcacgccattggtccagccaaagccatcctgtaatggatattcgccaccgccgccccccgttccggtggtgctgacatcatatttttccaccagctttttctcccggtcataggtgtgctgaacattggtcaggaagtgccagctaatgtccatcgccacctctttttgcccgtagttttgtaatccttctgtcgcgacccactgtaacggtgcccagccatttggcgcatcccattgttgcccacttttcaccgacgtggtgttcaggccgccgggttgcagcagatgagttttcgtcgccgtcgccattttgttggcgcgatctttcgctgccgcattgacgtacagtgggaacagggnggccgcggttaactgattgcgcactttatgacttttcaggtcgtaatcggcataccagccttgttgatcgttccacaggtatttttcgatccctttttgacgggcatttgccagtgtttcgtactggtttgccatcgcgttatctccggcagctttgctggcgcgggcaaggattttttccattttgaacatcaggctgttcagatcgaccggtacgatgctggtggtgcgtaaggtatttagttgctgcggattgtccatccagcgcgagctgaaatcccagccagacgcagcagcagagcgcaggtcgcggtaaatttcagtggcaggtcgattcggattgcttttagcggtggcaatatcttccacccatgactctggtcgtggcgtatcgcgatcgtcccagtagcggttgagaagggtaccatcctgaagttttacaacgcgtttttcctgttgtccggcttgcaggttttcaacaccgtccatccagtaagcatattctttttgcatttgcggcaggtattgcttcaatgcggcatcgccttcatgctgcgccagtaactctaccatcagggcaaagaagggcggctgcgagcggcttaaatagtaactgcggttgccgttgggaatatgaccgtaagtgtctatttcatgagcaaaattggccaccatatccgcgactttatcccagtgaccgctttcggcaagtcctaacatggtgaagtaactgtcccagtaatatacctcgcgaaaacgtccgcctggcacgacataaggttccggcagcggtaacagagaatcccatttttcggtgttttcggtagaacgcgttaataccggccaaagtccgtcaatatgttcgcgcagtgactgtccctctggcggaacatatttctcgccctctttcggcagggtgaaattgacgttaacgaaatggcgcagatcaaatccgctctggttttgctgcatccgatcatcagcggatcgctgttcggcacggcatcggcaaaggttttttggtccggaaaaagtttggcgttttgcacatcattaaacagcggccctaaaaaaatatcaggcggctgtggcgttaccggtgtttnttctgcctgcaccgatagcgcagcgaaacacaaaaagatgcaggctggaattaacgccattttttgcgggcgagaaggtgcgggggatttcatcaatcattctccttaggcgaaaccgaataaaacggtattcaagtatcagaaaaccttagttcaggatcgcactagctgcatgatcgaaatctcattctgcgaactgtcaggcattttagaaaagggaattaaagggataaataacggcgaaatagagtgatcaaataacgtctgtttattagccagccagcgtcgtttggttcgcgattagcgaagaaaaatcatcataaattggtgaaaaacataacaggtagttaaaaaacattagtgctgagtaaattgccggatgacatcagaacgatgccatccgaacggtggcttaaccctgacggttgaaacgttgcgttttaacgtccagcgttagcttttcttctggttgtatcgcatacagtttctcaccctgctggcaaatccagccaatccccagttcacgggcgatcagggcgctgtgggataccggacttccggcgctaaggcagataccttttacaaccgccggatccagttgcagtactgaggagggataaatgttctccgccagtagaatagttggcgagttaaactgcgggagttcttctttcgtttgggtcaggtggaccagggtgcgatgcagaagatcgtccacatcaatatagcgagcttgtagatattcatcatccagttgctggtattgctggctaagttctttaagaacttgctgccaggcatattctgccgtgcaatgttcgtgctgaaggagttcgcttgccgccgccagcagttccggatcatctaacagtgtatggtgaccagaaaagattgcggcaatatcgtcaagcccgctggcttctgcttttgctgttaacgtcatcagatctaataacgtgaagtcaatggcctggcgtaatcgttcctgttcttcttccacggtcaggggtgattttgcctgtaccgtacataaaactggttgataataaaaggctttacccgaaacaggcggaacgggacgcagagtaggtggagcaacttcctccgtttcaccaaagttatcttcagccagctgacggaaagcgatcagtgcctcttcagcttctggccctttcgcaatcaggcgcagcgtatcgttatagcgaacttgtagtaacgcaatctggttaatactctccggtgtgacgcatttgccgtttttttccagcaacatatcggcattaaatgtcgataaggtataaaccagccgggaggccggacggacgtgcaggccgttacggtttttaatgaccaccgccagagaacgggcttcttcatcgtacgcaggacatgagtcagagatttcagtgtcggaggacggtaaacccagttgttcacgtttggcttccagcgcatgcatggcgtcaaagataactttgtcgatctccgcccccgaggccgcgctgacagttgctgccagtgtaccttcgaccaacggcgcagcacacaaacgtacttttgcggcgatctcgggagccagcaattccagcgcagtttcagcactcaataatgcgctacccatatccatcatgaccagcacatggtcggcatcagcaacagattcgatggcctccatcactttgacggcatcggtaccaatgggattttgtggatcgtcaattcccgcagcaatggcgattttacaattatcactcattaacatctgacgggctaattcaccgacaccttctcccagtcggctgctatgtgaaactatgaccaggtttaccatcaccaattccttactcttttgcggctaacgccaacatttgcatcataaacatcaccgangttgcgccgggatcctggtgaccaatactgcgttcaccgagataactggcgcggcctttgcgggcttgcatcgtaatcgtactttgtgcagcgaattcggcgatgctactggcagcttcgagcgccgccggaacagagagattttgctcgctggactgacgtaacgattccaccaccggcacccacacatcacacatggttttatcgccaggttcggctttcccgcgactgattacgccgtccgcgccatcgcggaacatctgataaagctcttccagcgtcaggctttgccgtgcctgggtcgcctgtgcggcgcggataaagaaggtaccgaacagcggaccactggcaccaccgacgcaggaaagcagcgtcataccggtattcttgagaatgaaaccgatatctttatctgcaatagcagggagtttttccaccactttgctaaagcctcggttcatatttagcccgtggtcagcgtcgccaatctcgcgatccagtccggtaagatactcgctctcggtgttgaaaatatcgccacaacgagtgagccagttaacaatttgagttctgctcagtgacattgctttctccttatttaccccagttaagggccggggtgtggaccggggcgtcccagagtgccagcgtttcgtcatcaactttcagtaaagtgattgagaaaccggtcatatccagtgaggtgcagtacgcgccaattaaattacgctcgatagtcaatcccgcttgctggcaacgtgtggtcaggcggttatagacgccgtacagctcagaaagtggagttgcgccaagattgttaaccagcgcaatcaccctgtcgccagactggagcggttgtttggtttgtggttcttcctgccaactgccttgttgataatcccagaaacgcaaagtgcgatggtatgagccattttccagcagggtgtcgaacatttcatcgacggtttgatcaagggaagagaaggggcgacggtcaatacccggctcaccatgaatgccgacgccaaactccatctcattatccgccagggtaaaagaaggtttgcccgcggcaggaacggtacaggcaccgagagcgatacctattgagtggccttgattattcaacttacgccccagttccgcacaggcgtccagtgagtcgccacgctccgccgctgcgcctacgagtttttcaattaatacggtgttggcaacgccgcgccgcccggcggtataaagactgtcttttactgcaacgtcgtcatcaatgaccacagtggtcacttttacgccgctatcgtgcagtaactcggtcgctgtttcaaagttaagaatatcgccggtgtaatttttgataatcaacagtacaccttcgccgccatcaacttgcatggcgcattcaaagat

SEQ ID NO: 346 - DNA, 2374 bp, Escherichia coli
  Strain O55:H7
  modified_base (415)..(416): a, c, g or t
  modified_base (576)..(579): a, c, g or t
  modified_base (2085)..(2085): a, c, g or t
  modified_base (2213)..(2213): a, c, g or t
atttcgcccggacaggcccccgaaagcatcccctgaccgatataaccacagtgcatcggctcgtgtccgctgccgccacccgacagcagggcgacttttcctgcaacaggggcatcagctcgggtgacatacaccggatcctgatgcagtgtcagcgatggatgcgctttcgccagtcctgccagttgttcgtccagtacgtcttgcacatcattgatcaattttttcattattttgctccagcaattacggtagggcatggatgatgttcaacgacacggcgaccactgactgccgatgaatccattgtgcatcaggcaagggaaaagaaaattagcccaaattatgtttcatagtgaaacatatgctttaatgaatgttccatattgaaacttttacgtgtattaatacttannattgcgagccggaacaccttttgtcataagggatgcgggatatgagtggcgcttttaacaacgatggtcggggcatatctcccttaattgcaacctcctgggagcgatgcaataagctgatgaaacgggagacatggaacgtaccacatcaggcccaggnnnnaacgccattaccctcgccaacaacatcagcacgcataataaaggtactgttaccgctcaggttctctacgtttaatgtggtaaatgtgccggcagttgacccgtggctggcaaaatcgacagttgaatggctcagcgccagcgtgtcgagattagaattacttgttacgttccagacgctgttattcattgcaacgtccagtttcccgccattgacattatcgctgagggaggaacctgtccaaaccgacccagggtgcatatccagattgattagcccacctttggaaagaacgctaccgttgataagcatacgacccgaggcgttgatgcggctggcggcataaccatcgtcatgttgcgttgcgatggccatctggtcgggtgtactcatatcaatgaccagatcgctcgtgaggtcgatctggctgttggtcatggcataaatccccctggctcctgccgcgccggtgatagccaaactgtctccggttattctaccgccgctgagcgcccacaaacccagcgccagactgccattacgatcaaccgtaatatcggtattttgcatgttgataacagccgttgccgtctgggccgaggcaccataagaaccgccggaaaagatgctgtttcgttgcgctgccgtgccagaaaaattgattgtcgcgtctgaaccactggtgacgagaccaccgccctgcgcggaagaaatatggctatctgcaccgatagtggttgtaccaccacgaacttcgacgccattggccgcggctccagttacatcaacagtgagtgcattcgcgctaacctggccaaagctccagaggccgtgtgcattatcgccactggttttaatggaactgtttgttccgagatcgacaacagagtttttctgtacgtttatccccatggcgctgtagccctgaacatcgattgtcaggtctgtcgccgtaaaacgcgcagcaccattggcgttattgccgttgagaccaccgatataaacacctgtacttccatcggtcttgattttacttccgcttccaagatcgacactggtgccatagtcattgatggttaggcctataccgttcgagttttcaatggtgaattgagtggctgttagtgttgagctatgcccaataatgatgccgtcatcgttactcttaatggtgctgcctgtgcctaagtcagcatgggtatagtcaccaattaaattaatgccgatggcagaggtttgaccaacaacatctactgtgagtcggttagctgtcagggagctgtttttgccctgaataatgattccttttgcatatccagaggcgtcgttgacattgacggtgacatcattacccaggttgatattgccaggcgtgtttcctgctggggtcattacaccatagaggtttcctgatggatcggcggtatctccagtaattctgtcaccatcattaatagtaatattggtgccatattgacttcctgtatcagcagctatcagcagggnggaaaagagaattgcattcaaaccaatagcgccaaattttatcagttgaattgagggcgaacggatttttaattcagcgagacgatcggctttggtattcccattgtgttgtttgatgcccataccantcctatatagtacccaggctatgggtctatggattttgtcattttgtttaagtcaatgaataatatcctcttatcatcatgatatttgtatggtgcaatcatgatgagcttctctgagaataattctctattaccgggcaaaatcagaaacacagaaatta

SEQ ID NO: 347 - DNA, 4741 bp, Escherichia coli
  Strain O55:H7
  modified_base (408)..(408): a, c, g or t
  modified_base (413)..(413): a, c, g or t
  modified_base (1663)..(1663): a, c, g or t
  modified_base (1718)..(1718): a, c, g or t
  modified_base (1744)..(1744): a, c, g or t
  modified_base (2155)..(2155): a, c, g or t
  modified_base (2340)..(2340): a, c, g or t
tatttaacatcccccttacaaaggtgagtttagatcgagttattccctaagttgtcgttacttattccaattcgttactattaatatgacaaaaacattacaccaaacagcggttaaataatttggtgaatatttttggtaataatcctaattagttatgggattttcgcttgatgtatctgcataacaaaaacaatatgcgccatttttgcattactaataagaaaaagcaaaaaacatcgatattcatttttggtcaatgggttttctggtctatcgttgttattgtgctactggttatcattttcatcttgccaggatcgcacgtaatcacgttattcggggactttatctgcgggatattacccttcaggtaagtccttttctcgccagcatattggagcgtgntcaanattgatcggctgtgaagggggctgatgtgtagtggaacaaaaactgacgttatatcactgctaatgagatatccgtcatctgaacactgatgtctttaattattctcgtggttcactgtaggcaataagcacaaaagtgtaggatgttacaagaatgattaggactcggtgaaatgaaaaatccacgcaattgcgtggattttatatacttttgcgctcttcatgagatttagcgaaacctcatgagacaataaattaattagacgttgaaaaggaagttcatcacatcgccatctttcacgatgtaatctttaccttctgcacgcattttgcctgcttctttcgcgccttgttcacctttgtaagtgatgaaatcttcaaacgagatggtttgtgcacggataaagcctttttcaaaatcagtatggattttgcccgctgcctgcggcgcggttgctccaaccggaatggtccatgcacgcacttctttcaccccagcggtgaagtaagtttgcaggttcagcagcttataaccggcacggatcacacggttcagacccggctcttccagcccaagctcctgcataaactcgtcacgttcttcgtcgtccagttcggcaatgtctgcttcaacagcagcacaaaccggaaccacaacagaaccttctttcgccgcgatttcacgcacctggtcaagatatgggttgttttcaaaaccgtcttcgttgacgttggcgatgtacattgttggtttcagcgtcaggaagctcaggtaacgaatagccgctttctcttcagcgcttaaatccagcgcgcgcagcatacctgcgttttccagctggggcaggcatttttccaggaccgccagctcagctttcgcgtctttatcgccacctttggctttcttctgtacgcgatgaatcgcacgttcgcaggtgtcgaggtctgccagcgccagttcggtgttgataacttcaatatcgtcagccgggttaactttgccggaaacgtgaatgatgttgtcattttcaaagcagcgaacaacgtgaccgatcgcttcggtttcacggatgttggtcaggaactggttacccagaccttcgcctttcgatgcgccttttaccagaccggcgatatcgacaaattccatggtcgtgggaagcgtacgttgcggttttacgatttcagccagttgatccaggcgaggatcaggcattggtacgacgcctgtgttcggctcaatggtgcanaatggaaagttggccgcttcaataccggctttggtcagcgcgttgaacagggtanatttcccgacgttgggcaaaccgacnataccgcatttgaatcccatgatttaaatcaccttaatatcttaataatcaacctgttattgctaacagattgcagaaatggaaataactttgcctattatacacggcactcggcaaaaatgccgcagacaacgacttattgcgctttaaaggcgtgcaatcggttcgttgctttggtcaagccatctgtaaaccacatttcagtacaacgcgccgcttcgtcgatggcttcatcaattaacttctgttcactaacaggcggtttgcctaacacaaaaccaacaactttatttttatcgcccggatgaccgattccgatgcgtaaacggtgaaagttagggttattacccaatttactgatgatgtctttcagtccattgtgaccaccatggccaccgcccaacttaaatntggcgacgccaggaggcagatccagttcgtcgtgggccaccagaatttcgtccggattaatgcggaaaaaactggccatcgccgcaacggctttgccgctgagattcataaatgtagtcgggactaacaggcggacatcttcgcctccaagggtgactcgcgaagtataaccaaagaatttagcntcttcgcgcagcggagcgcgcaaacgctctgccagtaagtcaacgaaccaggcaccagcattatgtcgcgttgcggcgtattcagcaccggggttcgctaggccgacaatcaatttaatcgtcacgtttttttgtcctgagtgtgtacataactggcgcgtagtttactggttgcggccccgcttgacaaaaaactgcgtatcaaatgcagataacgtaataattgcctgagtggactattagaaagtcaaggtgttcaggcgtttatttgtaaagttttgttgaaataagggttgtaattgtgatcacgcccgcacataacccacagggtgttgtctatactttacacataaggaagaggggtattccctgttacaacccagaaagttccggaggtgacatatgaaacgcaaaaacgcttcgttactcggtaacgtgctcatggggttgggtctggtggtaatggtggtcggcgtggggtattcaatcctcaaccagttaccacagtttaatatgccccagtatttcgcacatggtgcagtgctaagtattttcgtcggtgccattctctggctggcgggtgcccgtgttggcgggcatgaacaggtgtgcgaccgttactggtgggttcgccactatgacaaacgttgccgccgtagcgataatcgccgtcatagctaacaaataatgcagtttgctgaccagtcagtttgcgctgactggtcaatctcgtacttataaatccgccatcgccgcgcgacgattcgggaagaacgcgaggcgtcccgggatcggttgaatgcctgcgcgagccatagtgcgcagtggctggaattccacgttgcacacgcgcagttcacatccttcgggcagacgcttcacaaaacgctggaacgcatcaagaccaccagcatcaagtaccggaacggcatcccacttcagaatcacaatccgtttgccttcaagacgtgactccaggtccgtgaataagccttcagcagcagcaaaaaacagcgggccaataacgcgcagaaccaggacatcgtctggaacatctacgactaccggtgccaggcgagtcatacgtgcgatacgacgcataaacagcagcgatgccagcacgatccccacgctgatggcaataaccatatcaaacagcacggtcagcgacatgcacagcagcatgacaatgatgtcatctttcggtgcatgacgcagcaagtcgaccactttatgcgcttcactcatgttccacgccaccatcaacagcagggctgccatagcggaaagcggcagccaggagagcagcggtgccagtaccagcagggcaagaataaccagaatagagtggatcaccgccgagataggggaagttgccccggcacggacgttagcggcagaacgcgcgatggcagcggtagcggtaataccaccaaagaacggagcgatgatattccccagcccctgtccaaccagttcgctattcgccttgtgcttcgtcccggtcataccatccagcaccacggcgcagagcagagattcgattgcgccgagcattgccattgagaatgccgcaggcagcagtgtgcgaatagaatcccaggttagcgtgaattctgaattaggcagatcccacggcagcaccagttgcggtagcagttgcggaataccgttaccctgagaaccatcggccaggacgtagtggaattgcgaaccgatggtagcaacatgtccgccgagcaggttaacaatccccatcaccgcgcaaccagccagcaaggccggaaggtgaccgggtaaacgaatgcccagacgcggccagaaaacaagaatacctagcgtcacaatgccaatggcagcatcacccacattaatggtcggcagcgccataaataatgcgccgactttttgtagataatgttccgggacatgggccatttgcagaccgagaaaatctttaatctgcatggtaccgatggtgatcccgatacccgaggtgaaacctaaggtgacggaaaccggaatatactcaatcaggcgaccaaagcgtgccagacccatcagaatcaaaaagatccccgacagcaaggtcgcaaccagcagtcctgccagcccaaactgttgcgaaacgggatagagaattaccacaaatgccgcagtcggaccggaaacgctaaagcgtgacccacccgtcagagcaatgacaatccccgcaacagctgcggtatataaaccgtactggggtgccacaccactaccaatagccaacgccatcgccagcgggatagcaataatcccgacggttatcccggcaatcaggtcacgggtaaaccgtgcggcagtatatttttctttccagcaagcgtcgatcagagcgcggaaaggcatcacatgtgaggaa

SEQ ID NO: 348 - DNA, 25752 bp, Escherichia coli
  Strain O55:H7
  modified_base (322)..(322): a, c, g or t
  modified_base (325)..(325): a, c, g or t
  modified_base (896)..(896): a, c, g or t
  modified_base (1066)..(1066): a, c, g or t
  modified_base (1781)..(1781): a, c, g or t
  modified_base (3027)..(3027): a, c, g or t
  modified_base (7181)..(7181): a, c, g or t
  modified_base (7979)..(7979): a, c, g or t
  modified_base (9338)..(9339): a, c, g or t
  modified_base (11906)..(11907): a, c, g or t
  modified_base (12448)..(12448): a, c, g or t
  modified_base (13036)..(13039): a, c, g or t
  modified_base (14727)..(14727): a, c, g or t
  modified_base (16080)..(16080): a, c, g or t
  modified_base (17743)..(17743): a, c, g or t
  modified_base (21678)..(21678): a, c, g or t
  modified_base (21706)..(21706): a, c, g or t
  modified_base (22908)..(22909): a, c, g or t
  modified_base (23935)..(23935): a, c, g or t
  modified_base (24336)..(24336): a, c, g or t
ttgttcacaataatgtttcatccgtgagcgcatcatctgtcaactaaatggcaggtgaaggaggcataggtcatacaaatggatattacagacaaaaaaacccgccgcagcgggtctttgagccgggttcgattagtgttcgaacatggcagagatcgattcttcgttgctgatacgacgaatcgcttcggccagcatacctgacagggtcagagtacgcacgttcggcagtgatttgatttcatcgctcagcggaatggtatcgcagacaacgacttcatcaattacagagttacgcaggttgttcgccgcgttgccaganaanatcgggtgagtcgcgtacgcaaatacacgtttagcaccacgttctttcagagcttcagcagctttacacagcgtaccgccagtgtcgatcatatcatcgaccagtacgcagtcacgacctgcaacgtcaccgatgatatgcatcacctgggaaacgttcgcacgcggacgacgtttgtcgatgattgccatatcggtatcgttcagcagcttagcgatagcgcgggcacgcacaacgccgccgatgtccggagaaaccacaattgggttatccagattcagctgcagcatgtcttccagcaggatcgggctaccaaatacgttatcaaccggaacgtcgaagaaaccctgaatctgttcagcgtgcagatccactgtcagcacacggtcaacaccgacgctggagaggaagtctgcaaccactttcgcagtgattggtacacgagcggaacggacgcgacggtcctggcgcgcatagccaaagtaggggataacagcggtgatacgacctgcggaagcacgacgcagggcatcaaccataacgactaattccatcaggttgtcgttagtangggcacaagtggactggatgatgaaaatatcaccaccgcgtacattttcattaatttgtacgctgacttcgccatcgctaaagcgacctacagcggcgtcgccgagtgaagtgtacaggcggttggcaatacgttgtgctagttccggggtggcgttaccagcaaaaagnttcatatcaggcacgagaagaacctcaggcatgcgtccattggtggaaagaatctgccgaaaactgtgcgggccaggcatgatcctttccaggcggtgtattaaagagcgcgatgcaacgtctggaacaaggtgacgttgtcaccgaaactcagcttgcccggcttaaagcatggctctgtgcaatggggaaagattagcgcctttcgccacaaagccattgagccattccggggcttgctctagcacctggcgggcttcagactctgtatcaaattcagcaaagacacaggcccctgtcccagtcaggcgcgacggggcgtattctaacagccaggaaagcaccgcatcaacctcgcgaaaacgttttcttgcgataacctcgcaatcattgctgaattcacattttagcaacgtttctattgacctttttggcgtattgcgcgggagttcaggatctttaaaaatcaccggagtcggaatacttacaccagggtgcgccaccagataccacttctctggcggatccaccggggttagtatttcaccaacgccttcggcaaacgcggcatgcccccgaacaaagacaggaacatctgcgcccagcgtcagccccatttccgccagctcatccatgcttagcccgcattgccagagatgatttaatgccaccaggaccgtcgcggcattggatgaaccaccgccgagaccgccgnccatcggcaaacgcttgtcaatgctgatattcgcaccgcttcccgtcggaagacgcccgctgtctgccgcagttttcatcaacaaccgcgctgcgcgaacgatcaggttatcttcatgttccacgccttcaacgggcgttaacagacggatatccccatcgtcacgaagctcaatgctgatggtgtcgccgtaatcaagaaactgaaacagcgtttgcagcgtgtggtaaccatccgcacgctgaccggtaatgtataaaaacagattaagttttgccggagagggccactgtgtccgcattatttcactatccagttatccatttttaacttgatgcgttgaccaccgtcggtgagttccatattggctggcatcgcaggttgcgttttggtgtcataaccaccataaacaaccttccagtttttgccattctggctgtaggtaatttcgctcaggcggtactggtcgtccagtttgtagtcggttgcatcacccggtaaacctaaaatccactggcgcaagctgttgagcggaattggcattccagtcaatttgccaatcatctcttcggcgtcatcggcggtataacgctgacctttattgtcgactaactgcacgttacccggttgagcattcagctccagttccgtgctgcccaatgggttagtgagcagcagacggtagcgatcctggccggtttgctgccagaaaaagcgggcgtacactttttgttggtcagaaatataagcgaacgcgccgcgagtctgatactgattaagattgcgcacgtcttgctgatgctgacgccattgtggcgaatccgggcttttgccaggacctttgggcgtggtaacggaacaggcagtgagcacaagagcagccagcggtagcaggcggataagacgaaaatcgggcaggggcatagtgatgacaagtccttgagatacgttgcagttataacccttaatgctagcgtcaccattagtcatcgtctatgttcaagttgtcttaattgtagaaatctaacgggttcgggcaattactccaaaagggggcgctcccttttattgatctcgcgcatacggtatgatgcgccgagactaaccttatcaacgttggtattatttcccgcagacatgacccttttagcgctcggtattaaccataaaacggcacctgtatcgctgcgagaacgtgtatcgttttcgccggacaaacttgatcaggcgctggacagtctgctcncacagccgatggtgcagggcggggtggtgctgtcgacgtgtaaccgcactgagctttatcttagcgtcgaagagcaggacaacttgcaagaggcgttaatccgctggctttgcgattatcacaatcttaatgaagaagatctgcgtaaaagcctctactggcatcaggataacgacgcggttagccatttaatgcgtgttgccagcggcctggattcactggttcttggggagccgcagatcctcggtcaggttaaaaaagcgtttgccgattcgcaaaaaggtcatatgaaggccagcgaactggaacgcatgttccagaaatctttctctgtagcgaaacgcgtacgcactgaaacagatatcggtgccagcgctgtgtctgtcgcttttgcggcttgtacgctggcgcggcagatctttgaatcgctctctacggtcacagtgttgctggtaggcgcgggcgaaaccatcgagctggtagcgcgtcatctgcgcgaacataaagtacagaagatgattatcgccaaccgcactcgcgaacgtgcccaaattctggcagatgaagtcggcgcggaagtgattgccctgagtgatatcgacgaacgtctgcgcgaagccgatatcatcatcagttccaccgccagcccgttaccgattatcgggaaaggcatggtggagcgcgcattaaaaagccgtcgcaaccaaccaatgctgttggtggatattgccgttccgcgcgatgttgagccggaagttggcaaactggcgaatgcttatctttatagcgttgatgatctgcaaagcatcatttcgcacaacctggcgcagcgtaaagccgcagcggttgaggcggaaactattgtcgctcaggaaaccagcgaatttatggcgtggctgcgagcacaaagcgccagcgaaaccattcgcgagtatcgcagccaggcagagcaagttcgcgatgagttaaccgccaaagcgttagcggcccttgagcagggcggcgacgcgcaagccattatgcaggatctggcatggaaactgactaaccgcttgatccatgcgccaacgaaatcacttcaacaggccgcccgtgacggggataacgaacgcctgaatattctgcgcgacagcctcgggctggagtagcagtacatcattttctttttttacagggtgcatttacgcctatgaagccttctatcgttgccaaactggaagccctgcatgaacgccatgaagaagttcaggcgttgctgggtgacgcgcaaactatcgccgaccaggaacgttttcgcgcattatcacgcgaatatgcgcagttaagtgatgtttcgcgctgttttaccgactggcaacaggttcaggaagatatcgaaaccgcacagatgatgctcgatgatcctgaaatgcgtgagatggcgcaggatgaactgcgcgaagctaaagaaaaaagcgagcaactggaacagcaattacaggttctgttactgccaaaagatcctgatgacgaacgtaacgccttcctcgaagtccgagccggaaccggcggcgacgaagcagcgctgttcgcaggcgatctgttccgtatgtacagccgttacgccgaagcccgccgctggcgggtagaaatcatgagcgccagcgagggtgaacatggtggttataaagagatcatcgccaaaattagcggtgatggtgtgtatggtcgtctgaaatttgaatctggcggtcatcgcgtgcagcgtgttcctgctacggaatcgcagggtcgtattcatacttctgcttgtaccgttgcggtaatgccagaactgcctgacgcagaactgccggacatcaacccagcagatttacgcattgatactttccgctcgtcaggggcgggtggtcagcacgttaacaccaccgattcggcaattcgtattactcacttgccgaccgggattgttgttgaatgtcaggacgaacgttcacaacataaaaacaaagctaaagcactttctgtactcggtgctcgcatccacgctgctgaaatggcaaaacggcaacaggccgaagcgtctacccgtcgtaacctgctggggagtggcgatcgcagcgaccgtaaccgtacttacaacttcccgcaggggcgcgttaccgatcaccgcatcaacctgacgctctaccgcctggatgaagtgatggaaggtaagctggatatgctgattgaaccgattatccaggaacatcaggccgaccaactggcggcgttgtccgagcaggaataatggaatatcaacactggttacgtgaagcaataagccaacttcaggcgagcgaaagcccgcggcgtgatgctgaaatcctgctggagcatgttaccggcagagggcgtacttttattctcgcctttggtgaaacgcagctgactgacgaacaatgtcagcaacttgatgcgctactgacacgtcgtcgcgatggtgaacccattgctcatttaaccggggtgcgagaattctggtcgttgccgttatttgtttcgccagcgaccttaattccgcgcccggatacggagtgtctggtggagcaggcactggcgcggttgcctgaacaaccttgccgtattctcgatctcgggacgggtaccggggcgattgcgcttgcgctggctcgcgagcgcccggactgcgaaattaccgctgtagatcgtatgcccgatgctgtcgccctggcacaacgtaatgcccagcatctggcgatcaaaaatatccacattctgcaaagcgactggtttagcgcgctagccgggcagcagtttgcgatgattgtcagcaatccgccgtatattgacgagcaggaccctcatcttcaacaaggcgatgtccgctttgagccgctcactgcgctggttgcggcagacagtggaatggcagacatcgtgcatatcatcgaacagtcgcgtaacgcgctggtatccggcggctttctgcttctggaacatggctggcagcagggcgaagcggtgcgacaggcatttatcctcgcggggtatcatgacgtcgaaacctgccgtgactatggtgataacgagcgcgtaacgctcggccgctattatcaatgacaagtttttctacactgcttagtgttcatcttattagtatcgcgctttctgttgggctattaaccttacgtttctggctacgttatcagaagcatccacaggcatttgctcgctggacgcgcattgtgccgccggttgtcgatacggtgttattgttaagcggcattgcgttgatggctaaagcgcacatcctgccattttccgggcaggcacagtggctgactgaaaagctgtttggagttatcatttatatcgttttgggttttattgcactcgattatcgtcgtatgcacagtcagcaggcgcgcattattgccttcccgctgacgttggtggtgctgtacatcatcattaaactcgccaccacaaaagtaccgttactggggtaagtcatgagatcgttagctgatttcgaatttaataaagcgccattgtgcgaaggcatgatcctggcttgcgaagcaatccgccgcgattttccctcgcaagatgtttacgacgaactggagcgtctcgttagtctggcgaaggaagaaatcagccagcttctgcctttagaagagcagctggaaaaactgatcgcgctgttttacggcgactggggatttaaagcctcacgcggcgtttatcgtctttccgatgcattatggctggaccaggtgttaaagaatcgacagggcagtgcggtatcattaggtgcggttttattatgggtcgcgaatcgtctcgatttgccgctgctgccggtgattttccctacgcagctgatattgcgcattgaatgtccggatggcgaaatttggctgattaatccttttaacggtgaatcgttaagcgaacatatgctggacgtatggttaaagggaaatatcagcccgtcggcggaactgttttatgaagaccttgatgaagctgataacattgaggtaatccgcaaattgctggatacactcaaagcctcgttgatggaagaaaatcagatggagctggcgttacgcaccagcgaagctttattacaattcaacccggaagatccctatgaaattcgngatcgcgggttgatttatgcgcaactggattgcgaacacgttgcgttgaacgatttaagttatttcgttgaacagtgtccggaagacccgatcagcgaaatgatccgtgcgcaaataaataacatcgcgcataaacatattgtgctgcattaattaatcgacattttactcaaggttaaggcgatcctatgaaacaaaaagtggttagcattggcgacatcaacgtagcaaatgacctgccgttcgtactgtttggcggtatgaacgtgctggaatctcgcgatctggcgatgcgcatttgcgagcactacgtaaccgtgacccagaaactgggtatcccttacgtgttcaaagcctcttttgacaaagccaaccgctcctccatccactcttatcgtggaccgggcctggaagaagggatgaaaatcttccaggagttgaagcagacttttggcgtgaaaattatcaccgacgttcacgaaccaagtcaggcacagcccgttgctgatgtcgtggatgtgattcagttgccggcgtttcttgctcgccagactgacctggttgaagccatggcgaaaaccggtgcggtaattaacgtcaagaaaccacagtttgtcagcccgggacagatgggtaatatcgttgataaattcaaagaaggcggcaacgaaaaagtgattctttgcgatcgtggtgctaacttcggctatgacaacctggttgtcgatatgctgggcttcagcattatgaagaaagtgtctggtaactcgccggtgattttcgacgtgacccacgcantgcaatgccgcgatccttttggcgcagcttccggcggtcgtcgtgctcaggtggctgagctggcacgagccggtatggcggtaggtctggcggggctgtttattgaagcgcatccggatccggaacatgcgaaatgtgatggtccatccgcgctgccgctggctaaactggaaccgttcctcaagcagatgaaagcgattgatgatctggtgaaaggtttcgaagaactggataccagcaagtaatcttttttgcttgaaaaataaagtcttagcgttctgcgttaagacttttttcatgggtgccggatacaaaaaaggccgcaggctgttaccctgcggccggtttcgggcgcatattgccatcacggcagcctgacgcccgttttcgccttacttccggttacgccaccagccgacaatcgctgcggtaataattcccgccaggatcggtgctgccaggtcgtgccagaaaatcatggcaaactgcgcgagcgtcatatagccgccttgttgtaatgacaacattttgcggctattcttgaattgttgatggttcaagattagcccccgttctgttgtcaggttttacctctcaacgtgcgggggttttctctttccagcaaccaatgccaccagggataaagcccccgcaacattgcgcctcaccggataacgccggcttggtgtggatactacgactcaattcatcttcacttcatccctgaaatgtttgcaatgaagagtgcattccggtttttcaacagctgttacagtcgtttcatgagtgctctggatgatgcttccagctcgggttgccaatatttacttgtggaagtgataaagacaaaaatggccgcaggctgttacccctgcggccggtttcgggcgcatattgccatcacggcagcctgacgcccgttttcaccttacttccggttacgccaccagccgacaatcgctgcggtaataattcccgccaggatcggtgccgccaggtcgtgccagaaagtcatggcaaactgcgcgagcgtcatatagccgccttgttgtaatgacaacattttgcggctattcttgaagtgtctggtttcaagattagcccccgttttgttgtcaggttttacctctcaacgtgcgggggttttctctttccagcaaccaatgccaccagggataaaacccccgcaacattgcgcctcaccggataacgccggcttggtgtggatactacgtctcaattcatcttcacttcatccctgaaatgtttgcaataaagagtacattccggcttttcaacagctgttgcagtggtttcgtgcaggttgtggtacaggctcgcaattctgattaacgaccnnccaggtagtatgaagaaatacaataagcaggaatttatattatctcccccggtttccgtcatcggaggagatataactgtcaggcaaatatcgtcatcaaataggcggcaaacagtgccagatgcgctgcgccattgagcacgttagtacgtccggtggagaaggagatatggcacagcactaaagaggccaccatcaccaccatttctggcgcaccaagtgcaaactgcaattcgttacccgtcataaaggcaattagcgtgacgacaggtacggtaagcgaaattgttgctaacactgaaccaaagaacagattcatcgcgcgctggacctggttgttcaacactgcttttaatgcacctaaaccttccggcgacagaatcaacagtgccaccaggaagccagtaaaggcgacaggggcattcatgctgtcgagcaaagtctccagcgggctggcgttcattttggtgactgcaataacggcaatcaggtggataatcaaccagatagcatgccacaggctgctatgggcagacggtttaccgtggtgcgggtcgtcgtcatcactgtcatcttcgtgctcgtagacaaacaaactttgatgcgttttggtctggatcagcaaaaatacaccatacattgccgcagaaattaatgctaccagtaacgcctgaccggttgaaaaattcgccgcaggcagagccattggaaataccagtacgattatcgccagggggaacagcgcaattaaatactgcttaataccaaacagattcatatattgggtggcaaacttacgaccgcccaacaataatgaaaagccgaccagcccaccggtaacaatcataatgatcgaatagagcgtatcacgcattagcgttggcgcggcgtcgccggttgccattaaagctgaaatcaaactaacttcaagaataaccactgaaaggctaagaataagcgaaccgtaaggttctcccaggcgatgggctaatacgtccgcatgacggacaacactaaaggcgctacttaaaataccaataagcgcaagaagattgatggcaatgaccactggtagtgtctggctgcttccccacaggaacagcactaccagcgccagaaccgggaaaataagcgaagtctccttgtggcgggtttttaccgcctcttgagcatttgacattatggttatccctttgcagatgaatttatcgaaaatgtaaaaaataggtaggaaaaataacagaaagtgtctggatatcggtaacattttacgaatttttaccccgttgtcgattttttactcattggggcataaaaataagtattacgtttaggcaatgtttgttttagcgtttcttaagaacagtctgacatgaaaattcttatgtttttgcaagagtagatattgttgaccacacttaatgttcaactttgtaaaaggagtcaacgatgccgtataaaacgaaaagcgacctgccggaaagcgtaaagcacgttctaccgtctcatgcccaggatatctataaagaagcgttcaacagcgcatgggatcaatataaagataaagaagatcggcgtgatgacgccagtcgcgaagaaaccgcgcataaagtggcctgggctgctgtgaagcatgaatatgccaaaggggatgatgataaatggcataaaaaatcgtaaaaccggtagcttagttaaagctattcgtgcggtgttgccttgcaagtggtccgcggattgcatattgtcccgttagtggtttcaaaatgagcagtaaaaatgtccggaagacaccaaaaagttgtcgcagggaagcatgcagtggcggaggtgtaagaaggtgataacgcgtgatttcttgatgaatgccgattgtaaaacggcatttggtgccattgaagaatcactcttatggtcagcagaacaacgggcggcttcgctggcggcgacgctggcttgtcgacctgatgagagaccggtgtggatcttcggttatggatcgttgatgtggaatccggcactggagtttaccgagtcgtgcaccggtacactggttggatggcatcgcgcgttttgcctgcgcctgaccgccgggcgcgggactgcgcaccagccgggacggatgcttgcactaaaagagggcggacgtaccacaggcgtcgcctatcgactgccagaagagacgctggagcaggaactaaccctgttgtggaagcgcgagatgattaccggctgttatctgccaacctggtgtcagcttgatcttgatgatggacgcacagtaaacgccattgtgtttattatggacccgcgacatccagaatatgaatctgacactcgcgctcaggtcatcgcgccgttgattgcggcggcgagcggtccgctgggaaccaacgcacaatacctgttttcactggaacaggagcttatcaaactgggaatgcaggacgatgggctgaatgatttgctggtatcggtaaaaaaactgctggcggagaattatccggatggtgtgttgcggccgggattcgcctgagtaaacttccctcatcgtggggcgtcagacnncccctcaaacattaaaatgtgagcactttatcggctgacagcgtccattgcgccagttccacaagagtaccgatttccaccccatcaatcagaggaagtgtactaatcccgcgcccgtcggtacaggttttgcacaatttcaccggtacattctgagcggtaaggatctccagcatttgctgtatgttgtagccttcccctggtttttgcccgcgcaacccggctgtgaccgcatcagacatcaggaacagacgcagatccagattgctctcctgctctcgtaacgcaatggccagccgcaagctgttaaacaaggattcgctcccgtaaggtgcgccattggcaacgatcacgattttttgcattatttactcctgtattcagggaattagacactcatcttctatcttactgcttctgcagcgtctgaccaatcggtcacatttttaaggattttcctgaaagcgcgagaaaatacgacaaaagttgccagtaatcgttattctttaaggctatgttttttcattttttaccggaagtnaccgacgttttgagccgtttcgttcctcgcattattccgttttatttactcttgctggcggcaggcggtacagctaacgcacaatctaccttcgagcaaaaagcggcaaatccctttgataataacaatgatggtctgccggatttaggcatggcgcctgaaaatcatgatggggaaaaacactttgctgaaattgtgaaagatttcggcgaaaccagtatgaatgataacgggctggatactggcgagcaggcaaaagctttcgcattgggaaaagtccgcgacgcgcttagtcaacaggttaatcagcacgtagagtcgtggctatcaccgtggggaaatgccagtgttgacgtcaaagtggataacgaaggtcattttaccggcagtcgtggaagctggtttgtgccgttacaagataatgatcgttatctcacctggagccagcttggtcttactcagcaggatgatgggctggtgagcaatgtgggcgttgggcaacgctgggcgcgcggcaactggctggtgggttataacactttttatgacaacttgctggatgaaaatcttcagcgagcgggctttggnnnngaagcgtggggcgaatatttgcgactatcggcaaacttttatcagccgtttgctgcatggcatgaacagacagccacgcaggaacaacggatggcgcgcgggtacgacctgacagcccggatgcgcatgccgttctatcaacacctcaataccagtgtcagcgtagaacagtattttggtgatcgtgttgatttgtttaactctggtacgggttatcacaatcccgtcgcgttgagtctgggattaaattacacccctgtgccattagtcactgtgacggcccagcataaacagggtgaaagtggcgagaatcaaaataacctcgggctgaatcttaattaccgctttggtgtaccgctcaaaaaacaactttctgcgggcgaggttgccgaaagtcagtcgttacgtggtagtcgctatgataatccgcagcgaaataatctaccgactcttgagtaccgacagcgaaaaacgttaacggtgtttcttgcgacaccgccgtgggatctaaaacctggcgaaacagtgccgctgaaattacaaatccgcagtcgttacggtattcggcaactgatttggcagggcgatacgcagatattaagtttgacgccgggcgcacaagccaacagcgcggagggctggacgctgatcatgcctgactggcagaacggggaaggggcgagcaatcactggcgattgtcggtggtggtggaagataaccaggggcagcgtgtctcctccaatgagatcacgctaacgcttgtcgaaccgttcgacgcattgtcaaacgacgaactgcgctgggaaccgtaatcagaaaatgcgctcctgatgcacccataccgctgcttccacgcgagacttgagcttcattttcttcagcatgtgcttgacgtgcacttttactgtgctttcggtgatgtccaggcggcgggcaatcatcttgttcggcaaaccctgggcaatcagcttgagaatatcgcgctcgcgtggggttaactggttaacatcgcgctcagtcgtggcacggttagcgcgcaagctggcggccagaacaggcgttaatgcttcgcttaataccatttcgccagcagctgcctgatgcaatgctttcagcagatcttccggttccatatcttttaacagatagccatccgcgccgcgtttcagtgcggtgaccacatcttcttcatggttagagacgctgaataccacaatgcgccctgagagggacttttcgcgcagtttatccagcgtttccagaccgttcatgccgggcatattgagatctaacaggatcagatcgggatcaagagattccgccagttcaataccctgttcgccattactcgcttcgccaaccacggtgatatctggtgccatactgataagctgttttacgccagttcgcagcatcgggtgatcgtcaatcagcaggatagtagccggttcctgattactcatgggtatctccttggacgtctgtgaaagttttttcgggaataaaggtgaccaccacttcggtgccacctgattcacgacggcggacgcggcaatcgcctcgtaaactttgcgcacggtcgcgcattattatcatgccgtagtgattgctgcggatggcattttcaggcacgccgcagccgttatcctggacggtcagtttgacctgattatcgttttgcgccacngtcaccacgacctcactcgcttgcgaatgtttgagggcgttacttaatgcctcacgggcaatttgcaacaagtggattgcctgatgcgaaggcaccagacgaggcggcaattgataatccagcttcaccgggaagccaaatttggcgctgtactcttcgcaactcgcctccagcgccggacgtaatccaggctcggtgagctgcaagcggaatgtggtgagcaattcacgcaactgcgcccaggatgcattcagttcgttacggatctgacttaacagttcgcggctgctttctggcagcgcatcgccctgcatctgtaaacaactcacctgcatcttcatgcaagagagagattgggcaatagaatcatgcagttcgcgcgcaatggtggcacgctcttccatcacgatcaactgttgctgacgttcctgatgccgatccagcgccagcgtggcggtgagttgttcaaccagggtatccaccagttgttgttgatcatggctaagatgacgcccctgcggtagggtcgccagcaaaataccgtactgcgtatgagagtcagccagccgccacttcagggtcgtgccgcgatcaccaacgggtaatacgccgcgcgggcagagctggcagcctttatcatcacaagtcatatctggctggcaggtaaactcctgatgattctcttcatcatcagtgtcatacacccgcagttcgatatcacgtagcagggttaaattctgtaagccgttgagtacaggtgacaggcgttcacacagcggggcgcgggaatgcaaacggcggttagcctgccataaaaaagagaggatctgatttttatgctccagcccggcggttttctcctgaacccgctgctcaagtacggcataactttcggccagttctgcagacatattgttcaacgcagttccaagcatcgccatttcgttgcgcccgctgatgtttgcgcgttgggtaaaatcgcgatggctgacggcactcgccattgccagcagttgccgccacggttgtagcagtcgcgcccgcaaccagataatagtgaacaccagtaaaagtgccataaataccgccattacccgatggaccagtaccactgtctcaatgcgcatttccgtggtgcggtcaaaaccagataccagctgatcaagcccggcaacaaactggctgacatccgctgacaccgtttcgcggttttgtgcacgcatcagtgcagggatgagttcattacgccagtaatcttgtaaaccctgtaattgcgccagttgtccgtctcgttctgctgctcgagtcaactcggcgctaaatgccgtttgttccatctctttaattaagggnttgtctttctcgcttaatggcactgctgccaacagacggtaactttgcatgcgcagcgatcccgctttgttgatcgcatgggcgctgccctgaacgccttgcaccagccagccagaaaccgccatccctgccagtccaatagcagtagaaagcaacacaataagcgcaacctgattaaccagggtgagcggagagagacaacgtttaagcatgtaaacctcttccttcaggctttaaatgagcaataaccttaatgaatgtgacgatacattctggaatggcagtattctcggctattggctgaagtatacccatacccggaaagagttactccttatttgccgtgtggttagtcgctttacatcggtaagggtagggattttacagcaccgtgaaaaatctcataatttttatgaaatcactgtactcactatgggtaatgataaatatcaatgatagataaagttatcttatcgtttgatttacatcaaattgcctttagctacagacactaaggtggcagacatcgaaacgagtatcagaggtgtctatgagtcactcatccgcccccgaaagggctactggagctgtcattacagattggcgaccggaagatcctgcgttctggcaacaacgcggtcaacgtattgccagccgcaacctgtggatttccgttccctgtctgctgctggcgttttgcgtatggatgttgttcagcgctgttgcggtgaacttaccgaaagtcggttttaattttacgaccgatcagctatttatgttgactgcgctgccttcggtttctggcgcgttattacgtgttccatactcctttatggttcctatcttcggtggtcgtcgctggacggcgttcagcaccggtattctgattattccttgtgtctggctgggttttgccgtgcaggatacctccacgccttatagcgtcttcatcatcatctctctgctgtgcggctttgctggcgcgaacttcgcatccagtatggcaaacatcagcttcttctttccgaaacagaagcagggtggcgcgctgggcctgaatggtggtctgggcaacatgggcgttagcgttatgcagttggttgctccgctggtggtatcactgtcgattttcgcagtatttggtagccagggcgtcaaacagccggatgggactgagctgtatctggcgaatgcgtcctggatatgggtgccgttccttgccatcttcaccattgcggcgtggtttggcatgaacgatcttgctacctcgaaagcctccatcaaggagcagttgccggtactcaaacggggtcatctgtggattatgagcctgctgtatctggcaaccttcggttccttcatcggcttctccgcgggctttgcgatgctgtcaaaaacgcagttcccggatgttcagattctgcaatacgctttcttcgggccgtttattggtgcgctggcgcgttctgcaggtggtgcattatctgaccgtctgggcggaactcgtgtcacgctggtgaactttattctgatggcgattttcagcggcctgctgttcctgaccttaccgactgacgggcagggcggaagcttcatggcgttcttcgcggtcttcctggcgctgttcctgacagctgggctgggtagtggttccactttccanatgatttccgtgatcttccgtaaactgacaatggatcgcgtgaaagcagaagggggttctgacgaacgtgcgatgcgtgaagcggcaaccgacacggcggcggcgttgggtttcatctctgcgattggcgcgattggtggcttctttatcccgaaagcgttcggtagctcgctggcattaacgggttcgccagtcggcgcaatgaaagtatttttgattttctatatcgcctgcgtagtgattacctgggcggtatatggtcggcattctaaaaaataaatcttaatatttgattatcctttgcgcggcatgatgtcgcgctttttttatgcgtcatttagttacaacatactaatgttatatggtttatttcgccggatttcattaagagccattaatatgttacccatggggaatactccttaatacccatttgcataaaaatcttaatagtttaaataactacaggtataaaacatcttaatttacagtatgttatgctgtaactgttaattatcctaaaggggtatcttaggaatttactttatttttcatccccatcactcttgatcgttatcaattcccacgctgtttcagagcgttaccttgcccttaaacattagcaatgtcgatttatcagagggccgacaggctcccacaggagaaaaccgatgagtaaattcctggaccggtttcgctacttcaaacagaagggtgaaacctttgccgatgggcatggccagcttctcaataccaaccgtgactgggaggatggatatcgccagcgttggcagcatgacaaaatcgtccgctctacccacggggtaaactgcaccggctcctgcagctggaaaatctacgtcaaaaacggtctggtcacctgggaaacccagcagactgactatccgcgtacccgtccggatctgccaaaccatgaacctcgcggctgcccgcgcggtgccagctactcctggtatctttacagtgccaaccgcctgaaatacccgatgatgcgcaaacgcctgatgaaaatgtggcgtgaagcgaaggcgctgcatagcgatccggttgaggcatgggcttctatcattgaagacgccgataaagcgaaaagctttaagcaggcgcgtggacgcggtggttttgttcgttcttcctggcaggaggtgaacgaactgatcgccgcatctaacgtttacaccatcaaaaactacggcccggaccgtgttgctggtttctcgccaattccggcaatgtcgatggtttcttacgcatcgggtgcacgctatctctcgctgattggcggtacttgcttaagcttctacgactggtactgcgacctgcctcctgcgtctccgcaaacctggggcgagcaaactgacgtaccggaatctgctgactggtacaactccagctacatcatcgcctggggttcaaacgtgccgcagacgcgtaccccagatgctcacttctttactgaagtgcgttacaaaggcaccaaaactgttgccgtcacaccagactacgctgaaatcgccaaactgtgcgatctgtggctggcaccgaaacagggcaccgatgcggcaatggcgctggcgatgggccacgtaatgctgcgtgaattccatctcgacaacccaagccagtatttcaccgactatgtgcgtcgctacaccgacatgccgatgctggtgatgctggaagaacgcgacggttactacgctgcaggtcgtatgctgcgcgctgctgatctggttgatgcgctgggccaggaaaacaatccggaatggaaaactgtcgcctttaataccaatggcgaaatggttgcgccgaacggttctattggcttccgctggggcgagaagggcaaatggaatcttgagcagcgcgacggcaaaactggcgaagaaaccgagctgcaactgagcctgctgggtagccaggatgagatcgctgaggtaggcttcccgtactttggtggcgacggcacggaacacttcaacaaagtggaactggaaaacgtgctgctgcacaaactgccggtgaaacgcctgcaactggctgatggcagcaccgccctggtgaccaccgtttatgatctgacgctggcaaactacggtctggaacgtggcctgaacgacgttaactgtgcaaccagctatgacgatgtgaaagcttataccccggcctgggccgagcagattaccggcgtttctcgcagccagattattcgcatcgcccgtgaatttgccgataacgctgataaaacgcacggtcgttcgatgattatcgtcggtgcggggctgaaccactggtatcacctcgatatgaactatcgtggtctgatcaacatgctgattttctgcggctgtgtcggtcagagcgggggcggctgggcgcactatgtaggtcaggaaaaactgcgtccgcaaaccggctggcagccgctggcgtttgccctcgactggcagcgtccggcgcgtcacatgaacagcacctcttatttctataaccactccagccagtggcgttatgaaaccgtgactgcggaagaactgctgtcgccgatggcggataaatcccgctataccggacatctgatcgactttaacgtccgtgcagaacgcatgggctggctgccgtctgcgccgcagttaggcactaacccgctgactatcgctggcgaagcagaaaaagccgggatgaatccggtggactatacggtgaaatccctgaaagagggttctatccgtttcgctgcggaacagccggaaaacggcaaaaaccacccgcgtaacctgtttatctggcgttctaacctgctcggttcttccggtaaaggtcatgagtttatgctcaagtacctgctggggacggagcacggtatccagggtaaagatctggggcagcagggcggcgtgaagccggaagaagtggactggcaggacaatggtctggaaggcaagctggatctggtggttacgctggacttccgtctgtcgagcacctgtctctattccgacatcattttgccgacggcgacctggtacgaaaaagacgacatgaatacttcggatatgcatccgtttattcacccgctgtctgcggcggtcgatccggcctgggaagcgaaaagcgactgggaaatctacaaagccatcgcgaagaaattctccgaagtgtgcgtcggccatctgggtaaagaaaccgacatcgtcacgctgcctatccagcacgactctgccgctgaactggcgcagccgctggatgtgaaagactggaaaaaaggcgaatgcgacctgatcccaggcaaaactgcaccgcacattatggtcgtagagcgcgattatccggcaacttacgaacgctttacctctatcggcccgctgatggagaaaatcggtaacggcggtaaagggattgcctggaacacccagagcgagatggatctgctgcgtaagctcaactacaccaaagcggaaggtccggcgaaaggccagccgatgctgaacaccgcaattgatgcggcagagatgatcctgacactggcaccggaaaccaacggtcaggtagccgtgaaagcctgggctgccctgagcgaatttaccggtcgtgaccatacgcatctggcgctgaataaagaagacgagaagatccgcttccgcgatattcaggcacagccgcgcaaaattatctccagcccgacctggtctggtctggaagatgaacacgtttcttacaacgccggttacaccaacgttcacgagctgatcccatggcgtacgctctctggtcgtcagcaactgtatcaggatcaccagtggatgcgtgatttcggtgaaagcctgctggtttatcgtccgccgatcgacacccgttcggtgaaagaagtgataggccagaaatccaacggcaacccggaaaaagcgctcaanttcctgacgccgcaccagaagtggggtntccactccacctacagcgacaacctgctgatgctgactttaggtcgcggtggtccggtggtctggttgagtgaagccgatgccaaagatctgggtatcgccgataacgactggattgaagtattcaacagcaacggtgctctgactgcccgtgcggttgtcagccagcgtgttccggcagggatgaccatgatgtaccacgcgcaggaacgtatcgttaacctgcctggttcggaaattacccaacagcgtggtggtatccataactcggtcacccgtatcacgccgaaaccgacgcatatgatcggcggctatgcccatctggcatacggctttaactactacggcaccgtaggttctaaccgcgatgagtttgttgtagtgcgtaagatgaagaacattgactggttagatggcgaaggcaatgatcaggtacaggagagcgtaaaatgaaaattcgttcacaagtcggcatggtgctgaatctcgataagtgcatcggctgccacacctgttcagttacctgtaaaaacgtctggaccagccgtgaaggcgtggaatacgcgtggttcaacaacgtggaaaccaagccgggccagggcttcccgactgactgggaaaaccaggaaaaatacaaaggcggctggatccgtaaaatcaacggcaaactgcaaccgcgcatgggtaaccgtgccatgctgctgggtaaaatcttcgctaacccgcatctgccggggatcgacgattattacgagccgttcgattttgactatcagaacctgcataccgcgccggaaggcagcaaatcgcagccgattgcccgtccgcgttcgctgattaccggggaacggatggcgaaaatcgaaaaagggccgaactgggaagatgacctgggcggtgagtttgacaaactggcgaaagacaagaacttcgacaacatccagaaggcgatgtatagccagttcgaaaacaccttcatgatgtatttgccgcgcctgtgcgaacactgcctgaacccggcatgtgtggcgacctgcccgagcggtgcgatttacaagcgtgaagaagatggcatcgtcctgatcgaccaggataaatgccgtggctggcgtatgtgcatcaccggatgcccgtacaaaaaaatctacttcaactggaagagcggtaagtctgagaagtgcatcttctgctatccgcgtattnnagcgggtcagccgaccgtgtgctcagaaacctgtgtcggtcgtatccgttatcttggcgtgctgctgtacgatgccgacgcgattgaacgtgcagccagcaccgagaacgagaaagatctctaccagcgtcagctggaggtgttcctcgatccgaacgatccgaaagtcatcgagcaggcgattaaagacggtattccgctgagcgttattgaagctgcacagcagtcgccggtttataaaatggcaatggaatggaaactggcgctgccgctgcatccagaatatcgcacactgccgatggtctggtacgtgccgcctctgtctccgattcagtctgcagcagacgcgggtgagctgggtagcaacggcattctgccagacgtcgaaagcctgcgtattccggtacagtatctggcgaatctgctgaccgccggtgataccaaaccggtactgcgcgcgctgaaacgtatgctggcgatgcgtcattacaaacgtgctgaaaccgttgacggtaaagttgatacccgtgcgctggaagaggtcggtctgaccgaagcccaggcacaggagatgtaccgttatctggcgattgctaactacgaagatcgctttgtggtgccgagtagtcatcgtgaactggcacgggaagccttcccggagaaaaatggctgcggctttacctttggtgatggctgccacggttcagataccaaattcaatctgttcaacagccgtcgtatcgatgccatcgatgtgaccagcaaaacggagccgcatccatgatcgaactcgtgattgtatcgcgtctccttgaatatccggatgctgccttatggcagcatcaacaagagatgtttgaggcgattgccgcgtcgaaaaatctgccaaaagaggatgcccatgcgctgggcattttcctgcgcgatttaacgacgatggatccgctcgatgcccaggcgcagtacagcgaactgttcgaccgtggccgcgccacgtcactgttgctgtttgaacatgtgcacggngaatcccgcgaccgcggccaggcgatggtggacctgctggcgcagtacgagcagcacggcttgcagttaaacagccgcgaattgccggatcatctgccgctgtatctggagtacctggcgcagctgccgcaaagcgaagccgtggaaggtttgaaagatatcgcgccgattctggcattgctgagtgcgcgtctgcaacagcgtgaaagccgttatgccgtgctgtttgatctgctgctgaaattggccaataccgctatcgacagcgacaaagtggcggaaaaaattgccgacgaagcgcgcgatgatacgccgcaggcgctggatgctgtttgggaagaagagcaggttaaattctttgctgacaaaggctgcggtgattcagcaatcactgctcatcngcgtcgctttgccggtgccgtcgcgccgcaatatctgaatatcaccaccggaggacagcactaatgcaattcctgaatatgttcttctttgatatctacccgtacatagccggggcggtcttcctgattggtagctggctgcgttatgactacgggcagtacacctggcgcgcggcgtccagccagatgctggatcgcaaagggatgaacctggcgtcgaacctgttccatatcggtattctggggatttttgtcggtcacttcttcggtatgttgacgccgcactggatgtatgaagcctggctgccgattgaagtgaaacagaaaatggcgatgtttgctggtggtgccagcggcgtgctgtgtctgattggcggcgtgcttttgcttaaacgtcgtctgttcagcccacgcgtgcgtgcaacgactaccggagcggatatactgatcctgtcgctgctcgttatccagtgcgcgctgggcctgttgaccattccgttctccgcccaacatatggacggtagcgagatgatgaaactggttggctgggcgcagtcggtagtgaccttccacggtggcgcttctcaacacctcgatggtgtggcgtttatcttccgtctacacctggtgctggggatgacgttattcctgctgttcccgttctcgcgtctggtacacatctggagcgtaccggtggagtatctgacacgtaagtaccagctggtgcgcgctcgtcactaagcgaattttagttcacatagaccctgcttcggcggggtttttttatgggcacggtgcggggtgagttgtcggatgcgcttcgcttatccgacctacaagggaggatattgtaggtccggtaaacgtggtgccattgggcaaaattagctcggagtaacaggttttgattatttcaggaagcgatggtggtgggggaaggattactcagcgctgcgcgcttcgcccttcgggtcgttgcctgcggcaacgctctctcgctggcgctcgagtcgaaccttagtcgaagcttctcatccttctccgcttgggcagaatatttatttacggattcgcttgagagttcagggacttttgaaagtgatggtggtgggggaaggattcgaaccttcgaagtcgatgacggcagatttacagtctgctccctttggccgctcgggaaccccaccaggggtaattcaaattttgaggtaatgcttgagatggcggtgggggaaggattattcgtcgcttcgctcctcacccttcgggccgttgcctgtgaaaacgttctctcgctttcgctcgagtcgaaccttagtcgaaggttctcacccttccccgatgagtgcaaactttcacaatctcaccgaagttaccacatcgctgtggtgaatcatggtggtgggggaaggattc

SEQ ID NO: 349 - DNA, 5466 bp, Escherichia coli
  Strain O55:H7
  modified_base (14)..(15): a, c, g or t
  modified_base (861)..(861): a, c, g or t
  modified_base (1072)..(1072): a, c, g or t
  modified_base (1089)..(1089): a, c, g or t
gaagtcgatgacgnnagatttacagtctgctccctttggccgctcgggaaccccaccacggggtaatgctttttactggcctgctcccttatcgggaagcggggcgcatcatatcaaatgacgcgccgctgtaaagtgttacgttgagaaaaatgaactggttgcgtaattttcatccgtaacggattaaaggtaaccagttatttttgctggcgattaaagaataatcgtccgattaccgtaaacaaagacgcgctgcgccagtactttgtagagcgcgcgacttaagacgtttttctcgacgtcacgacctgcgcgcatcatatcttcagctgtgtaggtatgatcgacatgaataacgtcctgcatgatgattgggccttcgtccagattgtcattcacatagtgagcggttgcgccaataatcttcacgccacgttcataggcctggtgataaggacgtgcgccgataaacgctggcaggaaggaatggtgaatattgatgatcttattcgggaagcgtgacacaaattccggtgttaatacccgcatatacttcgccagcaccacgtagtcaggttgataagcatcaatggcatccgccatcttttgatcgtgctcgttgcggcttaacccttcatggcttaccagctcaaacggtatatcaaaacgctcaaccagagaacgtaaagtatcgtggttaccaatcactgccgcgatttcgacatccaggccgccataattggctttcatcaacaaatcgccaaggcaatgcgcttctttagtgaccagaatcactatccggcgacgaccggcaggattcagctcacgcacggagccttctggcaatgcgctatcganatccgccagcagggtggaatcattaaaaatcccttccagttccgtgcgcataaaaaagcgcccggtacggtgatcaacaaattcattgttctgtacgatatttaactcgtgcttgtagcaaatattggtaatacgtgcgatcagacctttttggtccggacaaatagtacgcagaactttacgttggagtgaatgcattgctggaaaaacnttgttgagagtgtttgntaaaccgtaccgtcaaccattattggccgcagcactttttaaattttttacctgaaccacaagggcagggatcgttgcggccaaactgcggacgtgtaccgtcaatatagtaccattgaccgttttctttcaaaaatcgcgaacgttcaattattgcacctgttttgccaccttcggtaaatcgagcaacaaaactgacaaatccgatattgtcggcgtcctgccaacaatgttcaaatacggtcaatcccaaccattcagtatgcgcaaatccggcaatcaattcggcacgtaacgccgctgctccacaagatggatgccaggtctttattaaataatctgcgtcttgcatcacaaaagcgcagtaacgcgaacgcatgagatgttctggatcaggtgcaaccttttcaccagacacataagggtggcaacataggctatactcgacagcactaccacagggacaaagctgagacacaaataatctccctggaaacaataacggcgtattaaccgcctgagtagcactatgttaaccgagcagtagcgatgtggctacgattgcattccaggggaatcttgcgggaataatgagaaagataaaaatagggctggcgctgggatctggcgcggcgagaggttggtcgcatattggcgttattaatgcgctaaaaaaagtgggtattgaaattgatatcgttgcaggatgttcaattggttcgctggtgggcgcggcctatgcatgcgatcgattatctgcgctggaagattgggtgacctctttcagttattgggatgttttacgactgatggatctctcctggcagcgcggtgggttactgcgcggcgagcgtgtcttcaatcaataccgcgaaataatgccggaaacagagatcgaaaattgttcccgtcgcttcgcggctgttgccaccaatttaagtactgggcgtgaattatggtttactgaaggcgatctccatcttgctattcgcgcatcatgcagtattccaggactaatggcacccgttgcgcataacggctactggctggttgatggggcagtcgttaacccaattcctatttcgctcacgcgtgcattgggtgctgatattgtgatagcggtcgacctgcagcacgatgctcatttgatgcaacaagatttgctctcctttaatgtcagtgaagaaaatagcgagaatggtgattctctgccgtggcatgcgcgtctgaaagaaaggttaggcagtataacgacacgtcgggcggtgacagcaccaacggcaacagagattatgaccacttctatccaggtgctggagaaccgccttaaaaggaaccgcatggcaggtgatccgcccgatattctgattcaacctgtttgcccgcaaatatctacgcttgatttccatcgcgcgcacgctgccattgcggccgggcagctggcagtggaaaagaaaatggacgaacttttgccgttggtacgcaccaacatttgaccagaatttttatctacacttaagttaattctgacaggcgcaggtggcaatagcatgccactattgagtaaagccagtcaggggagagaacatgacgcagccattggtcggaaaacagattctcattgttgaagatgagcaggtatttcgctcgcttctggattcgtggttttcctcattgggagcgacaacggtactggcggctgatggggtggatgcccttgagttgctgggaggtttcactccagacctgatgatatgtgatatcgcgatgccacgaatgaacgggcttaaactgctggagcatatacgtaacagaggcgaccagaccccagttctggtgatatctgccactgaaaatatggcagatattgccaaagcgttacgtctgggcgttgaagatgttttgctgaaaccagttaaagatctgaatcgcttgcgcgagatggtttttgcctgtctctatcccagcatgtttaattcgcgcgttgaggaagaggaaaggctttttcgcgactgggatgcaatggttgataaccctgccgcagcggcgaaattattacaggaactacaaccgccggttcagcaggtgatttcccattgccgggttaattaccgtcaattggttgccgcggacaaacccggcctggtgcttgatattgccgcactttcggaaaacgatctggcattttattgccttgatgtaacccgagctggacataatggcgtacttgctgccttgttattacgcgcattgtttaacggattattacaggaacagcttgcacaccaaaatcaacggttgccagagttgggcgcgttattgaagcaggtaaaccatttactccgtcaggccaatctgccggggcagtttccgctattagttggctattatcatcgcgaactgaaaaatctcattctggtttctgcgggtctgaatgcgacgttaaataccggcgaacaccaggtgcaaatcagtaatggtgttccgttaggcactttaggtaacgcttatttgaatcaattgagccagcgatgcgatgcctggcaatgccaaatatggggaaccggtggtcgactgcgcttgatgttgtctgcagaatgagcaaacgataacgcgggctaaatttgcattaccagctaatgtcggctggtggtactatcgtcgccattcgtataagtaattgtcttaattatgctaactcgcatccttttcagaacttagcccctccggggtgctgatatactgggatgcgatacagaaatatgaacacgttcaaaacacgaacagtccaggagaatttaaatggctgccattaatacgaaagtcaaaaaagccgttatccccgttgcgggattaggaaccaggatgttgccggcgacgaaagccatcccgaaagagatgctgccacttgtcgataagccattaattcaatacgtcgtgaatgaatgtattgcggctggcattactgaaattgtgctggttacacactcatctaaaaactctattgaaaaccactttgataccagttttgaactggaagcaatgctggaaaaacgtgtaaaacgtcaactgcttgatgaagtgcagtctatttgtccgccgcacgtaactattatgcaagttcgtcaggggctggcgaaaggcctgggacacgcggtattgtgtgctcacccggtagtgggtgatgaacctgtggctgttattttgcctgacgttattctggatgaatatgaatccgatttgtcacaggataacctggcagagatgatccgccgcttcgatgaaacgggtcatagccagatcatggttgaaccggttgctgatgtgaccgcatatggcgttgtggattgcaaaggcgttgaattagcgccgggtgaaagcgtaccgatggttggcgtggttgaaaaaccaaaagcggatgttgcgccgtctaatctcgctattgtgggtcgttacgtacttagtgcggatatttggccgttgctggcaaaaacccctccgggagctggtgatgaaattcagctcaccgacgcaattgatatgctaatcgaaaaagaaacggttgaagcctatcatatgaaagggaagagccatgactgcggtaataaattaggttacatgcaggccttcgttgaatacggtattcgtcataacacccttggcacggaatttaaagcctggcttgaagaagagatgggcattaagaagtaacatccgtatcggtgttatccacgaaacggcgttgagcaatcgacgccgtttttttatagcttattcttattaaattgtcttaaaccggacaataaaaaatcccgccgatggcgggattttaagcaagtgcaatctacaaaagattattgcttgatcaggaaatcgtcgagggatttaccttgctcatccattgcttttttgattacagctggagtacggccctggccagtccaggttttagtttcgccgttttcgtcaacgtagctatattttgccggacgctgagcacgtttagctttggtgccagattttacggcggcaaggctattcagcagctcgttcgggtcaataccgtcagcgatcagcatttcgcgatattgctgcagtttacgagtgcgctcttcaacttcagcagcagccgcgctttcttcttcgcgacgttcgttaacaacaacttctaatttttccagcatttcttccagcgtttcaagtgtacattctcttgcctgcgcacgaagagtacggatgttgttcagaattttaagtgcttcgctcattgtagtaatctcaaacttatattggggtggtttgttgaggtaataatagagccttaaattcagttgtgcaatagccaggaatgtaaggaattcaaaattgttctttatt

SEQ ID NO: 350 - DNA, 8692 bp, Escherichia coli
  Strain O55:H7
  modified_base (586)..(586): a, c, g or t
  modified_base (1067)..(1067): a, c, g or t
  modified_base (1965)..(1965): a, c, g or t
  modified_base (3580)..(3580): a, c, g or t
  modified_base (4330)..(4330): a, c, g or t
  modified_base (5466)..(5466): a, c, g or t
  modified_base (6514)..(6514): a, c, g or t
  modified_base (6535)..(6535): a, c, g or t
  modified_base (6650)..(6650): a, c, g or t
  modified_base (6653)..(6653): a, c, g or t
  modified_base (7044)..(7044): a, c, g or t
  modified_base (7924)..(7924): a, c, g or t
ccgccaataaatatcttttcataaaattagccagaaaagacgcggcatatagccctatttgtaccgatgatttcgcagcacgtgaggttaaaacttcctgattcatgtcacattttatggggagattatcgtaggctgacgacctttcagtcttctgtattagtcgtgtttacgagaattccctattaagcgaatgatgaaaagtagaacagtcgcaataagagcagggacttagtattgcactatctcctggaggtcaacagagggctattacttgcgcaacaggttaaagattgtgaatagttaccagcagtcatttacccgcttataacaagcgaggcagttgtaatgatagctcagaaggattatgcaaggcttcgtaagggagaacgcatataccacttctgtgcatactgttgagctgaaaaactgacgaattatgataaactccagccaactttatttcatatcattgagggcctgtggctgatggcacagctatatttctactattccgcaatgaatgcgggtaagtctacagcattgttgcaatcttcatacaattaccaggaacgcggcatgcgcnctgtcgtatatacggcagaaattgatgatcgctttggtgccgggaaagtcagttcgcgtataggtttgtcatcgcctgcaaaattatttaaccaaaattcatcattatttgatgagattcgtgcggaacatgagcagcaggcaattcattgcgtactggttgatgaatgccagtttttaaccagacaacaagtatatgaattatcggaggttgtcgatcaactcgatatacccgtactttgttatggtttacgtaccgattttcgaggtgaattatttattggcagccaatacttactggcatggtccgacaaactggttgaattaaaaaccatctgtttttgtggccgtaaagcaagcatggtgctgcgtcttgatcaagcaggcagaccttataacgaaggtgagcaggtggttattggtggtaatgaacgatacgtttctgtatgccgtaaacactataaagaggcgttacaagtcgnctcattaacggctattcaggaaaggcatcgccacgattaataagaatttctttactgacagggtgagcagggcacttttatcctgtcagttcgttttacgcacttcttccgggctatacacccttctcggcagtttttaacgccgctatacgcctcacagggctcttaagcaccgacgttgacttgtgacctgtaaagtacaatatccctgtgtttaggcgttatacatcgtcgcaaatatgatgaaggctaatgctgtcggtttatggaaaagttgctttgggtaaacaaaaaaacggccccagaaggggccgtttatgttgccagacagcgctactgattaagcggattttttcgcttttttctcagctttagccggagcggcttcttttttcgctgcagtttcaccttctacataatcacgaccgtagtaggtatccagcagaatctgtttcagctcggagatcagcgggtaacgcgggttagcgccagtgcactggtcatcgaatgcatcttcagacagtttatccacgttcgccaggaagtctgcttcctgaacgccagcttcacggatagatttcggaatacccagttcagccttcagcgtttccagccatgccagcagtttctcgatcttagcagcagtacggtcgcccggtgcgctcagacccaggtggtcggcaatttcagcataacgacggcgagcctgcggacggtcatactggctgaatgcagtctgcttggtcgggttgtcgttcgcattgtagcgaataacgttacaaatcagcagggcgtttgccagaccgtgcggaatatggaactgggaacccagtttgtgcgccattgagtgacatacacccaggaaggcgttcgcaaacgcgatacccgcgatagtcgntgcactgtgaacacgttcacgcgctaccggatttttagacccttcgtggtaggacgctggcagatattctttcagcagtttcagtgcctgcagagcctgaccatcagagaactcagatgccagtacagaaacataagcttccatggcgtgagttactgcgtccagaccaccgaaagcacacagggacttcggcatgtccataaccaggttggcgtcgacaatcgccatatccggggtcagcgcatagtccgccagcgggtatttctgaccagtagcgtcgtcagttacaaccgcaaacggagtgacttcagaacctgtaccagaagtggtggtgacagcaatcattttcgctttcacgcccattttcgggaacttgtagatacgtttacggatatccataaagcgcagcgccagctcttcgaagtgagtttccggatgttcgtacataacccacatgatcttcgcggcgtccatcggggaaccaccacccagcgcgataatcacgtctggtttgaaggagtttgccagttctgcacctttacgaacgatgctcagggtcgggtccgcttctacttcgaagaagacttcagtttcaacgcctgctgctttcagtacggaagtgatctgatcagcataaccattgttgaacaggaagcggtcagtcacgatgagcgcacgtttgtggccatcagtaatcacttcatccagcgcgattggcagggagccacggcggaagtagatagatttcggaagtttgtgccacaacatgttttcagctcgcttagcaacggttttcttgttgatcaggtgtttcggaccaacgttttcagagatggagttaccaccccaggaaccacaacccagagtcagggaaggtgcgagtttgaagttatacaggtcaccgataccaccctgagaagccggggtgttaatcaggatacgagccgttttcattttctgaccgaagtaagaaacgcgagccggttggttatcctggtcagtgtacaggcaagaggtatgaccgataccacccatagcaaccagtttctctgctttttctaccgcgtcttcgaaatctttagcgcggtacattgccagagtcggggacagtttttcatgtgcgaacggttcgctttcatcaacaacggtcacttcaccgatcagaatcttggtgttttctggtacagagaagcctgccagttcagcaattttataggctggctgaccaacgatagccgcgttcagcgcaccgtttttcaggataacgtcctgaacagctttcagctctttaccctgcaacagatagccgccgtgggttgcgaaacgttcacgtactgcgtcataaacagagtcaacgacaacaacagactgttcagaagcacagattacgccgttgtcgaaggttttggacatcagtacagatgcaactgcacgtttgatatcagcagtttcatcgataacaaccggagtgttgcccgcgcctacgccgatagctggtttaccggagctgtatgcggctttaaccatgcccggaccaccagtcgcgaggatcaggttgatgtctgggtggtgcatcagtgcgttagacagttcaacagaaggttgatcgatccanccgatcagatctttcggagcaccggcagcgatagcagcctgcagaacgatatcagccgctttgttggtcgcatcttttgcacgcgggtgcggggagaagataatggcgttacgggtcttcagactgatcagcgatttgaagatagctgttgaagtcgggttagtggtcggaacgataccgcaaataataccgattggttcagcgatagtgatggtaccaaaagtgtcgtcttcagacagaacaccacaggttttttcatctttataggcgttgtagatatattcagaagcaaagtggtttttgatcactttatcttcgacgatacccatgccggattcggcaacggccattttcgcgagtgggattcgagcatctgcagcagccagagcggcggcgcggaagattttgtctacttgctcttgagtgaaactggcatattcacgctgggctttttttacacgctctacgagtgcgttaagttcagcgacattagtaacagccataatgctctcctgataatgttaaacttttttagtaaatcatctgctcgaatacgagagtatagtcagtgcggtgatgatttgcttaaccaatgaaaatcaaaagcttactcgcgcacacactcactgtgatttactaaaagagtttaaacattagagttattatctctaatgcgtcacttccaagtggcgtaagcaagattactcacttctgggtactgattacgtgatccaaatcaaatttttgcanagctgacacctttcagcatcgcttttcgccattatagctaacagttaataaattgtagtatgatttggtggctacattagcatgttttgcacaactagataacaataacgaatgatagcaattttaagtagttaggaggtgaaaaatgctgtcaaaaggcgtattgtcagcgcgtcttttcaaccttatttatggctaacattatccggcttttgcttcggagctaaccgtgattcagaccctttttgattttcccgtttacttcaaatttttcatcgggttatttgcgctggtcaacccggtagggattattcccgtctttatcagcatgaccagttatcagacagcggcagcgcgaaacaaaactaaccttacagccaacctgtctgtggccattatcttgtggatctcgctttttctcggcgacacgattctgcaactttttggtatatcaattgattcgttccgtatcgccgggggcatcctggtggtgacgatagcgatgtcgatgatcagcggcaagcttggcgaggataaacagaacaagcaagaaaaatcagaaaccgcggtacgtgaaagtattggtgtggtgccattggcgttgccgttgatggcggggccaggggcgatcagttctaccatcgtctggggtacgcgttatcacagcattagctatctgtttggtttctttgtggctattgcattgttcgctttatgttgttggggattgttccgcatggcaccgtggctggtacgggttttacgccagaccggcatcaacgtgattacgcgtattatggggctattgctgatggcattggggattgaatttatcgttactggtattaaggggattttccccggcctgcttaattaattcctttcaaatgaaacggagctgccatgctcccgtttacttcgtcattatttttactttgttcccgcgcagttatcaaaagcaaaaggaataggtaaaaatattcttctcaaattacagttagttataaggatttccttaactgcttctcctcatcatcatgttattttcgccacatcataatcctgggcttgctgaagaataattgaaatgatattagtaattccactgcctttggtagaggaaagtgctaaataanaatcaattgttaaattattgtgcatttcactactggaactgtaatcagaaaagatcgacatgcttaaccaatctctatttgattgaatttaaagatgtttgttaagacatggatgcaagctatagattctgatacggtcaataaaagagaattgcttaacaattttgcaaaatgtattggcgagtaagaaccgcatttggtactttccgggcaaccgtcaggcgattctttattggtaatgagaataattaacaattaaagagcgtcgcgaaagaataatgtgtctcgacaggggagacacagtacgaatcgacataagttgatcgtctgaatcaccagaataaataaagtcggtgatagcaatccgtaacgataaagtaacctgacagcagaaagtctccgagcctgtgcagggtcccaatccgggattacacatgctggttaataccagtaattataatgagggagtccaaaaaacaatgaccaacatcaccaagagaagtttagtagcagctggcgttctggctgctctaatggcagggaatgtcgcgctggcagctgatgtacccgcaggcgtcacactggcggaaaaacaaacgctggtacgtaacaatggttcagaagttcagtcattagatccgcacaaaattgaaggtgttccggagtctaatatcagccgagacctgtttgaaggcttactggtcagcgatcttgacggccatccggcacctggcgtcgctgaatcctgggataataaagacgcgaaagtctggaccttccatttgcgtaaagatgcgaaatggtctgatggcacgccagtcacagcacaagactttgtgtatagctggcaacgttctgttgatccgaacaccgcttctccgtatgccagttatctgcaatatgggcatatcgccggtattgatgaaattcttgaagggaaaaaaccgattaccgatctcggcgtgaaagctattgatgatcacacattagaagtcaccttaagtgaacccgttccgtacttctataaattacttgttcacccatcaanttcaccggtgccaaaagccgntatcgagaaattcggcgaaaaatggacccagcctggtaatatcgtcaccaacggtgcctataccttaaaagattgggtcgtaaacgaacgaatcgttcttgaacgcagcccaacntantggaacaacgcgaaaaccgttattaaccaggtaacctatttgcccattgcttctgaagttaccgatgtcaaccgctaccgtagtggtgaaatcgacatgacttataacaacatgccgatcgaattgttccagaagctgaaaaaagagatcccggacgaagttcacgttgatccatacctgtgcacttattattacgaaattaacaaccagaaaccgccattcaacgatgtgcgtgtgcgtaccgcactgaaactgggtatggaccgcgatatcattgttaataaagtgaaagcgcagggcgacatgcccgcctatggttacactccaccgtatactgatggcgcaaaattgactcagccggaatggtttggctggagccaggaaaaacgtnacgaagaagcgaaaaaactgctggctgaagcgggttataccgcagacaaaccgttgaccatcaacctgttgtataacacctccgatctgcataaaaagctggcgattgctgcctcttcattgtggaagaaaaacattggtgtaaacgtcaaactggttaaccaggagtggaaaacgttcctcgacacccgtcaccagggtacttttgatgtggcccgtgcaggctggtgtgctgactacaacgaaccaacttccttcctgaacaccatgctgtcgaacagctcgatgaataccgcgcattataagagcccggcctttgacagcattatggcggaaacgctgaaagtgactgacgaggcgcagcgcacagctctgtacactaaagcagaacaacagctggataaggattcggccattgttcctgtttattactacgtgaatgcgcgtctggtgaaaccgtgggttggtggttataccggcaaagatccgctggataatacctacacccggaatatgtacattgtgaagcactgatggcaatacgtggggcaggagtgtcctgctccacggtgtctgatttttatcgcattacagaaggcacaggccagaaggtagggcaatgttaaaatttattctacgtcgctgtctggaagcgattccgacgctatttattcttattactatttcgttctttatgatgcgcctcgcgccgggaagcccttttaccggcgaacgtactttaccgccggaagtaatggccaatatcgaagcgaaatatcatcttaatgatccgatcatgacacagtatttcagctacctgaaacaactggcgcatggcgatttcggtccatcgtttaaatataaagattattcggtcaatnacctggttgcatccagttttcccgtttctgccaaactgggagccgcagcatttttccttgcggtaatactgggtgttagtgctggcgttattgccgcattaaaacaaaacaccaaatgggactataccgtgatggggctggcaatgaccggggttgttatccccagttttgtggttgcgccattattagtcatgatatttgcgatcattttgcattggctgccgggcggtggctggaatggtggggcgcttaaattcatgatattgccgatggtggcgttgtcactcgcctatatcgccagtattgcgcgtattacccgtggctctatgattgaagtattacactccaactttattcgtactgcccgggcgaaagggttacctatgcggcggatcattttacgccacgcattaaaacctgctctgttacccgtgctctcctatatgggccccgcatttgtcggcattattaccggttctatggttatcgaaaccatttatggtttgccggggattgggcaactgttcgttaatggcgcattgaaccgtgactattccttagtgttaagcctgaccatcctggttggtgcgttaaccattttgtttaatgccattgtcgatgtgctatatgcggttatcgacccgaaaatccgttactgatactggagctcgcgatgatgttaagtaagaaaaacagcgagacgctggaaaatttcagtgaaaagctggaggtcgaagggcgcagcttgtggcaggacgcacgtcgacg

SEQ ID NO: 351 - DNA, 5850 bp, Escherichia coli
  Strain O55:H7
  modified_base (177)..(177): a, c, g or t
  modified_base (2259)..(2259): a, c, g or t
  modified_base (3687)..(3687): a, c, g or t
  modified_base (3910)..(3911): a, c, g or t
  modified_base (4605)..(4605): a, c, g or t
tgcataaccgtgcggcggttgcaagtctgatagtgctggtgctgatcgcgttatttgtaatcctggcaccgatgctttcgcagtttgcctatgacgatactgactgggcgatgatgtccagcgccccggatatggagtccggtcactactttggtactgactcatccggtcgcgacntgcttgtgcgcgttgcgattggcggacgtatctcactcatggtcggtgttgctgcggcactggtggcagtggtcgtggggacactttatggttcgctttccggttatctgggcggtaaagtggattcggtaatgatgcgtttgctggaaatcctcaactccttcccattcatgttcttcgtcattttgctggtgacctttttcggtcaaaacatcctgctgattttcgtggcgataggcatggtttcctggctggatatggctcgtattgtgcgtgggcaaaccctgagtctgaagcgcaaagagtttattgaggcggcacaagttggcggtgtatcgacgtcgggcattgttattcgccacattgtgccgaacgtactcggtgtggtggtggtctacgcatcgctactggtgcccagcatgatcctctttgaatctttccttagcttcctggggttgggtacgcaagagccgttaagcagctggggggcattgctgagtgatggcgcgaactcaatggaagtctctccatggttactgttgttcccagcgggattcctcgtggtgacgctgttttgtttcaactttatcggcgatggcttgcgtgatgccctcgacccgaaagatcgttaaggagtgcagccatgagcgtaattgaaactgcaactgtgccgctcgcacaacaacaggctgacgcactgctgaacgtgaaagatttgcgtgtcacctttagtaccccggacggcgacgtcacggcggtcaatgatttaaatttttccctacgtgccggagaaacgctgggcattgtaggtgagtctggttcgggtaaatcgcaaactgcatttgcgttgatgggcctgttggctgccaacggacgcattggcggatcggcaaccttcaatgggcgtgaaatcctcaatttgccagagcgtgaactcaataaactgcgcgctgaacaaatctcaatgatttttcaggacccaatgacttcgttgaatccctatatgcgcgtcggtgagcagttgatggaagtgctgatgctgcataagaacatgagcaaagctgaggcgtttgaagagtcggtgcggatgctcgatgcggtaaaaatgccggaagcacgtaaacgcatgaaaatgtacccgcacgaattttctggcggcatgcgtcagcgagttatgattgcgatggcattgctatgtcgacctaagctgctgattgcggatgaacccactactgcgctggacgtcaccgtacaggcgcagatcatgacgctattgaatgaactgaagcgggaatttaataccgccatcattatgatcacccacgatcttggcgtggtggcggggatctgcgacaaagtgctggtaatgtacgccgggcgcacgatggaatatggcaacgcgcgcgatgtcttttatcaacccgttcatccttattctatcggtttgctcaacgcggtgcctcgtctcgatgcggaaggtgaaacaatgttgactattccgggtaatccgccaaacctgctgcgattaccgaaaggttgcccattccagccacgttgtccgcatgcgatggaaatttgtagtagcgcaccgccgctggaagagtttacgcctggccgtctgcgtgcttgctttaaaccggtggaggaactgttatgaatgctgtaaccgaaggaagaaaagtcctcctcgaaatcgccgatctgaaagtgcactttgaaatcaaagatggcaaacagtggttctggcaaccgccgaaaacgctcaaagccgtagatggtgtaactcttcgcctgtatgaaggggaaacattaggtgtggtaggggaatcgggatgcggtaagtccacctttgctcgcgccatcattggcctggttaaagcgaccgacggtcatgttgcctggttaggtaaagagttgctgggcatgaaacccgatgaatggcgtgccgttcgcagtgatattcagatgattttccaggatccgttggcatcgctaaacccgcgtatgaccatcggcgaggtcatcgctgaaccactgcgtacttatcatccgaaaatgtcacgccaggaagttcgcgagcgngtgaaggcgatgatgctgaaagtcgggttattgcctaacctgattaaccgctatccgcatgagttctctggtgggcagtgccagcgtatcgggattgcgcgtgctcttattcttgaaccgaagctgattatctgtgatgagccggtgtcggcgctggacgtgtcaattcaggcacaggtggtcaacctgctccagcaattgcaacgtgagatgggattgtcattaatttttatcgctcatgacctggccgtggtaaaacacatttccgatcgtgtgttggtgatgtatctcggccatgcggtagaactggggacctatgatgaggtctaccacaatccactacatccttacaccagggcattgatgtcggcagtccccatacctgatccggatctggagaagaacaaaaccatccagttactggaaggggaattaccgtcgccgatcaacccgccttccggttgtgttttccgtacccgttgcccgattgccggtccggagtgtgccaaaacacgtcctgtgctggaggggagtttcagacacgccgtttcttgcctgaaagtcgatccgctttaaacacaaaaagggctgacagctgtcagccctttttcacgccgaaagtgattatttattcccgccagatgatatggcaaagtttgtgatctttttcgcggcataacagaatgcgggcgaaaacatcgttgatttcaccatcttcactgtccgccagaccaatcacaacttcggcaaaaaagtctgggttcaaatcgaaatcaacatgttcctgccagtcttccgccggatcgaataactccgcgccgccgcgctcttcaaactgaagattgaacagcagaacatcagctggatcgagattgtcggcagccagttcgagaaaaatatcgtaggcctgctcaagcgtttcatcttcagtcaggcgattgtttagatccatatccatagtcactacctgtttaacctctgttggcgacgttttacagcaacgggctgaagaagtaaaacagtcgctcggcgacacgttgccataatggacgttttagccataaacgggcatcgagcagacgtgaacgcgaaatataatcgtcctgaacggcggcaaggtctgcaccaaaacctttatcgtcgattgccagggtaatctcgaaattcagccacagactacgcatatcaaggttaacggtgccaaccagacttagttcgccatcgaccagcacgctcttggtatgcagtaacccgccttcaaactgataaactttaaccccagcagcaagcagttccgtaaagaatgcgcgactggcccagccgaccagcatcgagtcattttttcgcggaaggataatactgacatccaccccgcgctgcgccgccgtgcaaatcgcatgaagtaaatcatcgcttggcacaaagtanggcgtggtcatgatcaaatattcacgcgccgaataagccgcagtcaataatgcctggtgaatgagatcttccggaaagccggggccagaagcaattgtgtgaatggtatgaccgctggcctgctcaaacggcataatattgacatcaggtggtggcggtagaatacgtttccctgtttcaatctcccagtcgcaggaataaataatccccatcgcggtggcgnnggggccttccatacgcgccatcagatcaatccattgccctacgcccgcatcttgtttgaagtagcgagggtcgaccatattcatgctgccggtgtacgcgatgtaattatcgatcatgatcatcttgcgatgttggcgcaggtccatacggcgtaaaaacacacgcatcagattgacctttaaggcttcgaccacttcaataccggcattacgcattagctcgggccacgggctgcggaaaaaagctacactcccggcggagtcgagcatcaatcggcaatgaatgccgcgtcgcgcagccgccattaatgattcagccacctggtccgccatgccgccgggctgccagatataaaacaccatctcaatattatggcgcgcgagctggatgtcgcggattaacgcctgcatcacatcatctgactcggtcatcagttgtagctgattccctttgaccccagcgatcccctgacgacgctcgcaaagcttgaataatggcgcagcgacactgctattttcttcggcaaagatatgcttacaggctttaaggtcgttaagccattttgcggtggaaggccacatcgctctggcgcgctcagcgcggcgtttgcctaaatggagctcgccaacggcaagataggcaataattccgactaacggcagaatgtaaataatcaacagccaggccatcgcngagggaactgcgcgtcgtttcattagaatgcgtaaagttacgcctgcaatgagcaaccagtatcccagaatggccaaccaactcaccaacgtataaacggttgtcatagattagaaatccttttgaaagcgcattgttatgagtttacgcatatggattcatctggcaaataaaaacgcgggaaaagcactggtcagcgtcgggggcgggggtataatgaccattctgttattgcatagagtagttaacatgaagcggagtagaacggaagtgggggcgctggcgcatgcagcgtcaggctagccgacgtaaatcgcgttggcttgaggggcagtcgcgccgaaatatgcgtatccacagcatcaggaagtgcattctaaacaaacagcgtaactcgttattgtttgcgatctacaatatctaaatgtactgggcaccattgcggtgcccaataagtttactcttccgtctttaaactctatttttgcgccgattctttactgtcagctttcgtttcttgttcatcgttatcgctgaaaataccatgacctgagttcaacaacattgaaacgagcatatcattattaatctcttcaccatttaaaactcgcgccagaatttcgctgccaaacagttgcggtgagagaatgatatccggatgtaccatcttaatcttattcaggtttttgctatcactgacggcgagaactgttttgacatcactgctcatatcttttgccgagagtacaacaaacgcgttatctgcatcgttatcactcagcgccagaatggcccggcaacgatcgattcccgctttctttaatacagaactgtcattactgtcaccggggataacatcagcgttatcgcctaagcgttgctcaagttgcttgatatcatcttcaggcaagttgctgataaccgttacgttttgtccgcgttgattcagttgcaggatcgtattaatggcgagaatcgaatgtccgcaaacaataaaatgatctttacgatgcattgtatgattgtttccttttacaagtttgttgaatcccccgcggataagcggaccaaaaattgaggtcatagatgtggcaaaaacggtaatgccggaaataatgaccgaaatagtgaacaatcgtgctgattcagaaacagggacaatatcgccatagccgacggttgacatggtttctatcgaaaaatagaacgcggtcatcaaactttctattcgcggattaaaacctt

SEQ ID NO: 352 - DNA, 125 bp, Escherichia coli
  Strain O55:H7
agcgcaccgtaggttgagtaaaacagtaatgtcgtgaaactaataaatgcaaaaattgtcccggctgcggcgctactgtgggagaagtctttgcgcagtatcagtaaaaacaccagcgtaaaaat

SEQ ID NO: 353 - DNA, 1056 bp, Escherichia coli
  Strain O55:H7
  modified_base (1011)..(1011): a, c, g or t
ccaatactaaatttcagccagggataaaaatgcagggtgtaaattagcgctatcaacaacaaaatgatactgattgcccatgcgagctttgcccggaacagtaagccaatggagttcaggacaagaaagacgccgagcataaatagtggggcgtttgccagcaaggagagatccaactctgaaaatgctttgatatggaaaatatcaagcaaattgaccgacataccatagattgttttaaaaataagcaacccatttaaaaagacggccagcgcgagaatgtcgtgccgtagggtcacccataaatttgttgctgtttgtttgaatgtagcccagtgactcactgatacctctgtaaccacaattttgtttaattatcttaacgtgcacattttctgaacatacatgcgacacgtgaatgtgttaaacaatagtagatgactttatccgcagtaatcaaaggttttgagtgagcaactctgcgtcaggaaagggcatttttcctgaacatgctcacatcatataaagaaatacagataaagttattatctgcttgtggtggtgaatgcaatgaccgacctataaggaaaggccaaacaagaacacggttgcaaaaaccgtgcccttaaatattggatctctactcagaacactttcttaaatggtttcactgaaacgtgttcatagactcctgccgctacgtacgggtcagcatcggcccaggcctgagctgcttccagcgattcaaattcagcaataacggttgagccagtaaatcccgcagcccctggatcgttactgtctaccgctggcattggaccagctgtcaacaaacgaccttcatcatgcagtaactgtaaacgtgctaaatgtgccggacgaacggaaaggcgtttttcgaggctatcagctttgtcttgagcgtaaataacatacaacacgggcacaactccttgttcgggaaagttgtaaagtacgttatttgaaagggcgaagatctgcaacggaaanatgatgtctttgttaagaccatgcataaagtaaggtcaattacgc

SEQ ID NO: 354 - DNA, 2864 bp, Escherichia coli
  Strain O55:H7
  modified_base (684)..(684): a, c, g or t
  modified_base (686)..(686): a, c, g or t
  modified_base (2311)..(2311): a, c, g or t
  modified_base (2635)..(2635): a, c, g or t
aatgacattttcactgatcctgatcgtcttgccttattgaatatgattgctatttgcatttaaaatcgagacctggtttttctactgaaatgattatgacttcaatgacccttgatttacctcgccgcttctcctggccgacgttactttcggtctgcattcatggtgctgttgtggcgggtctgctctttacctcggtacatcaggttattgaactacctgcgcctgcgcagccgatttctgtcacgatggttgcgcctgctgatctcgaaccgccacaagccgttcagccgccaccggagccggtggtagagccagaaccggaacctgagccgatccccgaaccgccaaaagaagcaccggtggtcattgaaaagccgaagccgaaacctaagccaaaaccgaagccggtgaaaaaggtacaggagcagcaaaaacgcgatgtcaaacccgtagagtcgcgtccggcatcaccgtttgaaaatacggcaccggcacgcccgacatcaagtacagcaacggctgcaaccagcaagccggttaccagtgtggcttcaggaccacgcgcattaagccgtaatcagccgcagtatccggcacgagcacaggcattgcgcattgaagggcaggttaaagttaaatttgacgtcacgccggatggtcgcgtggataacgtacaaatcntntcagccaagcctgcgaacatgtttgagcgtgaggtgaaaaatgcgatgcgcagatggcgttatgagccgggtaagccaggcagtgggattgtggtgaatatcctgtttaaaattaacggcaccaccgaaattcagtaagcagaaagtcaaaagcctccgaccggaggcttttgactattactcaacaggtaaggcgcgaggttttccttcaggatcaaccgcgacatacttaaataatgcttctgtcgctttatagcgttgcccgattggttcagacgctacttttttcacccacacttcaatattaatgctgaccgatgtcgtccctttctggacacagcgtgcatagcagcacaccacatcgccgaccgcaaccggccgtaagaaagtcattccttcaacccgcacagtcactacgcgaccgtgggcaatttcttttgccagaatagcgccgccaatatccatttgtgacattaaccaaccaccaaagatgtcaccattggcattggtatcggcgggcatggctaaagtacgtaaaacaagatcgccctgagggacgttatgtgttgtagacatggtaaaaccgacttaaaaggaaaatcacaggcgcgatgctactatgattttcctgaggagaacagaggagatacagcgccagccccaaaggactggcagtctggttaggatttatcttcctgcggcatgtggcggtagatatagataccgcttaacaatgtgaagattaaggtaagggcggtcaggccaaagactttaaagttgacccaaatattttgcggcagccagaatgcgatgtagatgtttgccagaccgcaaaggataaagaaaacagcccaggccagattcagcttcgaccataccggttgcggcagcgtgagttctttacccagcatccgctgaattagcggctttttcatcacccattggctgactaacagggctcccgcaaacagagcataaatgactgtaaccttccatttaataaactcatcattgtggaagaacagcgtcaagccaccgaagacgaccaccagaacaaaagtgatcagggccatcttctcaaccttacgaaagcgaacccagctatagataagcacaatcgccgtggcgacgatcagcgccgcagtagccgcatagatgtcataaattttgtaaaacgcgaaaaagacaaccagcggtaaaaaatcaagaaactgcttcattttacgattccgtaatcaaatgcttaaggttattggcgaatcaacatatacaggcggaacagatagatgagcaatatggctgaaatcaggttgctcaaggtgttcgccagtacggcaccaatttccggggttaatgcggcaaaagaagaggcaaaaagcagcaacagtgtttttgccagcaaccagctcagtactgcgggtgccaccagacgcatattcgcccaagtcagccgcatactgctacggatcgaggcaaaaacgcccattttgtcctgtaccagcatcaccggtgccagggccagtaatatggccatgataattcccggaacgaccaccagcatgatgccaatctgtactaaaagggtagtcagaaaaatcagaataaataactttggcaatatcggngcactggcaccaatagctcgcagcgcactgactctctgacccgcagacaccagctggataattaatattacgcctccggcgagaatggcgttaccgattaatcctgaaaaagtggacgccgctgaagcctgcagcaaaatttgttgctgttccggtgacatattctgaaccaggtcgaacaacccactactgccgctaacgggcacgccgtcattgagctgcgcaagctgtgcatcactgggtgagaaaacatgccctaacaccactgtgataaacgcacatagcaacgataccaacagaatggtcataaattgattacggaanaaatttccggtgtcacggtatacggactgcgccgtgatagacatgcactctccttgagttttatgcaggtgttaattagcgggcaattgtaccctggttaagcctcgggtggcagcatcaggtcttgtatggaaaagcatatctttgtaaagcggaggtaattgctggccttcaggcgtgggcaaaccgcggcaagtggcgaacgagttaatatttgcgtagcgaaaat

SEQ ID NO: 355 - DNA, 819 bp, Escherichia coli
  Strain O55:H7
aaatcacgttaaccaggattctcaatgcaacttctaaattaatccagatcaataaatggtgaattatcatatgtaatgtgatctatgtaggatcatttgttactccaatgtaggtatattcgtcacgtttttataaccataacgacggagcggatatgaaaaagttaacagtggcggctttggcagtaacaactcttctctctggcagtgcctttgcgcatgaagcaggcgaattttttatgcgtgcaggttctgcaaccgtacgtccaacagaaggtgctggtggtacgttaggaagtctggggggattcagcgtgaccaataacactcaactgggcctgacgtttacttatatggcgaccgacaacattggtgtggaattactggcagcgacgccgttccgccataaaatcggcacccgggcgaccggcgatattgcaaccgttcatcatctgccgccaacactgatggcgcagtggtattttggtgatgccagcagcaaatttcgtccttatgttggggcaggtattaactacaccaccttctttgataatggatttaacgatcatggcaaagaggcggggctttccgatctcagtctgaaagattcctggggagctgccgggcaggtgggggttgattatctgattaaccgtgactggttggttaacatgtcagtgtggtacatggatatcgataccacggctaagtataaatctggtgttactaccgtgaaagactcggtacgactggatccgtgggtgtttatgttctccgcaggatatcgtttttaattttctctgcaaaacctctgcaaaa

SEQ ID NO: 356 - DNA, 1119 bp, Escherichia coli
  Strain O55:H7
  modified_base (437)..(437): a, c, g or t
atcaaatgaccagttttttccattccttaccgcgtgcgtcgttgtaaatatcggtcattttttgattcgaatggcctagcaaaattttggtatcaaccccctgctctctgaacaatcgctctgataaagatctctgctcatggaaagagggtggggtgccattagcacgccagttgtaatccacagaatcccgggcttttttaaatgcaacggttaatgttgctggcttaaccatcccgccgcgcttagctgtccctttcgcgtgatggtggtgcaatagccacggactaagaacgcaatcgcggcaggatgacaccacatcatctagggtgagatttaatttatcgcaacgcagagccagagggatggcaatccgggttcctgttttttgctgttcgacatgacgataaccatcccggatatccgaaaattgcatnttgcaaatatctgaaaggcgctggcctgtcatcagtgccagcagcataccgcgctgtaaaaagtaaccatccttttccgctgcgttataaatcatcatccactcatcaaaagtcagtcgctgtcttgatatccgcacctgcggtttttttgcagattctgcagggttaaagcctggcgggacatcgcccgtttgctgagcttcccggaaaacatcgatcagtactttcctgaaaatttgtcccattctgttatgtcctctggccttgtactcttccagtactgataccacatcttttacggttatggcatctaacggtctggtgccaaaacgttcatcaaataccctgagaggggccgctttctgtttcagcgtgttgagtttgatctcgccgttttcatatctttcctgttgaatttttctgtaattattcagaaaaatggtaacggttgatgaaccgccggtatcactaataattttctcctgcagactgagcatttgttccatttgctgccgggcaagacggctgttcgcttctgctgcaatagtttctgccagtttctggtcaatactgccgagaccgtgatttttgcctgttatgggatgcctgtaacgccagtaaactttgttatttcttttgtcaaaatacggagataatcccggaacatcggttttatattttc

SEQ ID NO: 357 - DNA, 686 bp, Escherichia coli
  Strain O55:H7
  modified_base (382)..(382): a, c, g or t
  modified_base (473)..(473): a, c, g or t
  modified_base (478)..(478): a, c, g or t
  modified_base (657)..(659): a, c, g or t
  modified_base (661)..(661): a, c, g or t
gcgccatcttccagtatcctcttcaaagcagggtgatctgtggcgatcacctccggcttgtttaccattccgacaaagcgagcttgcggatccactcgccagcgtcttccaacttttttggggagaggaaatatcattccggctttagcgtatttacttaacgtactcggagtagggaccggttcactgaattcctcttttgcccactcagtgagcagaataagtcttgccatgagcgtcgttcgctaatcatggtcgccgccactatagctggtgggcaacgaccggggttgaacattaaaaatcagcctgattcgggagcagtttttgccagataactgaaacgtattttgcctggtaacgggcatcatccagcgcattntggcgctcaccttcgaatgggatagcagttctggcatcgaagtctacggctttccccagctcaacgattgtgcgtacatcgcgatcgttgnagtancgccacgggcaggggataccctgtcgttcgtatgaacggcgcaaaatagtgttgtcgaagttggccccattaccccagacctgaacaaaaaactcaccggagttttcgtcgataaattcccgcaattgcagtagtgcatcatctaacgggatttcatcggtcataatggcagactgcgnnncncgtgattgcttcagccaccatttaa

SEQ ID NO: 358 - DNA, 86 bp, Escherichia coli
  Strain O55:H7
  modified_base (3)..(3): a, c, g or t
  modified_base (15)..(15): a, c, g or t
  modified_base (45)..(45): a, c, g or t
tcncgatcaatgacnccgccagcagtatccagatcgatggtcttnctaaattctggtcccatatctccggtttgcggatcgaaaaa

SEQ ID NO: 359 - DNA, 61 bp, Escherichia coli
  Strain O55:H7
  modified_base (5)..(6): a, c, g or t
cctanngagataatcggggcatcgggattttttcccatggtttcaaggtcgatcatcagat

SEQ ID NO: 360 - DNA, 20 bp, Escherichia coli
  Strain O55:H7
  modified_base (4)..(5): a, c, g or t
cgtnntgctggtggatgtga

SEQ ID NO: 361 - DNA, 31 bp, Escherichia coli
  Strain O55:H7
gggatctgmcgyctcgccagtttcactatcg

SEQ ID NO: 362 - DNA, 78 bp, Escherichia coli
  Strain O55:H7
gatgctgattgccgccagtgttctccttgtgtggatgttcagcgccttccatttcctccggatcattttcctgaactt

SEQ ID NO: 363 - DNA, 5384 bp, Escherichia coli
  Strain O55:H7
  modified_base (6)..(6): a, c, g or t
  modified_base (110)..(110): a, c, g or t
  modified_base (146)..(149): a, c, g or t
  modified_base (233)..(233): a, c, g or t
  modified_base (1569)..(1569): a, c, g or t
  modified_base (2316)..(2319): a, c, g or t
  modified_base (2450)..(2450): a, c, g or t
  modified_base (3901)..(3901): a, c, g or t
  modified_base (3903)..(3904): a, c, g or t
  modified_base (3906)..(3907): a, c, g or t
  modified_base (4960)..(4960): a, c, g or t
cgaatntttcctggtatgttgcgtcgcccatcaccgcgccacaatcagggcagttgccgccgccggtctgaccgcaggcggtgcagactttttccggttcctgttgcgcnactggttcaggctgtttcgtttctggctcgttttgnnnngcatttgggctgttytgttccgctttctggtcgttctgttccgtttcttgctggttctggttcacagaatcgcgggtttcaatncccttcacccatttcggatcattcgggtcgctaatccctgcaacaaattcaccacgtgatgcggcgagcaactgattggcgtcaggctggctgatattggctgcctgcataattttctttacttcgtcagcggtaacttttaccggttctggttgttcagaattttgtgcggtatttgcattttgcggtaagcctgtgtatgtgccattttttcgggcaaaatattcttcttttgtgatttcagtagccccggcagccagcgccttatccagaccagaaagtttgtttgcgcgaccgtatttttcgcaatccttgtcggtgaagaggaagtagaacggcccctcacgctctacagatggttcgacttccactttgcattcggttttttcgttgtccggaattgccgtttccactgcatcagtttctggtactggcgacgagagagtgtcagttgcgctctgatttgttccttcatcttcaaacacgccctttgtagtcaggtattcagtaatgtatttgttcagtgccacagggtctttgtgaatgtcgatcggacgttcacggacaaggccaaaaatagtctggcggtcgtagcgaagggcatcaggctgtttgcgcattgatgccgagatacgcttccagtcttcgcggtcgttgtcgataacttcattttttgcccagcgatggatgctgccgtcaatgtttccggcatccacatcaccaggccagagagcgtaggccagttcgtcatccagtgttttccatgtctgcttatattcgcgacgaatgactgcagtgacaggggggattttttctgctgagttttcagtgtgctgtcggtggactctggcgcgggcgagatcaacaacagacgtgtattttccggtttccttgcgttcaccttcgcgacgttttttccagatgcgcatttctgcctgaatttcgggccatttggcaccaggcttacatttatgcttaacccacccgatggcatgcagcttaagctccggatacatggcgttaacttctggcattttcatcaacgcttcaacgatatgtccgtcgaatgttgccatgtcttcctgcaacaattcctgcgcgctaatcaccatatcaacggtgatgttttcacatgtgtcgaacttaaccatgacagcgttctgtacttcaggggccagcttgtcaaaagcgacgttcatcggatctgattcagtctcaaccgggacaaaggaagcagccccctcatcccagcggttttcctgcatatattcagcatcccaggaatcgagggcagggcggggtataccgggtttatcctcgcaaacaagaaatttanaagcgcagtcctgagcagccggataatgctccaggaattgccagtgaaattttgcgcgggcgcgacgttcatcaccggcttcaatggcagtggctacagcgactgcaccttcttcctttattgcctgttcgtccggaatggcggcgcaaataaagactttactcattttgttttacctcattacagatttaagggtgaacaaatccctgccattgctggcatataagaatgaaatcggatgtttattacggaactgttttaaagacctgccgggatttcgttattatcctggtgaataactttatcgaccgggtaacagttaccgggaattttctgttcggttgctgcagtcacacactcctgcattgtcctgtgaacactgactgcaatatcaactggctctccggaaacaagaaaaactgtcagaacaagtgcaaatgctgtattcattgccagcatcctttttgtatcggacgtaaacgggccagcattgaaagaatgcatattttatttaataactcccgttcgtgttttctcttgttaatggcatcttcagtaaatacagggttactgatagtgacaccaatttcaaaacaaccttcagacgtattaacgtttggtaataacgtttccattatcgcgtcctcaacaatgaattttgtgatgcggtgcctggtgcctccaggtgacgttaaccagttaacaattaacgccggatacagtgaatccccccataacactgttttnnnntttaactgttccgcgtgcgcttagccgcattcactgcatcacaaaattcactttaaaaagggcggacatcagttcatgggcaaacagatgccgccaaaygtcaccagaaaattgataacagagggcgttgnagcggggttgtcacttaagcgtatggtcaacctgacaacccggtgtcctcaacggggaaggaataaccccgccatacttaccgctgcgccatttcgcgttatgctctgacttttcagagaaatatcctttcagtaaactgtcagtgccggatgttcacccgtgtccggcgcacgcactccacttcacccgtggagaactccttaattaccaaccctcaggagggtgaatgttaaaatcaactcttattgctaaatgcctttatcaaaatcgcatggtaagcagcatttcaataggcgagtctgcagttaaaagtattttcgaagagtactttcccgggcatgattttaataaatggaataccaaattaccgccagcagtttcaacgcgtattctgaaagcaaccgaaagagcaagtacaattcgcgttaactatttcattaaagatttgtgggatctttgatatccacagagcctaaagtatgtgcatatggatgtgctattatgcgccctcgcagatttgcatcattttctaaattcactgaacgaaacagggcatcaacaaggctctgtacaatgcaaaggcaatcgaagactgtcgccgtttctgttttgattgatgaaagaacatggccattcacgcaaacagaaattacccgtttattaacatcgctttcctgcttttgattatcagaaccatatagcccagaaaaagcattgcgcacattacgaaccatattatcgatggtttctttttctgcggtactaaggtcaagagtagccagttgtgaacgaactatattcgatgccatttcctgtaatggcgttggtaaatctttaaattccattattagcctcgttggttagctattaacgtgggtatgtaatcattctggcaatgcttaatgccgctgctttttccagattggtgatatcctgctccagagcggacagattttcagcctgcttagccctggcttcattggcccatttcaggtcctgcaccgccttaattttctggtgcatccactcataaagttcatcatcggtatagtctggcgcgatgatgacggggtctcgtttctgcatgtcggctccttgtggttagcgttgcctgctttttaaccacgtcaggcgaggtggtatcctctgaggggtctgttactcgagaggaaattggttatgaatacaatcaagttttcttgcccagaatgtggtggctaagtctttgacacatcctttaagccgcagggctctgacagtttcgcgggagccatctgcaaaaattgtggtcaccttgtaactgaagatgagtcctcgcagttcgatgacgaaatcgttgacaatatcttcggtgcactcaccagagactttctgaagtaaaggcgcataccgcttagttaccgctctgataactcttacctgtccggcaatggcgctgatatcaatatananngnnatcgctgtttctttgctgatccctggacgccttccattctgatgtttgactcgcccactgagaaatcctctgcttccccttaacgccgggtagcggaactgtttgctgagaacaccgtgcggtgtcttgatgagtagaatttagaatagcctaagagttatggtcaagctttttgtgtagaaaaacctaagcttcttgatgtaaaaaacacaagtatttgaaagtttgtgctttttattacagagagttgcgaaaaaaaggggggttatttatttgcgcttcttttgcgagctttgagtagttcttcaaaaagtttgttgaaattctcaactcgagcacgcatctctgacaacagagccttttgctctgactcaggcagtgcgtcgaacagttgaagcaactctttttgatcttctgtcagattgactggctgattatctgggatcggttcgcctggttgcttatcttcatctccaaaaagaagccaagtcggcgagcactgaagcgcctggctcagtgcgaataatctcttccccgctggctgtgtttcatctctttcccattgagaaattgttacgtgagccactttgaccagcttacctaatgcggcctgagacagttttaatttttttcgcctgtataagaggcgagcaccgaaggtttcgtttttcatattaggtaattctaatttttcttgacttaggtttctctacgatctagtttccttaggaaaatctaaggggttcgatatgttgaaaattgatgctatagcgttttttggcagcaaaacaaagcttgccaatgtcgcaggagttaggctggcaagcgttgctgcatggggggaactggttcctgaaggtcgcgcgatgcgcctgcaagaggcatccggcggggaacttcagtacgaccccaaagtttatgacgaatatcgtaaggcaaagcgggcggggcggttgaacaatgaaaatcaccactgaacaggtttgtgaggctctggatacctgggtatgccgaccaggaatgacacaggagcaggcgacgatattaatcacngaagcattctgggctctgaaagaacgcccgaacatcgatgttcaacgcgtcacgtttaatgatggcgaggttgatcaacgggcgctgggcgttaaccgggtgaagatattcgaacgctggaaagctatcgacaccagagataagcgtgacaaattcacggcgctgattccggcaattatggaggctatccggatcagcgatttcagattgtattgtgaaattactgacggaaaaagcattacgtacatgatcgccgggttaaacaaagaatatggcgatgtggtggagtccgggctgctttttgcggatccagttgttgtggaacgtgagactgacgagcttatagaaaaagctattgctttcaagcacgcgtatcgtcagcaataccaatattactttgcagataaacaaatgtctgccaggg

SEQ ID NO: 364 - DNA, 5272 bp, Escherichia coli
  Strain O55:H7
  modified_base (798)..(798): a, c, g or t
  modified_base (1413)..(1413): a, c, g or t
  modified_base (2530)..(2530): a, c, g or t
  modified_base (2576)..(2576): a, c, g or t
  modified_base (3042)..(3042): a, c, g or t
  modified_base (3067)..(3067): a, c, g or t
  modified_base (3846)..(3847): a, c, g or t
  modified_base (3851)..(3852): a, c, g or t
  modified_base (4498)..(4498): a, c, g or t
  modified_base (4734)..(4734): a, c, g or t
tatgagtatcgatgcactacgatgggctaaaaaggtgaaaaccggcagttcatccagtaagtcagtattgacctggcttgctgatatgtgcggtgccgatttgtgtgcatacccgtctgtatctgcactggcagaagtaacggaactgaacaaaaagactgtgcaggacagcttacgacacctgatggagattgggttaattgttgataccggtgagagaaaaggcagaacaaagcaaattgtggtgtaccgacttatcggtgtagaagaaagtgttgccgagcctgaatacacccaaaaacgggagtctttaaaggtgggtaaaattggtgctgttaataaaaacagtaccgaaaatggttatgtttcagcacaaaacagacccaaaaacagaactcttagctgcatggaaaataaccaaagacacccaaattttccatcaaagacacccaaaaacggatcacggaacccaaaggaacccaaagatctaaaccccacacataacgcacgcgagagtgctccgaccagtgagcaggaagttttgtcgttacaggcagccccccctgtattcctgtatggcctgagcgaacccatcggaaaattcccgatgagcgatagctggtatccgtcacgggattttcgacgacgggctgcgttgtgggggatggctttgccggagacagaatttacacctgctgaacttgccgccttccgggactactgggcagcggaggggaaagtgtttacgcagattcagtgggagcagaaattcgcccgtcacgtaaatcacgtcagggngcaggttaaaccagtcagcaaaggggtaaaccatgcagcagcaccaggtggcaccgcatcacgggcagttcaggaaattcgggcagcacgtgagcagtgggaacgtgaaaacggatttatcagcgacggaaacggcctggaagctgtgggaactcatgggggtggtttattcgaaccgctggatccagaagaacggggccgcaccttcgaagctctggattgcacagattggcgcgatgactgagcagcaaatccggcaggtctgccgccagtgcatggaccgctgccgggcgggtgaaacatggcctccggacctggctgagtttgtggcactgatttcgaaaagcggagccaatccattcggtctgacggtggatgctgtgatggaggagtaccgccgctggcgcaatgagtcctggcgatacgacggaagtgataagtacccgtggtctcagtctgtgctgtatcacatttgcctcgagatgcgttcaaaggggattgagcgccagatgaccgaaggggaattaaaacggcttgcagaacggcaactgacgaaatgggcaaagcatgttagtaacggcctgagcgttccgccagtccggcgacaactggcgncccccaaacgcccgtcggggccaacgccaattgagttgctgaaacaggaatatgaacgccggaaagcggctggttttgtttgagttgagaagtgattttttaccgggaggaaatttatggagactgtttttgacgcactgaaagcgatgggaaaagccacgtcggtagagctggctgcgcgacttgatatcagtcgtgaagaagtactgaacgagctgtgggaactgaaaaaggctggcttcgttgataaaagcgtatacacctggcgtgtggctgataacaacgttcagcaggaacagccagcgccagaagaaaccaccacggcaacagaagcgaaaatctcagagtgcgatttaaccgcgacgattgaacaacgcggaccacaaacggcggatgaactggctacgctgttcggtacaacatcccgcaaagttgcttcaacgctggcaatggcaatcagcaaaggtcgtctgattcgcgtaaaccagaacggtaaaattcgttactgcataccaggtgataatttaccagcagagccgaaagttgaatcggtagcggaaaccgatggtaaagcctttcctcagccagccggtgttgcgttaccggtacagaaagatgcaacacaggaagatattaaaacagaaactgtggcggacattgtgcagtcgctgccatcgtttactgcaacgcgagaagatgatttgattttgccatcgctgcatatggcaaatcgcgaactgcgtagggcgaagaatcatgtccagaagtgggagcgagtctgcgccgcgctgcgggagctgaacaagcaccgggatatggttgccgggatttgtcggaagtccgggcaatgagcggatggtgcaggcctgaaatcatgatactaacaatgaaggtaaaatgcatcggcagtctgattggtcgtagtgaggcggcggtcaggatgaaagcccaggttaagggaataagcctgattctgcggggtgattttcaccagtcaacaaaatatccgtagcgcgataacggtcaaaaattatggcgctgacacttttgtgccactggagatgactgtacctaagttcaggggagaagaacacgtccggtgggatggtcgggccanatttaaagggcaggtcatggctccagcctgtacgctggcaatggangctgcctggcgggaaattgatatgggaaccacgccactcagggatttactgccggtccagagaataaattcctgttacggttacaccactgtgatcttgcaagtgcaggaaagtaggtctacacggtaacgcgagtgcgtgtaacttttgatgtcattcccgtagaaacaccggacaaattttcgctgacaggtcatgcagaaggtataaatctgcagattatggacaattacggatatccggcaagagccggaaaaagcatgccgcctctaattctcagtggaagatggacttgattatactcattgcattgtcagaaatagttatccattaaaggctggctattccaaacaggatgttgattacaaaaatgtaatcaacatgtaaggtttatactcttcaatatgcgtataattttccttattttgttgactttaaataacaagctatgcacgaggtaaagtcngataagtttatctggatgtaatatntattatttgtagtgtttataactttatttcatgataaccaataaaaggagttttttatgaggaacataatggcaggttttttaatattcctgtcttctgctgcttatgctgatatcaatctgtatggtcctggtggcccgcatacagccttgcttgatgcagccaaactttatgccgaaaaaacaggtattatagtgaacgttcattacggcccacagaacaaatggaatgaagatgccaaaaaaaatgcagatatcttgtttggcgcatcagaacaatctgctctggctatcattcgggaccataaagacagcttcagtgaaaaagatattcagcctctttatctgcgaaaaagtattttactggtaaagaaaggtaatcctaaaaatatccggagtattgacgacctgaccagacctgggattggcgtaattgttaatgatggtggtggtaccagtaatacatcaggcactggcgtctgggaagatattgccggacgtaaagggaatatagaaactgtcgccgcaatccgaaaaaatattattttatatgcgcccaatagcggaactgcacgtaaggctcttgagaatcagcctggagcagatgtctggataacctgggctgactgggcagccagtaatccagaaattggtgatgtcgtggaaatagcgccagactacgtgatatggcgtgatatgaacattacagtacgtcaggatgcaaatgatgaaacccgtcgatttgcagaatggctacaaaccgatgaagcggcgcctgcnntcannaaatatggctggaccaggaaaggcacttgacatcctcgtccttcaggacgtggattctttttccggatgccgcgccagcggcatgtaggggcagctcacaaaacggaaaaaattgtacgctaagcctcgccaggtgaactgaattcattccgatatgggaattcccatatcgggcgaaaacggtttgctgtaacggcagagttaagtaggattgctgcgggtgcttgaggctatctgcctcgggcatgaacaccaacggcagatagataaaagccccacccgactataaatcgaagtgaggcccctatatgctcgtcacatatagattgcctcttacggaccgaaaggtcaaggagaagcaggctatgaagcagcaaaaggcgatgttaatcgccctgatcgtcatctgtttaaccgtcatagtgacggcactggtaacgaggaaagacctctgcgaggtacgaatccgaaccggccagacggaggtcgctgtcttcacagcttacgaacctgaggagtaagagaccaggcgggggagaaatccctcgccacctctgatgtgtcaggcatcctcaacgcacccgcacttaacccgcttcggcgggtttttgtttttattttcaacgcgtttgaagttccggacggngccggaatagaatcaaaaatacttaagtagcgcgcagggagaagagggatggaccccgaacagggggagtgctatttatctggaaggattctgttgatgaaaatcgaagaattacgtgaaatttttagtgaagatggcctctatactgtgcgcgttgagaatggcgctattgtcagccactgccgtattaaatgtttacagtctctacataggaagagtggagctgcgttaatttnctttgtggatgggcttgtgacggatggttttattttgcgtgcaaatgaatttgtcacatcgttgccgtctctgaaagaagctgggattaaggctggtttttctgcttttgaagattagtgaattcatctacaattcagcgcagggctgaacccctgttgagtaacactgtgccaccggagaaagccgatggcgcaaaattccagactacacaattctgataattcagccgtctttgccagcaggcacgggcggcgttctcatgcattcaaatctgactggttccggcacgccccatgcactgaagaacaggccgaatggctgattcagaactaccgcagacgtgggtatgagtttaggaaagccctcagcctcgattatcgtcactggataatctacgtcaggctgccgtactccgagcgcccaccgcgtccgtcccgcacattccagcaacgcatctggaggtaacgtgcgggtattacttcgacctgttccggtaccggaacttgggttggtggtccttaaaccaggccgtgaatc

SEQ ID NO: 365 - DNA, 660 bp, Escherichia coli
  Strain O55:H7
  modified_base (98)..(98): a, c, g or t
  modified_base (624)..(624): a, c, g or t
caggtattccataaccctcgagtgcttgtggagccggaaccgaaaagcatgcgcggtctgccgtccggcatcgtccctgccgttcgccagccgctggnggaggataaatcattactgccgtttttcagcaatgagcgtgtgattcgtgctgttggtggcgctggtgcactgtctgactggctgttgcgtcatgtcaaatcctgccagtggcctcatggtgactatcatcacagtgaaaccgttattcaccgttatggtaccggcgcaatggtgttgtgctggcactgcgacaaccagctgcgtgaccagacatccgaatcactcgagcaacttgctcatcaaaacctgtcagcatggatgattgacgtcatcggtcacgcaataagcggtacgcaggagcgtgaattatctctggctgaattatcctggtgggcggtccgcaatcaggtggcggacgcgctaccggaagcggtattacgtcgttcgctggggttgcgtgcggaaaaaatccgctcaatgtaccgtgaaagcgacatcgtaccgggagagcagaccgccaccatcatactgaagcagcgcacaaaaaatcttgcgccgctgcctcacgcccaccagcaaaacccnccacaggaaaagacggtggtcagcattgccgttgat

SEQ ID NO: 366 - DNA, 14 bp, Escherichia coli
  Strain O55:H7
ctgtccggaaggct

SEQ ID NO: 367 - DNA, 83 bp, Escherichia coli
  Strain O55:H7
  modified_base (32)..(32): a, c, g or t
taaagattattgcagagccaccggataagcgncgtcgtgacctggacaatatcctgaaagcaccactggatgtgctgacgcat

SEQ ID NO: 368 - DNA, 29 bp, Escherichia coli
  Strain O55:H7
acaagagttattggtgtgtcacgttaacc

SEQ ID NO: 369 - DNA, 39 bp, Escherichia coli
  Strain O55:H7
  modified_base (13)..(13): a, c, g or t
  modified_base (35)..(35): a, c, g or t
gcaggatatgacngaaaccgccagagttgtgtttnatga

SEQ ID NO: 370 - DNA, 35 bp, Escherichia coli
  Strain O55:H7
  modified_base (11)..(12): a, c, g or t
cctttcacgcnnacgctgccagttaatactgaccc

SEQ ID NO: 371 - DNA, 33 bp, Escherichia coli
  Strain O55:H7
  modified_base (21)..(22): a, c, g or t
acagacgccttcagtcctganngcttttttatt

SEQ ID NO: 372 - DNA, 33 bp, Escherichia coli
  Strain O55:H7
  modified_base (3)..(4): a, c, g or t
tcnngcgttggggtcacaagcaaacctcaggcc

SEQ ID NO: 373 - DNA, 26 bp, Escherichia coli
  Strain O55:H7
aatatccagttgtgagttaatcaacg

SEQ ID NO: 374 - DNA, 45 bp, Escherichia coli
  Strain O55:H7
  modified_base (7)..(8): a, c, g or t
  modified_base (12)..(13): a, c, g or t
  modified_base (17)..(18): a, c, g or t
  modified_base (39)..(39): a, c, g or t
aagcctnncggnngtcnntacctgttctgtggtcatcgnctggca

SEQ ID NO: 375 - DNA, 30 bp, Escherichia coli
  Strain O55:H7
tccggacgctggaacgggtgcaacaaggaa

SEQ ID NO: 376 - DNA, 23 bp, Escherichia coli
  Strain O55:H7
  modified_base (11)..(12): a, c, g or t
  modified_base (17)..(20): a, c, g or t
ccgggtggcannagagnnnnatc

SEQ ID NO: 377 - DNA, 21 bp, Escherichia coli
  Strain O55:H7
  modified_base (2)..(2): a, c, g or t
  modified_base (11)..(12): a, c, g or t
gngaactggannagccacacc

SEQ ID NO: 378 - DNA, 165 bp, Escherichia coli
  Strain O55:H7
  modified_base (127)..(127): a, c, g or t
  modified_base (136)..(136): a, c, g or t
  modified_base (139)..(139): a, c, g or t
  modified_base (142)..(142): a, c, g or t
gtatttcggtgtgacggtgcaggtgccgtacaccgatgtgtggacgtataaaccggtgcagtactatccagggaaacatccgtgcgaaaaaccggcagaaatgctgcagcagataatcagcgcaagnagtcgtccnggnganctggttgcggattttttcatggg

SEQ ID NO: 379 - DNA, 63 bp, Escherichia coli
  Strain O55:H7
agcgagcgactcataatcgccaggtcgctggttcaaatccagcaagggccaccaaccgccact

SEQ ID NO: 380 - DNA, 82 bp, Escherichia coli
  Strain O55:H7
  modified_base (11)..(11): a, c, g or t
  modified_base (16)..(16): a, c, g or t
gtccattatcngtatnctgcgttgttagctcagccggacagagcaattgccttctaagcaatcggtcactggttcgactcca

SEQ ID NO: 381 - DNA, 150 bp, Escherichia coli
  Strain O55:H7
acgcgccacaccacacttatctgccctgactctcttttgcgggctttttattacaggaaagacaccggacagtgaaatgttaaatgcctcacaattcaggtagttgactgttgcctgacatgctgagcgtttgttaaaaaaatcctgcat

SEQ ID NO: 382 - DNA, 89 bp, Escherichia coli
  Strain O55:H7
  modified_base (6)..(6): a, c, g or t
gggcanaatgacagatgtttggttgcgtattgtataggcaagttgcggattctgtctggtcattgcagaattcaccgggaggcacccgg

SEQ ID NO: 383 - DNA, 43 bp, Escherichia coli
  Strain O55:H7
tgtatacagagattaggcatatatccaggctcctcatcgcagg

SEQ ID NO: 384 - DNA, 44 bp, Escherichia coli
  Strain O55:H7
  modified_base (2)..(3): a, c, g or t
  modified_base (42)..(43): a, c, g or t
gnntcgggcaacagcatgagatacttgcattgtcatttttanng

SEQ ID NO: 385 - DNA, 30 bp, Escherichia coli
  Strain O55:H7
  modified_base (14)..(14): a, c, g or t
  modified_base (24)..(25): a, c, g or t
ttttaaccagggtntataaggctnngcaac

SEQ ID NO: 386 - DNA, 53 bp, Escherichia coli
  Strain O55:H7
  modified_base (6)..(8): a, c, g or t
  modified_base (23)..(23): a, c, g or t
ggccgnnnagtccaatgccatgncttacggtgaagggcttccgctgccggatt

SEQ ID NO: 387 - DNA, 58 bp, Escherichia coli
  Strain O55:H7
gcatgatgtgcaggatatgagtacgctgaatcatccgaaggcagacctgagcaaaggg

SEQ ID NO: 388 - DNA, 21 bp, Escherichia coli
  Strain O55:H7
  modified_base (9)..(10): a, c, g or t
ggtgtgggnnaaccgttatat

SEQ ID NO: 389 - DNA, 28 bp, Escherichia coli
  Strain O55:H7
tctccgtgtttaacgcgcagtgccatgg

SEQ ID NO: 390 - DNA, 46 bp, Escherichia coli
  Strain O55:H7
  modified_base (14)..(14): a, c, g or t
agatgtgccgtggntttgtggtgacacgacgtattactggaaaaat

SEQ ID NO: 391 - DNA, 37 bp, Escherichia coli
  Strain O55:H7
  modified_base (3)..(4): a, c, g or t
gtnnccttcatgacagacggtaacggcgtcaataccg

SEQ ID NO: 392 - DNA, 27 bp, Escherichia coli
  Strain O55:H7
aggatattacggtgcggcatcgagaac

SEQ ID NO: 393 - DNA, 104 bp, Escherichia coli
  Strain O55:H7
  modified_base (17)..(18): a, c, g or t
  modified_base (66)..(69): a, c, g or t
gcacctcagccttcatnngtggtaaggcaccggaaatcaaaccctcgcccggcggcaacacgccannnngtccgtctgcagatacgtccgttcgcacaatctcc

SEQ ID NO: 394 - DNA, 62 bp, Escherichia coli
  Strain O55:H7
ggtggatgacgcaattaccctgctgacacagggcggcagactgacctgtaagttccgcctgt

SEQ ID NO: 395 - DNA, 35 bp, Escherichia coli
  Strain O55:H7
  modified_base (33)..(33): a, c, g or t
ggtactggtaatccgttcctgatgtcgtacttnac

SEQ ID NO: 396 - DNA, 37 bp, Escherichia coli
  Strain O55:H7
  modified_base (33)..(36): a, c, g or t
tatgcggattgtttcagttacagatgctttatnnnng

SEQ ID NO: 397 - DNA, 43 bp, Escherichia coli
  Strain O55:H7
ctggctcagaaggatagttggatttcacatgatacttatgcct

SEQ ID NO: 398 - DNA, 23 bp, Escherichia coli
  Strain O55:H7
  modified_base (16)..(16): a, c, g or t
gacagacagtgacggntgttgtc

SEQ ID NO: 399 - DNA, 48 bp, Escherichia coli
  Strain O55:H7
  modified_base (19)..(20): a, c, g or t
  modified_base (24)..(25): a, c, g or t
  modified_base (29)..(29): a, c, g or t
gtcatttataacctgaatnngggnntggncggaatgttatctggcatt

SEQ ID NO: 400 - DNA, 23 bp, Escherichia coli
  Strain O55:H7
agagcctgaatgccataatcacg

SEQ ID NO: 401 - DNA, 23 bp, Escherichia coli
  Strain O55:H7
  modified_base (9)..(9): a, c, g or t
  modified_base (21)..(21): a, c, g or t
actggcggnttttttgttttnct

SEQ ID NO: 402 - DNA, 23 bp, Escherichia coli
  Strain O55:H7
gtgacggagacatacatcagatg

SEQ ID NO: 403 - DNA, 26 bp, Escherichia coli
  Strain O55:H7
cacaacaggtgtgtcatacaccacgt

SEQ ID NO: 404 - DNA, 23 bp, Escherichia coli
  Strain O55:H7
acgggatactggttactgcagct

SEQ ID NO: 405 - DNA, 44 bp, Escherichia coli
  Strain O55:H7
  modified_base (25)..(25): a, c, g or t
tctgctgtttggcctgctgacgtanctgacgaacctgtatttca

SEQ ID NO: 406 - DNA, 23 bp, Escherichia coli
  Strain O55:H7
cgaccagtttctggatgaaaagg

SEQ ID NO: 407 - DNA, 87 bp, Escherichia coli
  Strain O55:H7
gtggtgatactggatgcggataaaaagcagatacagtgcgtggtaagaccgctgcaaatcctgcgtgctgacgggacgtgggaaaat

SEQ ID NO: 408 - DNA, 78 bp, Escherichia coli
  Strain O55:H7
  modified_base (4)..(5): a, c, g or t
ttgnngtcatgtatgggggctgtttgttatgactccctgtgtttggaatgaatatttaaatagggagttttgtcatgc

SEQ ID NO: 409 - DNA, 890 bp, Escherichia coli
  Strain O55:H7
  modified_base (687)..(687): a, c, g or t
  modified_base (773)..(773): a, c, g or t
  modified_base (838)..(838): a, c, g or t
catcagctattgcatccaattcattttccaccggaatgcaggttcttcgtgctcaaatggccgccagtggcggtggagaaattacagtaggcgggcagacggtccgtatcacatatagtgaaacggatggtcgctttctggcgagtgggggcaataacagtttgctttctggattattacttacagggcttaatggtggtcctgaagcgctcagggatataatgttaagaatggtttcaggttcaggtaacacacaatcacatggtgatattgaggggaaaatatcacaatgtaagttttctgttaatacggagagccttcagtgtccatccgaggcggttcgatgcccaattatactggataaaccagaagaaggtgtgtttgttaaaaattcagaaggttctttggtttgtaccttatttgattcggtttctttttctcatttggttcgcgacggtgggaagcacccgctaacacgagaaccaataacgtcatcaatgattgtaagtcaagaacaatgtatttatgaccaaaccaaaggaaactttgtcataaaggataagtgaaataaatattacccaagctatatgttaactgccagttgcttatatgaaatgctacagatgttcagggtataaggatgtggtaattggtgtactggatgcagctaaaaagcatatacagtgngtggtgaggccgctgcaaatctggcgtgctgacggggaaatattggcgggatgaaatagccgacggattcacaaaaaccggagtcnggctccggtttttgttgtcatgtcagggagatgtttgttatgaagcccagaggaaatatttatcngtatgaaggaatatggtaatgcctggattagtatcatatatatcatcgactt

SEQ ID NO: 410 - DNA, 419 bp, Escherichia coli
  Strain O55:H7
  modified_base (39)..(39): a, c, g or t
  modified_base (75)..(75): a, c, g or t
  modified_base (362)..(364): a, c, g or t
gcgaatgagatggcggagatgcgtcagcaggtaatggangggcagattggtggatttctcctgggaggggagagngttagagtttcttatttatttcaattgcattaatatcttgaatggattacatagagttaatgtatccagtactccctattctcttgcatataatacatgttgcaacttacatctcagcgctatgaaaaaacaccacctctctctttatgaaattctggatttaccaagcgctaatttatcatttcaatctacctttaagtattgcatttatctccctacgaggtcatactttaggaagttaaatatgaatgataatatacctacagcgcgaaatcacaaacaatcgnnntgtattacagaaaaaacatgcctatatttttaaacttcacagcaggaagtatctt

SEQ ID NO: 411 - DNA, 24 bp, Escherichia coli
  Strain O55:H7
agcatctttacgttatattgtgca

SEQ ID NO: 412 - DNA, 71 bp, Escherichia coli
  Strain O55:H7
ggatatccgttatatcgaatcagtcaatggttttacagtaaatcctgtatgcagtaatcatttctccatat

SEQ ID NO: 413 - DNA, 69 bp, Escherichia coli
  Strain O55:H7
cactattgctcgcaacctggaacagcagatcaacaacggacgaagttttgcacaaatatctcaggattt

SEQ ID NO: 414 - DNA, 98 bp, Escherichia coli
  Strain O55:H7
  modified_base (4)..(5): a, c, g or t
  modified_base (23)..(25): a, c, g or t
  modified_base (59)..(60): a, c, g or t
ctcnntatgataagtctgcgttnnngaatctcacaagagaacatctaccccaccctctnngcagggaaaagatagtaaaagaaatgattattgaaagg

SEQ ID NO: 415 - DNA, 23 bp, Escherichia coli
  Strain O55:H7
  modified_base (9)..(10): a, c, g or t
  modified_base (12)..(15): a, c, g or t
  modified_base (18)..(19): a, c, g or t
  modified_base (21)..(22): a, c, g or t
tttgacacnntnnnncannannt

SEQ ID NO: 416 - DNA, 46 bp, Escherichia coli
  Strain O55:H7
  modified_base (2)..(3): a, c, g or t
  modified_base (6)..(7): a, c, g or t
  modified_base (16)..(17): a, c, g or t
gnnttnnaaataaaanntaataattacatactattagtgattctca

SEQ ID NO: 417 - DNA, 1662 bp, Escherichia coli
  Strain O55:H7
  modified_base (4)..(5): a, c, g or t
  modified_base (50)..(51): a, c, g or t
  modified_base (56)..(56): a, c, g or t
  modified_base (154)..(154): a, c, g or t
  modified_base (215)..(216): a, c, g or t
  modified_base (220)..(221): a, c, g or t
  modified_base (295)..(296): a, c, g or t
  modified_base (300)..(301): a, c, g or t
  modified_base (315)..(316): a, c, g or t
  modified_base (318)..(319): a, c, g or t
  modified_base (351)..(352): a, c, g or t
  modified_base (355)..(356): a, c, g or t
  modified_base (448)..(449): a, c, g or t
  modified_base (451)..(452): a, c, g or t
  modified_base (967)..(970): a, c, g or t
  modified_base (1021)..(1024): a, c, g or t
  modified_base (1027)..(1028): a, c, g or t
  modified_base (1265)..(1268): a, c, g or t
  modified_base (1431)..(1432): a, c, g or t
  modified_base (1624)..(1627): a, c, g or t
  modified_base (1658)..(1659): a, c, g or t
cggnncgccagaaccgtattgatatttactgaggagcctgtacatagatnngtgtnattgcctgattttgatatgttcaatccaacatcaaaagcaggttaatttatggacgaaaaacagttgcaggctctggctaacgaactggccaaaaatntcaaaacccctgaagatctcagccagttcgatcgcctgctgaagaaaatcagcgttgaggnngctnncaacgctgaaatgtcccaccatctgggctacgataaaaaccagcctaaaccgggtgccaactcccgcaatggcnnttcnncaaagaccgttatnncnngtgatggccacctggaactacgcactccgcgnnatnntgatggctcttttgaaccgcaacttgtgaagaaaaaccagacccggatcaccgggatggataaccagatcctgtcgttgtacgccaaaggcnngnnaacccgcgaaatagcggctgcgtttaaagagctgtatgacgctgatgtctcaccggcgctggtatcgaaggtcaccgatgccgttatggagcaggtagtcgaatggcaaaaccggccactggatgcggtctatcccattgtttatcttgactgtattgtcctgaaggttcggcaggacagtcgcgtaatcaataaatccgtattcctcgcactgggtatcaatatcgaaggccagaaagagttactgggtatgtggctggccgaaaacgagggagcgaagttctggctcaatgtgctgactgaactaaaaaaccgcggcctgaacgatattctcatagcctgtgtcgacgggctgaaaggcttcccggacgctatcaacacggtgtatccggaagcccgcatccagctgtgcatcgtgcatatggtgcgcaacagcctgcggttcgtttcctggaaggactacaaagccgtcacccgcgacctgaaagccatctaccaggcccccacagaagaannnngccagcaggcgctggaagcgttcgccagcgcctgggacagtcgctacccgnnnntannccggagctggcaggcaaactggaccaacctggcgatgttcttcgcttacccggcagatatccgcaaagtcatctacacaaccaacgccatcgagtcgctgaacagcgtaatccggcatgccatcaaaaaacgcaaggtgttcccgacggatgactcagtgaaaaaggtcgtgtggctggcaatccaggcggcttcacagaaatggacgatgccactgcgggactggcgtatggcaannnnccgctttattatcgagttcggtgaccgcctggacggtcacttctgagaaaaggcatttacacagaatcgtgtacagggtcgattttactcgttaattagcgaacaaaccactcgtcagcagactcccaggtatctttcagcgtctcctgaacaaaagtttttnnagaatctttatcggcggtgcgagtaactgaaaggccatcgttgctggtggatttgatgatcacttctacatcgtcataacgtttactgacacgtcgcagcatttcttgttgcagggcaggaacagaaccttttggcattttgttgattttggctgcggggtatctgtggggcatatatgggacataaaaagnnnncaaataaacagcaaaatcgagattagggatnntta

SEQ ID NO: 418 - DNA, 23 bp, Escherichia coli
  Strain O55:H7
atcagtctgagcttgaccagagt

SEQ ID NO: 419 - DNA, 42 bp, Escherichia coli
  Strain O55:H7
  modified_base (35)..(36): a, c, g or t
  modified_base (39)..(40): a, c, g or t
cggtggatctgtgaaaacacgggcatgtggacccnnganngt

SEQ ID NO: 420 - DNA, 23 bp, Escherichia coli
  Strain O55:H7
tgaacaccacgctgggcgagacc

SEQ ID NO: 421 - DNA, 31 bp, Escherichia coli
  Strain O55:H7
cgtgggcgaaaaactcgatcaccaggtactg

SEQ ID NO: 422 - DNA, 21 bp, Escherichia coli
  Strain O55:H7
gtttatctgacggcgggcatt

SEQ ID NO: 423 - DNA, 68 bp, Escherichia coli
  Strain O55:H7
  modified_base (4)..(5): a, c, g or t
  modified_base (24)..(26): a, c, g or t
aaanngttttgagatgtatgtctnnngatgggctccgggagaggaagcctttctggtggataaaatca

SEQ ID NO: 424 - DNA, 25 bp, Escherichia coli
  Strain O55:H7
aagagacgctgttacgtgtggatgc

SEQ ID NO: 425 - DNA, 23 bp, Escherichia coli
  Strain O55:H7
gttgcgtaccatatctgtgagga

SEQ ID NO: 426 - DNA, 56 bp, Escherichia coli
  Strain O55:H7
  modified_base (5)..(6): a, c, g or t
  modified_base (32)..(32): a, c, g or t
tgggnncggatcccgcgtgaacttcccaccgngcgtccggccatgctgcatatttt

SEQ ID NO: 427 - DNA, 22 bp, Escherichia coli
  Strain O55:H7
  modified_base (20)..(20): a, c, g or t
gtggggccaatcagttttanag

SEQ ID NO: 428 - DNA, 20 bp, Escherichia coli
  Strain O55:H7
  modified_base (4)..(4): a, c, g or t
acanagcttcagtcggccat

SEQ ID NO: 429 - DNA, 1260 bp, Escherichia coli
  Strain O55:H7
  modified_base (605)..(605): a, c, g or t
  modified_base (1249)..(1250): a, c, g or t
  modified_base (1254)..(1256): a, c, g or t
ataccgaagaggtgatgctggacaaaattaccggaaaaacgccggtggcggcctatgtctccccggttgttgaaggaaaagtgctgcgtcatcgcggtagtgaaacccgcgtgttacgtccgggctacgtcaagccgaaacacgaatttaattaccagcaggcggttgagcgtcttcccggtgaagatccggctcaactgaacgacccggcctaccgtcgtctgcgtatcatcaccgataacctcaaacaggaagagcatgccattgtccaggtggaagaaatgcaggcggtgaatgccgtgctgtatggcaaatacaccatggaaggggatcagtttgatactgtcgaggtggattttggacgctctgaaggaaataacattgagcaggccgacggtaaaaaatggtctgagcaggaccgtgatacgtttgatccgacgcatgatattgacctctactgcgatcaggccagcggtcttgtgaatattgccattatggacggtactgtctggcgtctgctgaatggttttaagctgttccgcgaaaaactggatacccgtcgcggctcaaattcacaactcgaaacggcagtgaaagacctgggngcggtggtgtctttcaaagggtattacggcgatctggccattgtggtggcgaaaacgtcttatgtggcagaggacggtaccgaaaaacgttatctgccggagggcacgctggtcctgggaaatacggctgcagatgggatccgttgttacggtgccattcaggatgcgcaggcgttgtccgaaggtgtggtggcttcttcccgttacccgaaacactggctgaccgtgggcgatccggcccgtgaatttaccatgacgcagtccgcaccgctgatggtgctgccggatccggatgagtttgtggtggtgcaggtgaaataatccgtgagcgggggcgaaatgcccccgtgtcttttttcacagggggctgatatggcaacaaaagaagaaaatcagaaacgtcttcgtcaactggctggcctgctggggcgcgaggcggatatgtcggggagtgctgcggatattgcgcaacgtgtgtctgagtgggaagaggagcttgctgcttcccgggagggcattatgcctggtgatgagagcgggcctgagcaaaatcacacagacgatggtgagcagttgcacaacactgatgctacggatgatgttaaagcggtccgtgtgcggaaatgcctgcatgtgatggggtnntgcnnngaga

SEQ ID NO: 430 - DNA, 31 bp, Escherichia coli
  Strain O55:H7
  modified_base (3)..(5): a, c, g or t
  modified_base (25)..(26): a, c, g or t
tcnnnttgaactgacgtaccggggnntgcgt

SEQ ID NO: 431 - DNA, 78 bp, Escherichia coli
  Strain O55:H7
  modified_base (22)..(22): a, c, g or t
  modified_base (28)..(31): a, c, g or t
  modified_base (33)..(36): a, c, g or t
  modified_base (45)..(46): a, c, g or t
  modified_base (50)..(51): a, c, g or t
  modified_base (53)..(55): a, c, g or t
  modified_base (59)..(60): a, c, g or t
  modified_base (64)..(65): a, c, g or t
tggcgacagccatgatacagcncggaannnntnnnnatgcgtgannttcnnannncctnngatnntgccctcgccggg

SEQ ID NO: 432 - DNA, 23 bp, Escherichia coli
  Strain O55:H7
ggtcaaccacccgcagttaaccg

SEQ ID NO: 433 - DNA, 1377 bp, Escherichia coli
  Strain O55:H7
  modified_base (13)..(13): a, c, g or t
  modified_base (25)..(26): a, c, g or t
  modified_base (35)..(36): a, c, g or t
  modified_base (47)..(48): a, c, g or t
acaggttgcccgngagacaaaggtnngccggaaannggttaaggaanngtccagactgaaacgggcgacggtcagaaatccgaatgccagaattatcgttaaccgcggtgatctccctgtgattaagctggggatcaggatgccggggcgtcgcccgaacagcatactcaaagccggtcagcatcggtatcagcgggcatttattcagcgattaaaaaatggtcgctggcatgtcatgcagcgtgtggccgggaaaaaccgttaccccattgatgtggtgaaaatcccgatggcggccctactgaaacaggcatttgatgagaatgttgaccgtatccggcgtgaacgcctgcctaaagaactggcatccgcgctgaaacaacaactgaggattgcaataaaacgatgaaacacactgacattcgtgccgcagtgctggatgcactcgagcagcatgaacacggggcgacgctgtttgatggtcgccccgttgtttttgacgaagaggatttccctgcgatcgcggtttatctgacggatgcagagtataccggtgaagagctggatgcagatacctggcgggccacgctgcatattgaggtgtttttaccggcacaggtaccggattcagagcttgatcagtggatggaaagccggatttacccggcgatgaccgcgatcccggcactggcaggactgattaccacgatggttacgcagggctatgagtatcgtcgtgatgacgatatggcgttatggagttctgcagatctgacttattccattacatacgagatgtgaggacgatatggcaacaccaaatccccttgagccggtaaaaggtgccggtaccactctgtgggtttacaacggcaagggtgatgcttatgcaaacccgttgtcagacgatgactggcagcgactggctaaggtgaaggatctgacgccgggcgagatgacggcagaatcctacgatgataactacctggatgatgaagacgcggactggaccgcgaccgggcaggggcagaaatctgcaggtgataccagttttacgctggcctggaaaccgggagaggaaggccagaaagggcttataggctggtttgaaagcggcgatgtccgggcctataaaatccgttttccgaatggcacggtggatgtgtttcgtggctgggtcagcagtatcggtaaggccgtgacggcgaaagaagtgatcacccgcacggtgaaagtgaccaacgtgggcaaaccttctgtagcggaagaacgcagcaaaattacgccggtcactgcgattaaggtgacgccgacatccggtacggtggcaaaagggaaaacaaccaccctgacggtttcttttgagccggaaagtgc

SEQ ID NO: 434 - DNA, 9522 bp, Escherichia coli
  Strain O55:H7
  modified_base (195)..(196): a, c, g or t
  modified_base (228)..(231): a, c, g or t
  modified_base (382)..(383): a, c, g or t
  modified_base (416)..(417): a, c, g or t
  modified_base (586)..(586): a, c, g or t
  modified_base (892)..(893): a, c, g or t
  modified_base (1402)..(1405): a, c, g or t
  modified_base (1408)..(1408): a, c, g or t
  modified_base (1568)..(1568): a, c, g or t
  modified_base (1642)..(1642): a, c, g or t
  modified_base (1858)..(1858): a, c, g or t
  modified_base (1934)..(1935): a, c, g or t
  modified_base (1937)..(1937): a, c, g or t
  modified_base (1939)..(1942): a, c, g or t
  modified_base (2510)..(2510): a, c, g or t
  modified_base (3337)..(3337): a, c, g or t
  modified_base (3445)..(3445): a, c, g or t
  modified_base (3453)..(3453): a, c, g or t
  modified_base (4256)..(4256): a, c, g or t
  modified_base (7793)..(7793): a, c, g or t
  modified_base (8193)..(8193): a, c, g or t
gaaaaaacttagaaaacacccaaaaacccacagaatagtaaaaaacatctatgaattatggatttccagttatattcgctcggcgcagcgttagtgtttcatgaaatattttttcctgaatcatcaacggcaatggcgttaattctggcaatgggaacctacggtgcaggttatgtggcgcgtattgtcggagcnnttattttcggcaaaatgggcgacagaataggnnnnaaaaaagtgctctttattaccatcaccatgatggggatctgtaccaccttaattggagtgttaccgacctatgcacagattggtgtttttgcccccatcttgctggtgacgctgcgtattattcagggattgggtgcaggtgcggaaattnncggtgccggtacgatgctggcggaatatgcgcnnaaaggtaagcgcggaattatctcctcatttgtggctatgggaactaactgcggaaccttgagcgcaacggcaatctgggcctttatgttcttcattctcagtaaagaggaactgctggcgtggggatggcgtataccgttcctggcgagcgttgtcgtgatggtctttnctatctggttgcgtatgaatctgaaagaaagcccggtctttgagaaggttaacgacagcaaccaaccgacagcaaaacctgcacctgctggtagcatgttccagagcaaatccttctggctggcaacagggctgcgttttggtcaggcaggtaactccgggttaattcagactttccttgcaggctatttagtacagacgttattgtttaacaaagcaattccaacagatgcattgatgatcagttcgattcccggctttatgaccattccgttccttggttggttatccgataaaattggtcgcnngatcccgtatattattatgaatacctccgcgattgtgctggcatggccaatgctttctatcatcgtagataaaagctatgccccgagcaccattatggttgcactgattgtgattcataactgtgcggtgctgggattatttgctctggaaaacattaccatggcagaaatgttcggctgtaaaaaccgctttacccggatggctatttctaaagaaattggtggtcttatcgcttccggttttggtcctatcctggcgggtattttctgcaccatgacggaatcctggtatccgatcgccattatgatcatggcatattcagtgattggtttaatctctgcgctgaaaatgccagaagtgaaagaccgtgatttaagtgcgctggaagacgctgcggaagatcaaccgcgtgttgtaagagctgcgcaaccttccagaagtctgtaaatcctcaatcccttctcttaccggagaggggatttttattcatataacaaaacatgtagcnnnncanatttaaatttaaggaattgttatgggaaataatttgttatcagcaaaagcgacactccctgtttatgatcgtaataacctggccccaagaattgttcatttaggctttggtgcatttcaccgtgcgcatcagggcgtgtatgccgatattcttgctacanaacatttcagtgactggggatattatgaggtcaacttaatcggcggcgaacagcaaattgccgatttacatcancaagataatctttataccgttgcggaaatgtcggccgatgcgtggacggctcgcgtcgttggcgtcgttaaaaaagccttgcacgtacagatagatggcttagaaaccgtgttggctgcgatgtgtgaaccgcaaatcgcgattgtctctctgacaatcaccgaaaaagggtatttccactctccggcgaccggacagttaatgctcgatcacccnatggtcgctgccgacgtgcaaaatccccaccagccgaaaacagcaacaggggtgattgttgaggcgctggctcgcnntnannnngcagggcttcccgcatttaccgtcatgtcatgtgacaacatgccagaaaacggtcatgttatgcgtgacgttgtcacttcctacgcacaagccgttgatgtaaaactagcacaatggatcgaagataacgtgactttcccatcaacaatggtggaccgtattgtgcccgcagtgacagaggatacgctggcgaaaatcgaacagcttaccggtgtgcgcgatcctgctggcgttgcctgtgaacctttccgccagtgggtaatcgaagataactttgttgccggacgtccggaatgggaaaaagcgggagccgaactggttagtgatgtgctgccttatgaagagatgaagttgcgcatgctcaacggcagtcattcattcctggcgtatctgggttatcttgccggatatcagcacattaatgactgtatggaagatgaacattatcgtcatgcggcgtatgccttgatgttgcaggaacaagcgccgacgctgaaagtgcagggcgttgatttgcaagattacgctaaccgattaattgcacgctatagcaacccggcgttacgtnatcgaacctggcagattgcgatggatggcagccagaaattgccacagcggatgttggattctgttcgctggcatctggcgcatgacagcaagttcgatctgctggcgctgggcgtcgcgggttggatgcgttatgtcggtggtgttgatgaacagggaaatccgatagaaatcagtgacccactgttacctgttattcagaaggctgtacaaagtagtgccgaagggaaagcgcgcgtccagtcattgctggcgattaaggcgatttttggtggtgatttgccagacaatagcttgtttactgcaaaagtgacggaagcgtacttgtctttattagcgcatggtgcgaaagcgaccgtggcgaaatattccgtgaagtaaaaaaagcaatgccgccatcggcggcattcacaagcttagttcatgccgagacgaatcaggtccagtggtgccagtttctcttcacaaccttcaacaactacggtttttccgcggcggatttgctcagcggtcagaccttcagtatcaatcgacaggatcttgccagtgtgaccggtgccgctaaccataacacggctgccagtggtgattgcgttacggttacgatcgtaggtcgtcataggtgttttctcctttctgatttacagtcgaagcccacgtaacgggcgcaatataaatactcctgtcgagtgaaatattttttgtttttgatcaagctcacatcttttttgatgcatgcatgagccataaggcgggggaaaagactctcaccccggatgggatgagaggaaatgaattactcttcgctaaaccagtcgctattttccnggcggatctggcgcacggattcgctgatttcctgcaaatgttgcgtcattgcacgttctaccgcatcgccatcacgtttttgcagggcagagaatatatcaagatgcnggcgtaanagcatttctggtggagaaacatggtcgaaactcatatagcgcacgcgatcaacggtcgctttcaggttctcaatggtatcccacgccagttgacagtcggcaatctgcgtcaggagttgatggaagttgtcatcaagttcaaaaaaatcatccagttgcttgcgctcaatggcaatgcgttgctggtgaagattttgttccagttggtagcactggctttcggtaatcatactcgccgcccgacgcgccaccgcgcactcaatggcctgacggataaaactgccgttgcgcacctgggccatggaaattttgttgacgtagctgccacgctgcggacgaatttgaatcaggccgttttccgccagtttaataaaggcttcacgaaccggctggcgtgacacattgaaacgaacagaaacttctttttccgacaacggtgtgcctggtgcaatcaggcaatggacaatgtcgcgacgaagaatacgataaatctgctgattgacaggctgtgtgggattaagttgcgtttcgacggtcattcgttcttgcttgtgagtgagttaactgcatgagtctaccacttttttgtgacaagcaataacccggcagttacaccgggtataaaaattactgacggtggacattcagcccggcatagctttgggtaaccggcatcatttccagggtattgatattgacgtgagcaggcagcgttgacacccaccagacggcttcgctgacatcttctggcgttaatgcaacggtattttgataggttttttccgctttaccgtcatcgcctntaaagcggacattggaaaactcggtgccacccaccagacccggttcgatgtcggtgacgcgcaccgccgtaccatgcaggtccgtacgcagattcaggctaaactgacgaacaaacgctttcgtcgcaccgtaaacgttaccaccggcatacggccagctacctgccgttgagccaatgttaataatatgaccatgattacgttcaaccatacccggtaagacggcgcgcgtcatatataccaggcctttgttgttggtatcaatcatcgtttcccagtcttcaatgctggctttatgcgcaggctccatgcccaacgccagaccggcattatttaccaggatatcaatattgcaccactcggcaggaagcgatgccagcatctcttcaatagcggcgcggttgcgaacgtccagttgggcgatgtacagattatctcccagttcgtcttttaactcctgcaaccgttcctggcgacggccagtggcgataactttatgcccttgttgaataaaacgacgagtaatgcattcaccaaaacctgccgttgctccagttactaaaacgatcatctcactgttcctcaacgcttttgtgtgtcaataacatagcacgtgatgcttaagagcgggtaatactggtttgcaagattgcactccgttatcagtaagcctacgctatggaacacctcgcgttcaggagaagaaaatgacaacaattaatcctttccttgtgcaaagcacactgccgtatctggctcctcattttgatcaaattgccaatcatcactatcgcccggcattcgatgagggaatacagcaaaagcgggcagaaattgctgccatcgcgcttaacccgcaaacacctgatttcaacaatactattctggcactggaacaaagcggagaattacttacccgcgttaccagcgtcttttttgcgatgactgcggcgcataccaatgatgaattacagcgtcttgacgagcagttttccgctgaactggcggaactggctaatgatatctatctgaacggtgaattattcgcgcgggtagatgctgtctggcaacgccgtgaatctctggggcttgatagtgaatccatccgcctggtggaggtgattcatcaacgttttgtcctagccggagccaaacttgcacaagctgataaagcaaaattaaaagtactgaatacagaagctgcgacactgaccagtcagtttaaccagcggttactggcagcaaataaatccggcggtctggttgtgaacgatatcgcgcagctggcaggaatgagtgagcaagagattgcgctggcggcagaggcggctcgcgagaaaggtctggataacaaatggctgattccgctgctgaataccacccaacaaccggcgcttgccgaaatgcgcgatcgtgcgacgcgtgaaaaactgtttattgcgggctggacgcgagcggaaaaaaatgatgccaatgatacccgcgctatcattcaacgtctggtggagatccgtgcacaacaggctacattactcggttttcctcattatgccgcatggaaaatcgccgatcagatggcaaaaacacctgaagcagcactcaactttatgcgggaaattgttccagcggcgcgtcaacgtgcgagcgatgaattagcctccatacaggcggttattgataagcagcagggcgggtttcgcgcgcagccgtgggactgggcattttatgccgaacaggtccggcgagagaaatttgatcttgatgaggcgcagctcaagccatattttgaattaaacacggtgttgaatgaaggtgtattctggaccgcgaatcagctcttcggtattaagtttgtcgaacgttttgatattcctgtctaccatcctgacgttcgggtgtgggaaatttttgatcataatggcgtggggctggcgttattttacggtgatttcttcgcccgtgattcaaaaagtggcggtgcatggatgggcaattttgttgagcaatcaacgcttaatgaaacgcatccggtaatttataacgtctgcaattatcagaaacccgctgccggtgagcctgcgttgttactctgggatgatgtcataaccttattccatgaatttggtcatacgctgcacggcctttttgcccgccagcgttatgccacgctctccggcaccaacacgccgcgtgattttgtcgaatttccgtcgcaaatcaacgaacactgggcaacgcatccgcaggtattcgctcgctacgcccggcattatcagagcggggcagcaatgcctgacgaactgcaacagaaaatgcgtaatgccagcctgttcaacaaagggtatgagatgagcgaactgcttagcgccgcacttctcgatatgcgctggcattgcctggaagaaaacgaagcaatgcaggatgtcgatgattttgaattgcgggcgctggtggcagaaaatatggatcttcctgctataccgccacgctatcgcagcagttattttgcccatatttttggtggcggatatgccgcaggttattacgcttatctgtggacgcaaatgttggccgatgatggttaccagtggtttgttgagcagggcggattaacgcgtgaaaatgggctgcgttttcgcgaggcgatcctttccagaggtaacagcgaagatctggaacgcctgtatcgacaatggcgcggtaaggctcctcagattatgccgatgctgcaacatcgtggcttgaacatataaacaccaccaatggctgtcctggagatatcgccaggacagcctggttatagcagtaactgcagcagctgggcgagggcaaacctcaccgctaaagctaataccgtttcgcagtcgccagcaaaatgcataaccgcagtgtagttctggcctttaatatgccacgcgaaccagacggtacccgctggcgtaccatattcaccgccctccggtccgccgtagccggtaatggcaatactgacatcagcatccgcacgctctatggcaccggttgccatttctgctgccactttctcactcaccgcagaatatcgttcaagagattgctggcttacgctgaggattttcatctttgcctgatcggtgaaagtaacaaagcctgcaccgtaaaatttgggtgtatcttcagctgcacacagggcgctagccaacttaccgccggtgcatgattcggcggtagttaagcgtaattgatccgcgataagtctttgactcaacgcggatgtcaggttttcaatagtgtcggtatctgcaagttgtacaattttatttctattaatgttcactgttttttgtccacgcttttatatgtaaaggtgatttgctttttctgtatgctcgtccaatataataattttcaaacatataaatccgattattctgaaaatatgtttaagactcttcaatcttcttaactttagtgagttaaattctctgaatatttgacagctagttggctgattttaaatgccttataacaattggcagtattcttatttggcaattntaaaaatagcaaccagacttaataagtcaaaccaaacgcaattaaggagttagtatgaaatttcaggccattgtattagcaagttttcttgtcataccttatgcgttggcagatgaccagggcggtttaaaacaggatgcagcgccaccgccgcctcatgcaatagaagatggctatcgcggaaccgatgatgcaaaaaaaatgactgttgatttcgcaaaaaccatgcacgatggcgcttcggtttcactacgcggtaatttgatttctcacaaaggagaggaccgttacgtttttcgcgataagagtggtgaaattaatgttgttattcctgcgaccgtttttgatggacgagaagttcagccggaccagatgatcaacattagcggcagtctggatnagaaaagcgcgccggccgtcgttcgggtcactcatttgcagaaataaaaataaattagcctgatggcctgaactaccgggccatttgggtactgggttatgctatttgtcatcctttcatttgcgataatgaagaggtaatttacagaattaaacacttttttatccgctgattttgttttaaatcacaatgttatctcagagatgaatcataacttcggatttctatgaaaatattgacgtaattttgcttttctctcgttagaatagcgcgcacaaggaactgtgaaaaaggagtggcaatgatcaagaagacaacggaaattgatgccatcttgttaaatctcaataaggctatcgatgcccactatcagtggctggtgagtatgtttcacagcgtggtcgcgagagatgccagtaagccagaaataacggataaccattcttatggactgtgccagtttggtcggtggattgatcatctggggccactcgataacgatgaattaccttacgttcggctaatggattctgcccatcaacatatgcataattgtggtcgggaattaatgctggctattgttgaaaatcactggcaggacgcgcatttcgacgcctttcaggagggggtgctttcttttactgcggcattaaccgattacaaaatttatttgctgacgatccgtagcaatatggatgttttgacgggattgccggggcgtcgggttcttgatgaatcctttgatcatcagttacgcaacactgagcctctgaatctttatttaatgttgttggatattgaccgatttaaattggttaatgatacctacgggcatttaatcggcgatgtagtattacgcaccctggcaacttacttagccagttggacgcgtgattacgaaacggtttatcgctacgggggcgaagaatttatcattattgtcaaagcggctaatgatgaagaagcatgtcgtgcaggtgtcagaatttgccagttagtcgataaccatgccatcacacattctgaagggcatatcaacattaccgtgacagcaggtgtgagtcgcgcatttcctgaagagactctggatgtggtcattggaagagcagaccgggcaatgtatgagggtaagcaaaccggaagaaatcgctgcatgtttattgacgaacaaaatgtgattaaccgagtttaagctccgtttaacattcattgagaaaactgatgctactgtgtcaacgatccgttatcagtgcaggaaaatgcctgttagcgtaaaagcaaaacacaaatctatccatgcaagcattcaccgccggtttactggcggtt

SEQ ID NO: 435 - DNA, 12582 bp, Escherichia coli
  Strain O55:H7
  modified_base (5)..(5): a, c, g or t
  modified_base (618)..(618): a, c, g or t
  modified_base (1399)..(1402): a, c, g or t
  modified_base (2762)..(2762): a, c, g or t
  modified_base (3021)..(3021): a, c, g or t
  modified_base (3023)..(3026): a, c, g or t
  modified_base (3741)..(3741): a, c, g or t
  modified_base (4057)..(4057): a, c, g or t
  modified_base (5679)..(5679): a, c, g or t
  modified_base (6275)..(6278): a, c, g or t
  modified_base (7275)..(7278): a, c, g or t
  modified_base (7563)..(7566): a, c, g or t
  modified_base (9224)..(9224): a, c, g or t
  modified_base (9858)..(9858): a, c, g or t
  modified_base (11545)..(11546): a, c, g or t
cgccntcataaaaatcaggccccttgtacacaactgtaacaaggggccggttaggtgagggattatctccgttcattagtcatcccatttgtggctgaaatacgcggccagaaaaccagaaaataaaattattcccagtatggccataaaaacattcatattacccagcattatttgcctccgtttatggtgtggtgtgtttcctcgcttaccttaatttttatctcaatgagaaagatattagcagaggttatctaaacaaaggctgaatcaggcgattattgtgatggggaacggctgtttttgcgatattgcgaaggagataataaaaaacgttggtgaaagtgatgacgcaataacgctgaattgccaaaacctgtcagctcggcaaatttctcgatgttaaaaaccgaattttgcagataatcctgtactcgtattaagcgctcattgagcagccagcgggcgggcgtcatgccagttaacgcctcaaaacgtcttaaaaaagtgcgcggactcatatttacccgttcggcgagggaagacacagtatgtgtttgtgccagattctgctgcaaaaagtcgaataaggcacctaacgtctggctttcacgcggngaggccattgggcgcgtcagattttgtggttgatccccctggcgatgtggctgaatgaccagtcgccgggcgacattattagcaatctcatgaccaaaatctttgcgcacgatatgtaaacacagatcgatccccgcggcgcttccggcggaggtcatcacttgtccttcatcctgatataacacattgtcacttacgctgattgaagggtaacggtgctggagttgttcagtgtagcgccagtgggtggttgcttttcgctgatgaagaaggcccgcagcagcaaggacaaacacgccagagcatattgataccaggcgagtaccgcgctggtgtgcctcgcgcaatgactggcatagcatctccggcactttggcatctattccgcgccagccaggaataataatcatatcggcgttgggcaataactccagtccaccatcagcaaccacgtggatccccccggtggcttgtagcgcacctggttctaccgcagcaacagcaaaacgataccagttatcgcccagttccggtcgtggcaggccgaatatttcaacggcaacgccaaattcaaaagtacatagcccgtcatatgccagtgcaatgaccagcggacgttgtaacgttgtcatcattttgctcatttctggcatatcgagaggcggtcagtgaaaggtagattagttacattattgttaacacaacaaaccaaaaggacaaagcaatatgcgttatgtcactgaatttaccacagcgaagccagaagttgctgaggcgcatnnnntcgcgcgcttgagtgtcgaaacagattgcgccgatgttcatgactctctggcttatattggcgatgatttcgttttacttcatgtggttggacgtgaagaggacttcgcgcgtcggcatatcccaggcgctctccatttaccccataagcaaatgaccgcagaaagaatggccgaatggcccgacgatacgctatttgtggtgtattgcgcggggccacattgtaacggtgcagaccgtgcggcactcaaactggctcgactcggaaagccggttaaaatcatgctcggcgggataaccggctgggaagatgaaggctatgcctttgcctcagaataatgattagcgaagccgtgccagtagtggaacggcacgaacgtcaacagagtgctggttgcctctggggtctggcgttaataccttttaacatcagcgcccacgcggcaatgatgactaacgccagaatgataaacagcgaagacgacgggagagtggtaagtacaacaccactcactaatggatttaccgctgcgcccaaccagcctaatgactgggcggaaaaatagctggctttcattcctggcggcgcaatatggtcaatcaacatatactcgcccggcgcataaattatttcaccgacagtaaataccgcagctgacataccccacaatagcaggctgttgccggaaaaaataaaaccgatcagaccgatgacgaaacagagggtgcctgctgtcatcagcgcgcggatgttagccgggttaaggcggcggcccacggaatattgcaacgtaaccaccatggcagcattcactggaagaacaaccgcgaccaccttttcggcaaaatcaccatcagcaatcaccatcacatattgtgaaatgcatgaagcaaatgcgccactaacaaaagaagccagaaagccagagcaggtaaaccacaacagtgccttatcttgtaataaaactttcggcgaccagacactgcctgtttccgtggcgatgattttctcgctgcgctttacccaaatttgaatgaaaaacatgggaaacgcagagcagatagcggccagccaaaagggcagattgatgctctgcatgaccaacagcgtgccgagtggcgggccgacggtccagccaatattgagcatggtgtagttgatcgagaagatcttcgttttgctggtggatgaaagattgtcggcaaaccaggctttcagcacggtagcaaaaacggaataggcgcagttaatgagggcaaaaaagagcaccaccagcgtcacgttattcactaaaggaatggcaataaaaccgctggcgaaggcggtaattgccagtaacatatagcgtttcttgtcgaanttatccgccaggataccaaaaccgaggctaaaaacgacgccaatagtgagcgcaattgtcatcgcataaccgattagatcgacactcaggctgtactggcgactcaagtaaatggtcataaatggcagcgtggcgccgcgtccgatggttaataacaacgacgaggcaagaagggcgctggtagagcgtcgtagggataagttcatttgtctgtccggcagtgcgtttcgttatgttttgttttagagatgtaaagaantnnnntggcaaaaatccgaagtatagcgacttatttgcgcattaatgccgtcgtaaccggcgactaacgaatcaactgttaaagaaaagtaaattcagctaagttgattgcttacaaaagatgaaattcagaggcggtagaatgtcgcgaaaagatggggtgttggcgctactagtcgtcgttgtatgggggcttaattttgtggtcatcaaagtggggcttcataacatgccaccgctgatgctggccggtttgcgctttatgctggtcgccttcccggcaatctttttcgtggcacgaccaaaagtaccgctgaatttactgctggggtatggtttaaccatcagttttgcacagtttgcctttctcttctgcgccattaacttcggtatgccggctggactggcctcgctggtcttacaggctcaggcgttttttactatcgtgcttggcgcgtttacttttggcgaacggctgcacggtaagcaactggcggggattgcgttagcgatttttggcgtactggtgttaatcgaagatagctttaacggtcagcatgtggcgatgctcggctttatgttgactctggcagcggcatttagttgggcgagtggcaatatcttcaacaaaaagatcatgtctcattcatcccgtccggcggtaatgtctctggtcgtctggagcgcattaatcccgataattccgttttttgtcgcctcnctcattctcgatggctccggaaaaatgattcacagtctggtcactatcgacatgaccaccattctggcgttgatgtatctggcatttgtagcgacgatagttggctacgggatttggggtacgctgcttggacgctatgaaacatggcgtgtcgcaccattatcattactggtgccggtagtcggtctggcaagtgcagcgttactgctggatgaacgcttaacaggtctgcaattcttaggggctgtgctcattatggccggactgtatatcaatgtatttggtttgcagtggcgtaaagcggtgaaggtaagangttaacaagccccgatatgccggggcctgaatatactacatggcttgttggttataatagggcacgcccagcgcatccgatttgtcactgcctgtacccatgtgatttaaatcgaacggtggttgttcctgcgatgggggaacaaccaccacatcgccacaggaagtaacgagcggttgctgggtttgttccgcaacgccctgcgcggaaaagagaataagcgcagctgctattgcggataaaagcggtttcataattgcctcagtgacgttgtcacgttttcaactagctgttgtaatggtttaatggatgtaaaaagcgcgattcgccctgcatattggtcatccggtatttatgcggcggaacatcaaagtaatttttgaaggttcgggtcagagtttgttgcgactcgaagccatatcgttctgccagatagagtatcggctcgttactttccttcagcttttgcgcgatttccgtcatcttacggctgcggatgtattggcctaatgaatgaccggtttcttttttaaacatccgttgcaggtgccatttagagtaacccgaacgctctgacactttctccagtgacagtggtgattccaggttgtcctcgatccagtccaaaatgctatgaatggtaatagcgtcagtattgcgtctggacatcgtcatacctcttttttgtttacggcaggactttcttaagcaaatgctcaagtgttgccacttcgtccgccgtcaggttttttgttaattcttgatgcaggtcctggccaactaattgatggcattgttcacatattgccgcgccgctggtggtaagttttaccagtacgccgcgcttatcattcgggttcggcaacctttctacccagcctttacagaccaggcgatccagcatacgggtcagtgctcccaggtcgaccgacaacacttttttcagttcaaccggagtaatacacgccgcgcagcggatagagcagagcaccttaaactgtgccgcggtaatatccagcggagacagatactcgttaagcagacgatctttcttctgattaaccatatggattaagcgacccaatggaataatttcattgaacagatcgctggtacttttcacattagttgccctggcaagtaattagttgcaggggataatattgcccaggcaagtataagtcaaatgaatgaattgaccgatgccacgttttgctaaatcggttcaagttttggtcaatgcgatgcaaggttagctaaagagtgacactttatccttgtttaccccttatacttttcgctgataacccagatacacaggataacaaccaccaatgttagatttgtttaaagcaattggcctggggctggtggtgttactgccgttagctaacccattaacaactgtcgcgttatttcttggcctggcaggcaacatgaacggtgccgaacgtaatcgtcagtcgttgatggcctcggtgtacgtctttgccatcatgatggtggcgtattacgccgggcaactggtgatggatacatttggcatttcgattcccggtctgcgaattgcaggcggcttaatcgtcgcgtttatcggttttcggatgctttttccgcaacanaaagcgattgattcaccggaggcgaaaagcaagtcggaagagctggaagatgaacccagcgccaatattgcttttgtaccactggcaatgccaagtaccgccggtccgggaaccattgcgatgattattagctcggcgtccacagtgcgtcagagttcaaccttcgctgattgggtactgatggttgcgccgccgctgatctttttcctggtggcggttattttgtggggaagtctacgcagctctggcgcaattatgcggctggtgggcaagggtggcattgaagcgatctcccgcttgatggggttcctgctggtatgtatgggtgtacagtttattattaacggcatcctggaaatcattaaaacgtatcattaaaaaaggcccgaatgggcctttcaactattgcgtctgttcttcgagtgtcactggccagcggcgaaatataatgattgaccatattaacgcggcaaaagcaggcaccgtgcccacataaccaatcatcgacattgaccagtgcagactcacctgattacctaccaacgcacccgccccgattccaatattaaatatcccggagaatagcgccatcgcgnnnncggtggcatctggtgccagcgccagcactttaacctgcataccaagcccgatgatcatcatcgcgatcccccagaaaatactcagcaccccgaggtgtatttcactgttcgccgcaggtagcagcagtgccaggcacaccagcaacagcgcaatcgccgtacttaccaacgcagacgcatattgattacccagtttaccgaaaatcacgctgccaataatgcccgcaccaccgagtaataacagtaatgccgtggcaaagttggcgctgaatcccgcaatgttttgcacaaaaggctcaatatagctgtatgccgtgtaatgggcggtgacaaccaccacagttaacaaataaatgctcatcaatgccgggcggcggaataatagcgggaggcttttcaatgaaccggaatgctcactgggcagtaagggaagtaacttaatcaggcacaaaagggtaataagcgccccgataccaatcgcgaagaaggtcattcgccaaccgaaatactgccccacaatgcgcccgagaggtaatcctaataccattgccagtgctgtacctgtggcaattaaactcaatgcctgtgctcgcttcccggccggagccatacggatcgccagggacgccgtaatcgaccagaaaatcgcatgtgcaaaagccacaccaatgcgactgatcaccagaacggtaaagctccacgataaaaacgacagtacgtggctggcaataaacaccacaaacaggcagatcagtaatttgcgccgttcaacctggctggtcattaacataaaaggcaatgacattagcgctactacccatgcgtaaatggtcaacatgatgccgacctgagcggtttgcatgtgaaaactttgcgcaatgtcagagagcaggccaacagggacaaattcggtggtgttgaagatgaaggcggcgactgccagcgtaacgacccgtagccacgccactttgcgggaaacagtgtttgttgtcataannnnattatcgggtgagttgcgaaaaagtgatgaaatgatcttaaaacggttaatgatgtgaatacaatgcatttgtgatctggatcgcgttttccgtttctctgacgctgattctttcacgcgtcagagagatggtaaacatcacggtttaatgacgatcaggaatgtctggcgttttggaggttgcgggtataggtggtctgacaggggagcgaggcctgtttttcaccagatcttcatgagtaacttttggcggtgtttcattttttacaaacagtttgagggtcnnnngcgccatatgtttgataattttatcatcacttaatgatgctggcatcaacacgtcattcaaatcactttcattgggattcataaattggtgatagtgtaacaacatattggcgaaaaataaaaacaagccctgaaaatgaggagattcttgttctgctaaaagggataaaaaacagatgcagacttagggtagtacatgtttgttagaacctaatgaatccatcaggctttgcaataaatcctcttttaattcgctgtccgttatgtcgagaatggcggtgatcaagttaggatctttattgacgaaccatctgtgaacctcagagttattccataatcgggggagtatgacaaaattaccgcgagagataaaattcaggacaagcaaatcaaactggcgtaagtaatctgcagcggtatggtgatccggaggcaggggttcaatatgtggtgtatgcgctcttttgatgggaacgccagggttgatcattgggaattgttcaataaaatcattcagaaacagaaagagcacacgctcgacgccggtctgaaatacgcgccccatagtaacaggctttgggttgggagcgcaaaaaatattaatttctccatcatggcggaaattatctaaataaatagggcttaaatttattactacctgaaattcaatattttctttgtgtcttccattcctggcgggataagtgagtttaaactgaaccttttcattgtatagcgtgtcgttaccccgaaaagaagtcctctgaatatatgataagttgtcaagattattaaatatcttttttgtggctgagttgatgtttaaagacgtgcgccactcttcattacatattattgtactaagtgcatcaataaaatcctttaaaacttcttttacctgcggtgcaatattacgaacgggaaaatcatcaggaagagatatgtaattgctgatgcttactggcgtaaccatatttgccccatatagtcataagtcatcggaacatcactatatagagcatattagccgcaagaactatcaaaaatagctcattggtaaccctgttttgtcgagtcaggcacatccagtagttgaataaatgcctcgagcggacgcgttttcgcaccacgacgccagaccagccaggttgttagccaacaccattgctcagctaacggccacgcttcaacctggtgatgccccggcatactttccagcatagagcgcggaataagcgcaatacctgctcctgcgaccacacaggccaacattccgtgataagactccatctcatggatagttcccggagcggcaccgtcagcatgaaaccagctctcgaagtggcgacgatacgaacaattggcgcggaaggcataaatgttactgccattaacctgactggcacggattactggcgcatgaccttgtggcgtgacgatcatcagctcctcgcggtataccggtatcccgtcaatggcagtatggttaatgggtccatcaataaacgccgcattaagttttccctccagcacaccttccagcatagtgccggaagggccggtggaaagtgaaaactgaattttgggataacgacggttgaattccgccagcgtggccggaatgcgaactgctgcggtgctttccagcgaacccaganaaaataaaccttgcggctcatcgccagcgacaacgctccgcgcttcatccactaacgcgagaatttgttggctatagcgtaaaaagttatgcccggcaggagatagacgtaaacgttgattctcgcgaataaacagatctacccccagttctgtttccagctggcgtagacgggtagtgagattcgacggcacgcgatgcactattgctgcagcctgcgtaatgctgccagcttcggcaaccgcgttgaacatctccagctgggtcagatccataatattctcgattcgtgaataagtggcttaatattattcattttaaagcaagagtaaatctgcgtatcttcataccatgactcataaaggagataccccgatgaccattactccggcaactcatgcaatttcgataaatcctgccacgggtgaacaactttctgtgttgccgtgggctggcgctgatgatatcgaaaacgcacttcagctggcggcagcaggctttcgtgactggcgcgagacaaatatagattatcgtgctgaaaaactgcgtgatatcggtaaggctctgcgcgcccgtagcgaagaaatggcgcaaatgatcacccgcgaaatgggcaaaccaatcaaccaggcgcncgctgaagtggcgaaatcggcgaatttgtgtgactggtatgcagaacatggtccggcaatgctgaaggcggaacctacgctggtggaaaatcagcaggcagttattgagtatcgaccgttggggacgattctggcgattatgccgtggaattttccgttatggcaggtgatgcgtggcgctgttcccatcattcttgctggtaacggatacttacttaaacatgcgccgaatgtgatgggctgtgctcagctcattgcccaggtgtttaaagatgcgggaatcccacaaggcgtatatggctggctgaatgccgacaatgacggtgtcactcagatgattaaagactcgcgcattgctgctatcacggtgaccggaagtgttcgtgctggagcggctattggtgcacaggctggagcggcactgaaaaaatgcgtactggaactgggcggttcggatccatttattgtgcttaacgatgccgatctggaactggcggttaaagcggcggtagccggacgttatcagaataccggacaggtttgtgcagcggcaaaacgctttattatcgaagagggaattgcttcggcatttaccgaacgttttgtggcagctgcggcagccttgaaaatgggcgatccccgtgacgaagagaacgctctcggaccaatggctcgtttcgatttacgtgatgagctgcatcatcaggtggagaaaaccctggcgcagggtgcgcgtttgttactgggcggggaaaagatggctggggcaggtaactactatccgccaacggttctggcgaatgttaccccagaaatgaccgcttttcgggaagaaatgtttggccccgttgcggcaatcaccattgcgaaagatgcagaacatgcgctggaactggctaatgatagtgagttcggcctttcagcgaccatttttaccaccgacgaaacacaggccagacagatggcggcacgtctggaatgcggtggggtgtttatcaatgggtattgtgccagcgacgcgcgagtggcctttggtggcgtgaaaaagagtggctttggtcgtgagctttcccatttcggcttacacgaattctgtaatatccagacggtgtggaaagaccggatctgacgcgacatattcagctctgatatactcgcaggtcttttcagacctgcggtccaggagtagaaagtggcagtcgccatggataatgcaattttagaaaacatcttgcggcaagtgcggccgctcattggtcagggtaaagtcgcggattatattccggcgctggctacagtagacggttcccgattgggcattgctatctgtaccgttgacggacagctttttcaggccggagacgcgcaagaacgtttttccattcagtctatttccaaagtgctgagtctcgttgtcgccatgcgtcattactccgaagaggaaatctggcaacgcgtcggcaaagatccgtctggatcaccgttcaattctttagtgcaactggaaatggagcagggtattccgcgtaatccgtttattaatgctggtgcgctggtggtctgcgatatgttgcaagggcgattaagcgcaccacggcaacgtatgctggaagtcgtgcgcggcttaagcggtgtgtctgatatttcctacgatacggtggtagcgcgttccgaatttgaacattcnncgcgaaatgcggctatcgcctggctgatgaagtcgtttggcaatttccatcatgacgtgacaaccgttctgcaaaactattttcattactgcgctctgaaaatgagctgtgtagagctggcccggacgtttgtctttctggctaatcaggggaaagctattcatattgatgaacctgtggtgacgccaatgcaggcacggcaaattaacgcgctgatggcgaccagtggtatgtaccagaacgcgggggagtttgcctggcgggtgggactaccggcgaaatctggcgttggtggcggtattgtggcgattgttccgcatgaaatggccatcgcagtctggagtccggaactggatgatgcaggtaactcgcttgcgggtatcgccgtccttgaacaattgacgaaacagttagggcgttcggtttattaatgcagtctctcgatccactcttcgcgcgtttatcccgttcaacatttcgatctcgctttcgtttgggcatgaaagagcgtcagtattgtctggagaaaggcgcgccagtcatcgaacaacatgcggcggattttgtcgctaaacgtcttgctccggcattaccggctaatgacggtaagcaaacccccatgcgcgggcatccggtgtttatcgctcagcacgccaccgcgacctgctgtcgcggttgtctggctaagtggcataacattccgcagggtgtttcgctaagcgaagaacaacaacgttatatcgtggcggtaatctatcactggctggttgtacagatgaatcagccatgagaattgcggaaaacgacaaaatagcattcccagggtacctttatttgccgccgctgtcagcgaacatgctatcctttatgagaatttacttattacgttgagataattgccacccgcaattgtatggacagataattaatgcatgtacaccccatttcaactttccgtgtgttccaggaaggtcatctgctacgtaatagcatcgctatttttgcgctaaccacgctgttctattttattggtgca

SEQ ID NO: 436 - DNA, 7560 bp, Escherichia coli
  Strain O55:H7
  modified_base (1691)..(1691): a, c, g or t
  modified_base (2087)..(2087): a, c, g or t
  modified_base (2577)..(2577): a, c, g or t
  modified_base (5373)..(5373): a, c, g or t
aggctggttcacgaactttctcttttctggccgctgaatggcgtaatggcgggggtgtttgcccgctatgtctggcttaatcgactgcattactatgcgatcagttatgtggcgatgctggtttatgatgccataaccaccgaatggggactggtttcactggctatcaatttctccaatatgatgtttattgttaccgtcgccttactggtcgtgcgggataagcgtttggggaaaaataaatatgagccagtaagtgccttacggctatttaattactgtctgattgccgcattattatgcgctattgtcggggcgattggttcggtcagtattgatagtctggatttctggcctttgcttgcggactggttcagtgagcaattctcaacgggcgtgttgatcgtgccttgtatgctgacgttggctattcctggagtgctgccgcgctttaaagcagaacagatgatgcccgccatcgcgcttattgtgtcggttattgcctcggtagtcattggcggagcggggagtctggcgttcccgctgcctgcattaatctggtgtgcagtgcgctatacgccgcaggtaacatgtctgttgacctttgtcaccggtgcggtggaaatcgtactggtggctaattcggtgattgatatctcggtcggttcgccgttctccattccgcaaatgttctccgcacgtctcggtattgccacgatggcgatatgcccaattatggtttcttttagcgtggcagcgatcaattcgctaatgaagcaagttgcgctgcgagccgactttgattttctgactcaggtttactcacggtccggtctttatgaggcgctgaaaagtccatcgctgaaacagacacaacatctgactgtcatgctacttgatatcgactatttcaaaagtattaacgataactatggacatgaatgtggcgataaagtgttaagcgtgtttgcccggcatattcagaagattgtcggtgataaggggctggtggcgcgcatgggcggcgaagaatttgctgttgcagtgccgtcagtgaatcctgtcgatggtctgctaatggcggaaaaaatccgtaaaggcgttgaactgcaaccattcacctggcaacaaaaaacgctttatctcacggtaagtattggcgtcggtagtggtcgcgcatcgtaccgaacgctgaccgatgactttaataaattgatggtcgaagccgatacctgtctgtatcgctcgaagaaagatgggcgcaactgtaccagcactatgcgttacggcgaggaagttgtctgacatctttattcattccgcgcgatttgaatgcaatgtgttctaccactttatgatccaggaaaaggcgtatttcctcgattaaaccatgatccgcgccacacttttctcataaaactgctcattaatcatcaggagttgatcaaaacaggggttcgtcgtattaaagtttgctaacctgtcgtaccaattcaaacaggttgtatgactaatcagaagggaacccattgtgaaaacactaaatcgtcgcgattttcccggtgcacagtatccagaacgtatcattcagtttggtgaaggtaacttcctgcgcgcctttgttgactggcaaatagatctcctgaatgagcacaccgatctgaattctggtgtggtcgttgttcgtccgnttgaaacttcattcccgccgtcactgagcacgcaggatggtctgtacaccaccattatccgtggcctgaatgagaagggggaagcggtcagcgacgcgcgtctgattcgctctgttaatcgtgaaatcagcgtctacagtgaatacgatgaattcctgaaactggcgcacaacccggaaatgcgctttgttttctctaacaccaccgaagcgggtatcagctaccatgcgggcgataaattcgatgacgcgccagcggtaagttatccggcaaaactgacccgtctgctgttcgaacgttttagccatttcaacggtgcgctggataaaggttggatcatcatcccgtgtgagttgatcgactacaatggcgacgcgttgcgtgaactggtgctgngctatgcgcaagagtgggcactgccagaagcatttattcaatggctggatcaggctaacagcttctgttctacgctggtggaccgtatcgttaccggttatccgcgtgatgaagtggctaaactggaagaagaactgggttatcacgatggtttcctcgacaccgctgaacacttttacttgtttgtgattcagggaccgaaatccttagcgaccgagctgcgtctggacaaatatccgctcaacgtgctgattgttgacgatattaaaccgtataaagaacgcaaagtggcaatactcaacggtgcacacaccgcgttggtgccggtggcgttccaggcagggctggataccgtaggtgaagcgatgaacgatgctgaaatttgcgcattcgttgaaaaagccatctacgaagaaattattccggtactggatttgccacgcgatgaactggaatctttcgccagtgcagtcaccgggcgtttccgtancccgtacattaagcatcagctgctgtctatcgcgctcaacggtatgaccaagttccgtacccgcatcctgccgcagctgctggcagggcagaaggcaaacggcacacttccggcgcgccttactttcgcattagcggcattgattgcgttttatcgcggtgagcgtaatggagaaacatatccggtacaggacgatgcacactggctggaacgttatcagcaactctggagtcagcatcgtgaccgtgttatcggtacccaggaactggtagcgattgtgttggcagaaaaagaccactgggagcaggacctgacgcaagtgcctggtctggtcgagcaggtggctaatgacctggatgcgattctcgaaaaagggatgcgcgaagctgtacgtccgttgtgctaatactctgaacccggtttcgaccgggtttcttatttcattatattagttacaacatcctataagcctttatcattaacaggtgccacatgcagcacctgttaatgttgtaattttgtaggtaatttgtaagtagcgtcttgagaatgtgatcgtaatcacgtttaatagggcgacttttccacgcctgaagataaccatgattgttcgtccacaacaacactggctgcgccgtatttttgtctggcatggctcagtattatccaagatatcctcgcgcttactactcaattttctcttttctatcgctgttattttcatgctgccctggtacacgcatctgggcatcaaattcaccctcgcaccgttcagcattctcggtgtcgccatcgccatttttcttggttttcgtaataatgctggttacgcccgttacgttgaagcgcgcaaactttgggggcagttgatgattgcctcacggtcgttactgcgcgaggtaaaaacgacattgccggattcggcaagtgtaagggagtttgcccggctgcaaatcgccttcgcccactgtttacgcatgacattacgcaaacagccacaggtggaagtgctggctcattatctcaagactgaagatcttcagcgtgtactggcttcgaactctccagctaaccgcatcttgttaataatgggggagtggttggcggttcagcgacgcaatggacaactttcagatatcctgtttattagcctcaacgatcggcttaacgatatttcagcggttctggcaggctgcgagcgcattgcctacacgccaattccctttgcctacaccctgattttgcatcgtaccgtttatctgttttgtatcatgctgccgttcgcgctggtcgtggacctgcattacatgacgccttttatctctgtgctgatttcctatacttttatttcgctggattgtctggcggaagaactggaagatccgttcggtactgaaaacaatgatttaccgctggatgccatctgtaacgctattgaaattgacctcttacagatgaacgatgaagccgaaattccagcaaaagttcttcccgatcgccattaccaactgacgtgatatttactccgtacggcgggcaacaataaacagacgcggaaatgccagcagtatctgtccgttctcttgcagtggatactgctctttcagcatctgatggtagcgcgtaagaaaaagctgctgttcgctctcggtcagatcctgtaaccacggacgtaatccagtggcggtcacccaatcgataatcgcctggtgcgacggcatctggtgatagtaggtggttcgccagatatcgacctcacatccggcttcgctcaaaatatcgtagtaagcatgaacaccagccaacggctcacgcccgcgatccgggtagttttgttcccaggcaacttcgcgcatgagcacatgggtcggctccagccagttatctggcatctgtactgccagcacgccctgcggattaagtaaagaaaccaagtgaggaaacaattcgtagtggtcgggcagccattgcagtgaggcattagcaaaaatcagatcgagtgcctgttccggttgccagttgcggatgtctgcttccacgaactggcagtctggcaaagcactgcgcgcttcagcaatcatcgccggagacgagtcgatgcccgttatcctggcagcaggccaacgttgatgcagcagggcggtgctgttacctgggccacagccaagatcggcaacataatcgacattctccagcggcactctggcaagcagctccaccgccggacgcgatcgttcagcggcaaagtgcagatataaagaggggttccagtcagacatttatttactcccgtcagcgcgttaccccaattgtagataaaactgataaattcgcctcacggcatcaacccattgaacagacgttttttacgcggcccggtcattaaagattccagtttcgcgacacaggttttgtagtggggcgtggttttatggaacgccactgcgtcttcatctttataggcttcgtagatataaaagcgcgaattcacttccgggtcctgtaagacatcgaagcgcaaattgccttcttcctgtacagagcccaggtggttctggcgaaaaacttcgataaactcgtcaaccttgtcttcatgaacgttaatttcaaccagtgtgacgtgcataattcttctccttaaatccgcagttactgtttttcactcagatagagttcatatgcccgatcagccgtttcgttatggtgaaccaccgcctgtacggctttcatcatcgccaccggatggtcagactggaaaatattacgccccatatccacaccagaagcgccctgatngatagcctgccagcacatttccagcgcctcgcgctccggtaattttttaccgccagcaataacaatgggtaccggacatccggcaacaatccgttcaaaacctttttcgacataataggttttgataatttgcgcccccatttcagcggcgattcgagtcgcgagcgagaaataacgctgatcgcgcaccatgtctttgcccacgccagtcacggccatggtcggcattcccactttcattccggcatcgaccagctgaataatatttttgatcgactgatgttcatattcgctgccgatataaacctgcgccgccaccgcgcaactgttcaggcgcacggcgtcatccatcgataacgccacggcttcattgcttaattccgccaggatagagttcgcacctgacgcccgcagtaccaccggcttattggtcgccgggggaactacgctgcgcaaaatcccgcgcgtacacattaatacatcggcatgttcaaacagcggggcgatatttatatcaatgcgttcaagtccggtagttggtccctgaaaataaccatggtcaaaagccagcatcacggttttacccgttttcggattaaatatccgcgataagcgtgactgcattccccaatccagcgcaccgcaacctttcagggtaaaagggatatttttttgcggttgatcggtacgaaaatctttaccatctttaatatcgtctaaatctgccataacttactccggttaagtaatgcacatcagaaatcgtatttgccgatattctctttgttgaatatcacgcgctccggtaacagtacgatgccattaccatccgcttcgtagtcatagccctggacgctgtttggcgagacttccacctgacctacgccctgaatatccagcttgtcgcccgttttcattgatccttttttcaataatgcatccgcgacataaactgaaattttgccttgctgaaccacatcccacaggccaaattctttcaccgtgccgcgttccacatatggacgcatcacgtttggcgtactgaatccgacaatcgcaactttgtcatttttcaggttttctgcggcttgtgcggcagcgggcagggcattggcatcgggggcgataatggcgtcgagatcgctatacgcttttaatattccttctgcggtttgtaatgatttagtggcatcgttatagccaaactgcgtagtgacaatttcccagccaggatgctctttggcgattttcgctttcgcttctttcacccactggttttggtccgtaacggtggggcttgagtagaaaaacgcgactttggctttgtctttattcacctgacgcgccgccatatccaccaacatacctcccaactgggcgggagttccctgattaatgtagtaagagcggcactccggtttagtatcagagtcccaggtcagcactctcacaccacgttgcatggcgcgtttcagtgccggacacaagccatcaggcgaaaccgcagaaacgataatggcgttataaccttgattgacgaagttattaatcaactgtacctgaccagaaacactgggttctgtcggcccgtcgtaggtcacatcaacgcccagctctttacccgcttgttgtgcgccgttgccaccgctggtaaaaaatcccacgccaaccagtttgggaataaatgcaatacgctctgcggcctgcacattcatagagattgcggcaatgccaagagcgctaagtaaggcgattttcttaaagcgatgaagtgtcatgaagatatcctttatggcaatgggttattggcccgacgcgccagccactctttaatttgctggcgatgcaggctaacggaacgacctacgacaacgacgataagtagcgcaccggaaagggcgctggacacctgatttggcactcctgccatttgcaaaccttgttgcaaatatcccactaataaaaccgcaatggcggtgccgataatggcaccggaaccaccataaatattggcaccgccaagcaccacggcggtgatggcgggcatcagaaacgacgcaccgagatcggaacgtgctgaaccaaaatacgacaccagcagcacagcggcgaccgcagacgccagccccgtcatggcatagagcgcacataaggtacggttaactggaatcgcgctataaagcgcca

SEQ ID NO: 437 - DNA, 5229 bp, Escherichia coli
  Strain O55:H7
  modified_base (5153)..(5153): a, c, g or t
gggctttgcccaatcaaaaacacgttacgtccggcatgggttttatgcagccagagccagaaaacgaggagacatatcaggaagataatcagcggaacggggagccccaacacatccaggttagcgaaatctgtaaacgccatcgggaatccaccaataccttcgtaccccgtcgccccggccatcccggaaagcagcagggcgcttccggcaaacagatacagcgtgccaagcgtaatcaccagcgggttaactttggtatagataattaatccggcgttgatcagcccgcacaatgcgccgagcagtaaggtcaggagaatcgccagcggcatcggcacaccactttgaaacagtacgcccaatgcaatggcgcagaggccgatggtcgaaccaaacgaaatatcgatcccgccactgacaatcaccatcgtcagcggtagggcgacaatgccaatgcagataaagtcactggtgctgaacagcaacatattgagatctaacatccgcgggttaattgcaccaaatgagacaatctcaataacaagcagtgcggcaagagccagttcccaaccgtagcgaatacgcattatgcagcctcccgttttttacctgacgaagcgggtttaacggatggcggtggcgtcataaagcgggcatatttttgccgccgcagattaagttccagcgcacaacgcaggcgtccatcaaacaccagcaccgccagcagaaccagacccgcgataaaatcattccaccatgccggaatgcgcaacagcaccagtacgctatcgatctgcgtcaggaaccatgcgccgagtaccgcaccgatgatcgcaccggaaccgccgagcaaactaatgccgcccagcacgcaggctgcaattgctttcatctccagcccggtaccggtctggttggggataaaaccaatctgcgaagcaaacacaattcccgccagtgccgccatgcagccgttcaacgaaaatgccacaatgcgaatggcttccgtacgaacgcccagttgacgagcgccctgtaaattatcgcccgtggcataaaaactgcgtccaaacgctgtcttcgccagcagccaggccataaatgccaccagaattatcgttaaccaaccaattgctgaaacgccaagcagcagcggggcggagagctgtttcagttcggcgggtaacccttcaatccatttaccgccagtccacagcaacatgatgcctctgtacaaccctaacgtgccaagggtggcaacaatggcagggatctttagccacgcgaccaggacaccgttgaaaaatcccgcgagcaaaccaagcagtaaagtcgcgacacaggcaacaggtagtgaatatcctgcgttcagtaacatccccaacagcaccgcgcacattccggtaatcgaacccactgaaacatcaatattgcgcgtaagcattaccagcgtcgcgcccattgccagcaggatcaggatttgcgcgctgctataaaccatggtcagcgtttgcacacttaaatactggcggtcgagaaaaccgggtaatacaaacagcagcagcaccgccagcagtgccgtgatttcacggttgttctgaataaacttcagcatgccgcctcctgacgctgactatcgccgaaggcaacgcgcataatagtctcgacattaatatcgcgcccggtcagtgcagagtgggtaatttcgccctgatgcatcacatacacacgatctgccatcagttcgatctcttccagatcagaggagataagcagcacagccacattctgtgcggcgatgctgcgcaacagttggtagatatcattacgcgccgagacatccacgccgcgcgtcggctcatcgacaatcaatacttgcggcgaggcttccaggcatttggcaatcaggattttttgctggttaccaccggataatgtccgtgcagcttgttccggttggttatatttaatattcagcgcccgacgataaagttccagggtggcattatctttcgcggttttcgcccagaatccacgaaggttatgagtaagggcgcagacgttccaggccagcgaagcatcgagattcagtccggatgactggcgatcttccggcagataaaccagaccgcgcagtaaacgttctccagtggataatctattgatctctttatcattcagcataatgcgtccgccacgcaaagtacgtagaccatagagcgtctcggccagttctgtgcgtccggcacccaccagcccagccagacccagaatttctccggcatttagcgtcaggctgacattcctgaaaccttcgccagtcagattttccagtgtcagcaccgacgttcctgcggcatgttgtgggcggttgccaggtaactccagccataatttttggctggcagagagcgatttttcccgtaccgctggggtgatggcctgaataatgtcgtcggtagacagttcgctggttttgccgcttaaggcgatggttccgtcgcgcatcacgctaatccgatcggcaatctggcgaatttccggcagcttatgcgagataaaaacaatacccacgccagtagcaagcagctcttgcaagcgagtaaacaagcgttcggtttccgcaggggtaagcgaggcggtaggttcatcgaggatcagaatccgcgagtcgcgcatcagcccgcggaggatttccaccatttggcgatcggcgacatccagcgatcctgccagactatgcagatcaaactggcagcccagcgccgccagcaagttcttcattttctgcatggagagctgtttttttgccagcccaaacaggatgttttcttttatcgacaggcttgggaaaagcagcggttcctggggaacgagataaatacccagctgatgagcatgaactggcgttaatctggcgtagttgttgcccccaatctccagcgtaccgctatcagcaggggtaataccggcaataatcttcattaacgtcgatttaccggcaccattgccgccgagcagggcgtggacctccccctgatgcaacgtaaaatcgatgcctttcaggacattgacccctgaatactgtttataaaccgagcgggcgcaaagtagcggtaacgcgcgggtatcactcgtttgcatatttcccccgttcagttttgcaggtgagttttgaacaaatgtatttctgcttttaatttgttcataaccttaggtggacattgcacatatttccgacgaatagatcacaatttatactattttgattttcacggttgcgtttgttcatgctcgtagagtcaaactgtggttgccatcacagatataaatgcgcaagaactgaacaattgcattaaagatttaaatatgttcaaagtgaagaatgaattatgacaatcaacgattcggtaatttcagaacagggaatgtgtgaagaagaacaggtcgcgcggatcgcgtggttttactaccacgacgggctgacccagagtgagatcagcgatcgtctcggcctgacccgtttgaaagtgtcgcgattactggagaaagggcatcagtccggcatcattcgcgtgcagattaattctcgctttgaaggctgtctggaatatgaaacacaattacgtcgtcagttttcgctgcaacatgtccgggtgatccctgggcttgcggatgctgatgtcggcgggcgactggggataggcgcggcgcatatgttgatgagtttacttcaaccacaacagatgctggcgattggttttggcgaggcaaccatgaatacgctgcaacgcttaagtggttttatttcgtcacagcaaattcgcctggtcacgctctccggtggcgtcggttcttatatgacgggtatcggacagcttaatgcggcgtgcagtgtgaatattattccggctccgttgcgggcatcctccgctgacattgcccgtacgctaaaaaatgaaaattgtgtcaaagatgttctgttagccgcgcaagcagcggatgtggcgattgtcggcattggggccgttagtcaacaagacgacgcgacgatcattcgctccggttatatcagccagggcgaacagttaatgattggccgaaaaggggcggttggcgacattttaggstacttttttgatgcaaaaggtgacgttgtcacggacattaaaatacataacgagctgattggcttacctttaagcgcgctgaagaccatacccgtccgggttggcgtggcagggggagaaaataaagccgaagcaattgccgctgcaatgaaaggcggttatatcaacgcactggttaccgatcaggacacagcagcggcgattttacgtagttaaatttgcatgaccttattaccgggaatgatggagaacgtatagaggaacagacagaacgcataagccgaggataatctaatggctcgactctttaccccttcagaatcaaagtactacctgatggcgctggatgcaggcaccggaagtattcgggctgtgatattcgacctggaaggcaatcaaatagcagtgggacaggcggagtggcggcatctggcagtaccggacgttcctggttctatggaatttgatctcaacaaaaactggcaactggcgtgtgagtgtatgcgccaggcgctgcacaacgccggcatagccccggagtatatcgctgccgtttcggcatgttcgatgcgtgaaggcattgttttatataacaatgaaggaacaccgatctgggcctgcgccaatgtggatgccagagcggcgcgcgaagttagcgaacttaaagaactgcacaacaatacctttgaaaacgaagtttatcgcgcgaccggacaaacactggctttaagtgccatccccagattactttggctggcgcaccatcgttccgatatttaccgtcaggcatcaaccatcaccatgatcagcgactggctggcctatatgctcagcggcgaacttgcggtggatccctctaacgctggcaccacgggacttcttgatctaaccatccgtgactggaaacctgcattgctggatatggctggcctgcgtgccgatattctttctcctgtcaaagaaaccggcacattgctgggcgtggtaagttcacaagcggcggaactctgcggtctgaangtgggcactccggtggtcgttggaggaggcgacgtgcagcttggttgcctggggttaggcgttgtgcgtccggcac

SEQ ID NO: 438 - DNA, 6792 bp, Escherichia coli
  Strain O55:H7
  modified_base (2367)..(2367): a, c, g or t
  modified_base (2726)..(2729): a, c, g or t
  modified_base (3243)..(3243): a, c, g or t
  modified_base (3252)..(3252): a, c, g or t
  modified_base (4201)..(4201): a, c, g or t
  modified_base (5137)..(5137): a, c, g or t
  modified_base (5619)..(5619): a, c, g or t
  modified_base (5903)..(5903): a, c, g or t
  modified_base (6790)..(6791): a, c, g or t
cattctggcagcaagttgtaaatttagccgcgccggtgacagacccagaaatgaacgtgcgcgttaatcctcatgttattcctggcatggtacaagctgaatctataagcttttttaccggactcaccatgcgctggttccgcgatgctttctgtgccgaagaaaaactgattgccgaacgtttaggcatcgacacctatacgctgctggaagagatggccagtcgggtgccgcctgggtcgtggggcgtaatgccgatcttctccgacagaatgcgctttaaaacctggtatcacgctgcgccttcctttattaatttgtccattgatccggataaatgtaacaaagcgacattgttccgtgcgctggaagaaaatgcggcgattgtatcagcgtgtaacttgcagcaaattgctgatttttcgactattcatccttcatcgttagtctttgcaggcggaggttcaaaagggaaattatggagtcaaattctcgctgatgtctcgggattacccgtcaatattccggtggtcaaagaagccactgcattaggatgtgccattgcagctggcgtcggtgccggaattttttcatcaatggcagaaaccggagaacgcctggttcgctgggaacggacgcacacaccagacccggaaaagcatgaactttatcaggattcacgcgataagtggcaggcagtttatcaggatcagctggggctggttgatcatggactgacgacgtcgttatggaaagcgcctgggttatagtttcattgacagccacatcatgatgaccgtggctgttagtttttgagtatagttattcttatttcccttcttttagagctggcttgttaaatgccagcttgcagattcatcgtttcatcaccagtactatattcaaggggaaattgctatttttcttaaagcattaagcataacccttattttataacgaatattcctaaagacattaatggatgcaaaaggggtttaataaacttcgatttttagcaattagtgctattctttgttaaatatgatgatgataattttcctactgaaagaaacagttttcttattaagcaacaataactcatagttcatttttaaataaaataagaactatgcaatttttaatctatcaattcgaaagtattagcaagttagccaaattgacactttcccacctccaactaacactcaatacagacctctgacaatttaataaatttcatttttaatgtctgacgactcatctctttcgtggctgtattgtttgtatttggagcgtttatatgaatagaatctatcgcgtgatatggaattgcactctacaggtatttcaggcctgctcggaattaactcgcagggtaggtaaaacatcaacggttaatttgcgaaagtcctctggactgacaacgaaattcagtagattgacgctgggtgttttgctggcactaagcggttcagtgtctggtgcgagtctggaagttgataatggtcagattaccaatattgatactgatgttgcttatgatgcctacctggttggctggtatggcactggagtgcttaatattttggctggcggtaatgcctccttaaccactattactaccagcgtcattggcggtaatgaggattcggagggtaccgttaatgttttgggtggcacctggcgattgtatgatagcggaaataatgcaaggcctttaaatgtgggtcaatccggaacggggacgctgaatattaaacagaagggtcacgtcgatggaggctatttaagattaggtactcaagctgcaggcgtcgggacggttaatgttgagggagaggactcggttttgacgaccgaattattcgaaatagggagttacggtacgggctcattaaatattacggataagggttacgtcacgagttcaatagtcgccattttaggatatcaagcgaacagtaatggtaaggttgtcgttgaaaagggtggcgagtggctaataaaaaataatgattcctcaattgaatttcaaattggtaatcaaggaactggggaggcgactattcgcgagggtgggctgattacggctgaaaatacgattatcggtggcaatgccaccggtgtcggaaccctgaatgtgcaggatcaagactctgtcatcacggtacgcagactctataatggatatttcggtaatggcgcagtcaatatttccaataatggactaattaataacaaagaatattcattggtgggcgttcaggacggttcccacggtgtcgtcaacgtgaccgataaagggcattggaatttcctcggaacgggcgaagctttccgctatatctatatcggtgatgctggcgncggtgaacttaatgtctcgcgtgaaggtaaagtagattcgggaattatcactgcggggatgaaagaaacaggcacaggcaaccttactgttaaggataagaactccgttatcactaatctcggaactaatcttggttatgacggccacggcgaaatgaatatcagtaatgaggggcttgttgtcagcaacggaggaagctctctcggttatggagaaaccggcgtcgggaaggttagcatcaccacgggggggatatgggaggtcaataagaatgtctataccaccattggtgttgcgggcgtcggaaacctcaatattagcgatggcggtaagttcgtatcgcaaaatattacttttnnnngcaataaagcaagcggtatcggcacactgaacctgatggatgcgacatcgtcgttcgatactgtgggtatcaatgtcggtaattttggtagcggtatcgtaaatgtcagtaatggtgccacccttaattcaacgggctatggatttatcggaggaaatgcctccggtaagggaatagttaatatttcaacggatagtctctggaatttaaagacgtcttctactaacgcccaattgctacaggtcggtgtattaggcacgggtgaactgaatattaccaccggaggtatagttaaagcgcgtgatacacagatagctctcaatgacaaaagtaagggcgacgtgagggtggatgggcagaactctcttcttgaaacattcaatatgtacgtagggacatctggtacgggtacgttaaccctgacgaatagcggcacgctgaatgtcgaaggtggagaagtttacttaggtgtttttgaacctgctgtaggaacgctaaacattggtgcagctcncggtgaggnggcggcagatgccggatttatcaccaacgcgacgaaagtagagtttggctctggcgaaggtgtttttgtctttaatcatactaataacagtgatgccggctaccaggtcgatatgctgattacaggtgacgataaagacggaaaagtgatccatgatgcaggccatacggtgttcaatgcagggaatacttatagcggtaaaacgctggtcaatgacggcctcctgaccattgcgtctcatacggcagatggggtaacgggcatggggtcgagtgaagtaaccattgcaagccccggtacgctcgacattctcgcatcaacgaacagtgcaggagattacacgctgaccaatgcgctcaaaggcgatggcttgatgcgagttcagctgtcatcctccgacaagatgtttggctttacacatgcaacagggactgaattcgccggtgttgcccaactgaaagacagtaccttcactctggaacgcgacaacaccgctgcgcttactcacgcgatgttgcagtctgacattgaaaataccacatcggtaaacgtgggagagcaatccattggtggactggccatgaatggcggtacgctcattttcgatacggatattcctgctgcgacgcttgcagagggatatatcagcgtcgatacgctggttgtcggcgcgagtgactacacctggaaaggccgtaactatcaggtaaacgggacgggcgacgtgcttatcgacgtgcctaaaccgtggaatgatcctatggcgaataaccctctgacgacgctcaatttgctggaacacgatgataaccatgtcggcgttcaactggtgaaggcgcaaacggttattgggtcgggtggctcattaacgttacgtgatttacagggcgacgaggtggaagcggacaaaacgttacacattgcgcaaaacggaacggtggtcgccganggtgattatggattccgcctcacgaccgcaccaggtgatggtttgtacgttaactatgggctgaaagcgctgaacatccatggagggcaaaagctgacgttagccgaacatggcggagcctatggcgcaacggccgatatgtcggcaaaaatcggtggtgaaggggatctggcaatcaatacggtgcgacaggtttcgctttccaacggtcagaacgactatcagggggcaacctacgttcagatggggacattacgtaccgatgcggatggcgcgctgggcaacacccgggaactgaacatcagcaacgcagccatcgtcgatcttaatggatcgacgcagacggtagagacattcaccgggcagatgggttcgactgttttgttcaaagaagggtcgctgacggtaaataaaggtgggatcagtcagggtgaactgacaggtggcggaaacctgaatgttacagggggaacgctggctgtcgaggggcttaatgcacgctacaatgcgttaaccagcgttagcccagatgcggaagtcagcctcgataatacgcaggggttaggcagaggaaatattgccaatgacggtctgttaacgctaaaaaacgtgactggcgaactgcgtaatagcataagcgggaagggtatcgtgagcgcaaccgccaggacagatgtagagctggatggcgataatagccgctttgtggggcaattcaacattgatacaggcagcgcgctcagcgtcaacgagcagaaaaacctgggtgatgcttccgttatcaataatggcctgctcaccatctccactgagcgtagctgggcgatgacgcacagtatcagcggtagcggtgatttgacaaaactgggtaccgggatcctgactcttaacaacgattcctcggcgtatcagggtacgacggatatcgtggggggngaaattgctttcggttccgactctgccattaatacggcaagtcaacacattaatatccataacagcggtgtgatgtcgggaaatgtcaccactgcaggtgatgtgaacgttatgtctggggggacactgcgtgtcgctaaaaccacaatcggcgaatcggcggcaacctggagaatggcggcacggttcaaatgaacagtgaaggaggaaaaccggggaatgtactgaccgttaacggcaactataccggaaacaatggcctgatgacgttcaacgcgacgctgggcggcgataattcacccaccgataagatgaacgtgaaaggcgatacccaagggaacactcgcgttcgggttgataacattggcggcgtcggtgcgcaaacggtcaacggtattgaactcattgaggttggcggtaattctgcaggtaatttcgcgctgaccaccggaactgtcgaagctggggcttacgtctacacnctggctaaagggaaggggaatgacgagaaaaactggtatctgaccagtaaatgggacggcgtaacgccagcggatacacccgatcccatcaataatccccctgttgtggatccggaaggcccatcagtttatcgcccggaggccggaagctatatcagcaacattgccgcagccaactcgctgtttagccatcgcttacacgaccgtctgggtgagccgcaatatacagattcactgcattctcaggattcagcaagcagtatgtggatgcgtcatgtcggggngcacgaacgttccagtgccggagacggccagctaaatactcaggctaaccgctatgtattgcagctaggcggcgatttggcgcagtggagtagcaacgcgcaggatcgctggcatcttggcgtgatggcaggctacgccaatcagcacagtaatactcagagtaatcgtgtgggttataaatcggatgggcgcatcagcggttacagcgctgggctgtacgcgacctggtatcagaacgatgcgaataagaccggcgcttatgttgacagctgggcgctgtataactggtttgataacagcgtcagttccgataaccgttctgctgacgactatgattctcgcggtgtgacggcctctgttgagggtgggtatacctttgaagcgggaacatgtagcggcagtgaagggacgctgaatacctggtacgtccagccacaggcgcaaatcacctggatgggtgtgaaagattctgaccatgcccggaaagacggaacgcgcattgaaacggaaggcgacggaaacgtgcaaacgcgacttggggtgaaaacctacctgaatagccatcaccagcgtgacgatggtaaacagcgtgagttccagccttacattgaagcgaactggatcaacaatagcaaagtctacgccgtgaagatgaatggtcaaaccgtaagccgtgatggtgcgcgaaatctcggtgaagtacgtaccggggttgaggcgaaagtaaataacaaccttagcctgtgggggaatgtcggtgtgcaactaggtgataaaggctatagcgatactcagggcatgcagggagtgaaatatagctggtaaacagtataagccgcatgtcgagatggcatgcggcttaatattgccaacttcaaaaggcttnna

SEQ ID NO: 439 - DNA, 9177 bp, Escherichia coli
  Strain O55:H7
  modified_base (3157)..(3157): a, c, g or t
  modified_base (3436)..(3437): a, c, g or t
  modified_base (3441)..(3442): a, c, g or t
  modified_base (3444)..(3447): a, c, g or t
  modified_base (7114)..(7114): a, c, g or t
  modified_base (7116)..(7119): a, c, g or t
atcgcggatatcgcagcgtttatcccgtacagcggataagatgtgtgtccagattgactttatcctcactaaaggataaaactgataatatccccttaagcggataaatttgctgtggacgtatgacatgatgagctttcagaagatctatagcccaacgcaattagcgaatgcaatgaaactggttcgccagcaaaatggctggacgcagagcgagctggcgaaaaaaatcggcattaagcaggcgacgatttccaatttcgaaaacaaccctgacaataccacgctcacgacattttttaagattttacagtcgcttgaactctcaatgacactatgcgacacgaaaaatgcctcgccagaatcaacagaacagcaagatctggagtggtaatgcctaaacttgtcacttggatgaacaaccagcgggtaggcgagttaacgaagttagccaacggcgcgcacacctttaagtatgcaccggagtggttagccagccgttatgccagaccgttgtcactttcgctgccattgcagagggggaatatcacctctgatgccgtatttaacttcttcgataacttgttacccgatagcccgattgtacgtgaccggatcgttaaacgttatcatgccaaatccagacaaccgtttgatttattgtcagaaatagggcgagacagcgttggtgccgtgacgttaatacccgaagacgaaaccgtaacgcgtccgataatggcatgggaaaagcttactgaagtcagacttgaagaagtattaacggcttataaagcagatatcccgctaggcatgattagagaagaaaatgactttcgcatctcggttgctggcgcacaggagaagacagcactgctcagaataggcaatgactggtgcattccgaaaggaataacgccgacgacgcacatcattaaattaccgattggggaaatcaggcagcccaatgcgacgctcgatctcagccaaagcgttgataatgagtattactgtctgctgctggcgaaagaacttgggttgaatgtcccggacgcagaaatcattaaagcgggaaatgtgcgcgcgttagcggtcgaacgttttgacaggcgttggaatgctgagcgaacggttttacttcgcttgccacaggaggatatgtgtcagacattcggtttaccttcatcggtgaaatatgaatcagatggaggcccaggcatcgcgcggatcatggcttttttgatggggtccagcgaggcgcttcgcgatcgttatgattttatgaaattccaggtcttccagtggttgattggcgcaacggatggccatgcaaaaaacttctccgtatttattcaggctggcggcagttatcgactcacgccattttacgacatcatttcagcatttccggtccttggcggtacgggaatacacatcagcgatctcaaactggcaatggggcttaacgcatccaaaggcaaaaaaacggcaatcgataaaatttatccgcgacattttttggcgacagcaaaggtgctgagattcccggaagtgcagatgcatgaaatcctgagtgactttgccagaatgattccggcagcactggataacgtgaagacttcattaccgacagattttccagagaacgtggtgacggcagttgaaaccaatgtgttgaggttgcacggtcggttaagccgagaatacggtattaagtaagagtaagatatggggtttggtcgttgttaatgagcaggacaatcatgaccgccaacgactagattctcccttggtttatattggtgcgcataatgtatattatgttaaatcgtatctgagtgatacgaagtgattttccggtagtcgttattcgttcaggattccagaacttaagcttctcctctttcataattggcctgtgcatgacggatataggctggctggtatgccgatttgccgtttgccgcatcttcccagcgttgaagactcaagctggcaaaccgcgtgcaaatgagcacgccctctttccatcaacacttcaggcagcttgcgggaatgagtccactccggtatcagaaatggctacgtctcaatgaagtcaggcgaacgatgctgaatgaacattacgatgtcaccacagcagcctatgctgtcggttacgaaagcttatcccatttccgacgggaatatttgcggatgtttggagagtcacctaagagagatattaccaggttaagaaagtctgtcggtcagctttaataaaccctgcacttatctgtttagagcaattcggtgttagttacaccaggcaaacattaactatagctaatgatttatagccatataaaccattagtagcccttgacctttcctgacacttcccttgttcgcaataatattctgtttagtcacggtttataaataacatgcataatgaaatcgtcatgttatttagcgacataaaatgtttttgcaaatactctcttcaacaagtgcagcaataaacttgttgtgattaggtgtccttgtgatttaaagatattatcgttcttcgtgaaatgtaataaccctggaaactatattctcagggcaacaaccaatcaagaatgattcttgttttataagcaataacagaatgacttaattgttaactctctttattcagctacttaaatataaattttggagaattatgaaactcaaacatgttggtatgattgtcgtttctgtgttggcgatgtcgtctgctgcggtaagcgcagccgagggtgatgaatcagtaacgaccactgttaatggcggtgttattcattttaaaggtgaagtggtaaatgccgcttgtgcgattgattccgaatcaatgaaccaaacggttgagctgggtcaggttcgttcttctcacctggctaaagcgggtgacctcagctccgccgttggcttcaatatcaagctgaatgattgtgataccaatgtttccagtaatgcagctgttgcattcctgggtactactgtcaccagtaatgacgatacgttagcgctgcagagttcagcggcaggctctgcccaaaatgtcggtattcaaattttggaccgtacgggtgaggtattaatacttgatggggccacttttagtgctaaaaccgacttgattgatggcacnaatatactaccattccaggctcgttatattgctctcgggcagtccgtagctggtactgcaaacgcagatgcgaccttcaaagttcaatatctataattcaatattaaggtggctatacggcatctgaaattaaaacagggtgtgtgtggcatggctacgcacacccgagcaattcaccaatgtgaatctcattattaatgatgagtggtttgtatttggagcgctatgaaaaatcacataatatctaaacgttcaataaacaacagtagttaaacttanngttnntnnnnatatttactttttagcaaggttttcctattaaaagagaaccaacctttattacaaacgcattaagtctggaaacccggtgactcgccaatgtattagcaacatttaccgattgtctgatgtaacggttttcccgcttatcctcttaacacatggagaatgcatcagatgcaaactacgcgtaccccctactctatttcctttatggcgacagtgttacttttattgctctttgcttgccatagcaccgttgccaacgcagctgtcgcactgggtgcgacgcgggtaatttatccggcaaaccagaaacaggttttattgcctgtcacgaataatgatcctgccagtgtctatctcattcagtcatggatagaaaatgctggtgaccaaaaagacacccagtttgtcattaccccacctcttttttccatgcaaggtaaaaaagagaatacgctgcggataatcaacgccactaatcatcagttacccggcgaccgtgaaagcctgttctgggttaatgttaaagctattcctgctatggaaaaagaccagaagaatgagaatacattacagctggcaattattagccgcataaaaatgttttatcggcccacgaacctggcaatggcacctgaagaagcgcctgcaatgcttcggtttcgtcgcagcggtagcaatctcactcttattaatccaacgccctacttcattaccgtaacaaatatgaaagcaggaaatagcaatctcccaaacaccatggtgccgccaaaaggtgaagtgtcggtggatatcccgcatgctgccaccggggatatcagttttcagacgatcaatgattacggcgcattaactccgcgtattaaggcaaccatgcagtaagccagtgacctaattaataataaactcaatcggaattaataatgacagcctttcgtgccgcatttaaggcatatcgtatgcatcaggtgttactactgcctcgctttgcacggcttaccattgcccttagcttagcaactgcggtatttcccgttgacgcagagtattattttaatccacggtttttaagcaatgatcttgctgaatctgtcgatttatccgcctttactaagggacgcgaggcaccacctggtacatatcgggtcgacatttatttgaacgacgaatttatgactagtcgggatattacttttattacagatgataataacgcagatctcatcccatgcctgagtacagatcttcttgtcagtcttggcataaaaaaatctgcgttattagacaataaggaacattcagcagaaaaacatgtgccggacaacagcgcatgcacaccacttcaggatcgtttggtcgacgcatcaactgagtttgatgttggtcagcaacatctgtcactctccgttccgcaaatttatgttggcagaatggctcgcggctatgtttctcctgatctgtgggaagaaggaataaatgctgggcttctaaactatagttttaatggtaattctattaataatcgtagtaaccataatgcaggaaaatccaactatgcatatttgaatttacagagtggcatcaacattggtagttggcgactacgcgataactcaacgtggagttataacagtgggagtagcaattcatctgacagcaataaatggcagcatatcaatacgtcggctgaacgtgacattattcccttacgctcacggttaacggtaggtgatagttataccgatggcgatatttttgatagtgtgaactttcgtggcctcaaaataaattcaacagaagcgatgttgcccgatagccaacatggtttcgctccggtgattcatggtattgcccgtggcaccgcacaagtgagtgtaaaacagaacggatacgatgtttatcagactactgttccacccggcccttttactattgatgatatcaactctgcggccaatggtggtgatctgcaagtaaccataaaagaggcagacggcagtattcagacattatatgttccttattcgtctgttccggttctccaacgtgctggatatacgcgttatgcgcttgccatgggggaatatcgtagtggaaataacctgcaaagctcccccaggttcatacaaggtagcttgatgcatggactggaaggaaactggacaccttatggcggaatgcaaattgcagaagattatcaggccttcaaccttggtattggtaaagatttaggactttttggtgccttttctttcgatatcacgcaggccaatacgacacttgcagatggcacccgtcacagcgggcaatcggttaaatccgtctacagcaaatccttctaccagacaggaaccaatatccaggtcgcaggatatcgctattctacgcaaggtttttataacttatccgacagtgcctacagtcgaatgagtggttacaccgtcaagcctcctaccggagacagcaatgagcagacacaatttattgattattttaatctgttctacagtaagcgtggtcaggaacaaataagcatctctcagcagcttggaaattacggtacgacatttttcagtgccagtcgccaaagttactggaacacgtcacgcagcgaccagcaaatatcatttggattaaatttgccgtttggtgatattacgacttcgctgaattacagctattccaataatatatggcaaaacgatcgggatcatttactcgcttttacgcttaatgttcccttcagtcattggatgcgtacagacagtcagtcggcatttcgtaattcaaacgccagttacagtatgtcaaacgatttgaaaggcggcatgaccaatctatcgggggtttatggcactctgctgccggataataacctgaattatagcgttcaggtcggtaacacccacggaggtaatacatcgtctggcaccagtggttacagtactcttaattatcgtggagcttacggcaatactaatgtcggttacagtcggagtggtgacagcagccagatttattacggaatgagtggtgggattattgctcatgctgatggcatcacctttggacagccgctgggcgacacaatggttctggttaaggctcctggcgctgataatgtcaaaatagagaaccagaccggaattcataccgactggcgtggctatgccatattaccatttgcgacagaatatagagaaaatcgtgtcgctcttaacgcgaattcccttgcagataatgttgaactggatgaaaccgtggtcactgtcatcccaactcacggtgctattgccagagcaacatttaatgcacaaatcggcgggaaagtattaatgacgttgaagtacggtaataaaagcgttccattcggtgcaattgtcactcacggagagaataaaaatggcagcattgtcgcggaaaacggtcaggtttatctgactggacttccacagtcagggaaattacaggtttcatggggcaatgataaaaactcaaactgtattgtcgattacaagcttcctgaagtctctcctggaaccttgctgaaccagcagacagcaatctgtcgctaaggaacaatagattatgaaatacaataacattattttcctcggtttatgtctggggttaaccacctattctgctttatccgcagatagcgttattaanannnncgggcgcgtcctcgattatggctgcacagtctcatcggattcgcttaattttaccgtagatctccaaaaaaacagtgccagacaatttccaacgaccggtagcacaagtccagccgtcccttttcagattacgttaagtgaatgcagcaaagggacaacgggggttcgggttgcatttaacggtattgaggacgcagaaaataatactctgttgaaactggatgagggaagcaatacggcctccggtttaggtatagaaatactggacggaaatatgcgtccggtgaaactgaatgaccttcatgccgggatgcagtggatcccactggtaccagaacagaacaatattttgccttactccgctcgtctgaagtcaactcagaagtccgtcaatccgggactggtgagggcttcggcaacctttacccttgaatttcaataatcagagtcagatatgaaaagacttcacaagaggttcctcttagctacgttttgcgcgttattcacagcaactctccaggccgccgatgtcactatcactgttaatggtcgggtagtcgctaaaccctgcactattcaaaccaaagaagctaacgttaatctcggggatctttatacgcgcaatctgcaacaacctggttctgcatctggctggcacaatattactttgtcattaaccgattgtccggctgaaacaagtgcagtgacggcaatcgtgacaggttcaactgacaatacgggttattacaaaaatgaaggtactgccgaaaatattcagatagagcttagggatgaccaggatgcgacgttaaaaaatggcgatagcaaaacggttattgttgatgagatcactcgtaatgcacagtttccacttaaggcaagagctatcacggtgaatggaaacgcaagtcagggaacgatcgaggcgctaatcaatgtgatctacacctggcaataacgtcgattcgattttcttagccttctttttaaatcaattttttaaccttaggatatatcatgggtaaaacaatcagtataaaggtcctgttcggtatttatcttctattaatggcaggcaaagtttttgccttcagttgtaatgtcgatggcgggtcaagtattggagctggtacaacctctgtttatgttaatctcgaccctgtaatacagccgggccagaatctggttgtagacttgtctcagcatataagttgctggaatgattacggcggctggtacgacactgatcatataaacctggtacaaggctcagctttcgcaggctctctacagtcatataaaggatcgctgtactggaataatgtgacctaccccttcccgttgacgacaaataccaacgtattggatattggtgataagacaccgatgccattaccgttaaaactctatattaccccagtcggggcggccggtggagttgtcataaaagccggggaagttattgcccgtattcatatgtataaaattgccacgttaggaagcggaaatccgcgtaattttacgtggaatattatttcaaataacagtgttgttatgccaacaggcggctgcactgttgatagtcgtaatgtcaccgtgaatctcccggactttcctggaagcgcagaaatcccccttggcgtatattgctcaagcgaacaaaagctctcattttatctttcgggtactaccactgacagtgctagacaagtgtttgctaacacagcaccagatgcaacaaaagcatcgggagtgggtgtctctctgatgcgtaatggaaaaatactggctacgggagaaaatgtctccctggggacagtaaataaaagcaaagtacctctgggtttaagcgcaacctatggacaaacagggaacaaagtttcagccggaaccgtccagtcagtcattggtgtcacttttatctatgaataattgtgattttgaccttagtctatgcgctccattcacgaaaattgcgcggataattattttgtgaaggctattatcctacacttgtaagaaaatccgcgcacaattgaagccagagtcttatttttt

SEQ ID NO: 440 - DNA, 34281 bp, Escherichia coli
  Strain O55:H7
  modified_base (3)..(3): a, c, g or t
  modified_base (1973)..(1973): a, c, g or t
  modified_base (2138)..(2138): a, c, g or t
  modified_base (2266)..(2266): a, c, g or t
  modified_base (2598)..(2598): a, c, g or t
  modified_base (4477)..(4477): a, c, g or t
  modified_base (5256)..(5256): a, c, g or t
  modified_base (5860)..(5861): a, c, g or t
  modified_base (6156)..(6159): a, c, g or t
  modified_base (8628)..(8628): a, c, g or t
  modified_base (8654)..(8654): a, c, g or t
  modified_base (9021)..(9024): a, c, g or t
  modified_base (11660)..(11660): a, c, g or t
  modified_base (12021)..(12022): a, c, g or t
  modified_base (12039)..(12039): a, c, g or t
  modified_base (14495)..(14496): a, c, g or t
  modified_base (14498)..(14501): a, c, g or t
  modified_base (18221)..(18221): a, c, g or t
  modified_base (18777)..(18777): a, c, g or t
  modified_base (19198)..(19198): a, c, g or t
  modified_base (19881)..(19881): a, c, g or t
  modified_base (21227)..(21227): a, c, g or t
  modified_base (22174)..(22177): a, c, g or t
  modified_base (23295)..(23295): a, c, g or t
  modified_base (23301)..(23301): a, c, g or t
  modified_base (23361)..(23361): a, c, g or t
  modified_base (25961)..(25961): a, c, g or t
  modified_base (27041)..(27041): a, c, g or t
  modified_base (29023)..(29023): a, c, g or t
  modified_base (30146)..(30146): a, c, g or t
  modified_base (30326)..(30327): a, c, g or t
  modified_base (30874)..(30874): a, c, g or t
atnttaatttaaacactatgagagatgatgcttaccttatcgtatttaatctattgtttaacaataatagattaaaaatagaaagagagtagtcccctactcttatatatccatgttggcgataatccctttgtatgtactgtgcatcatcgctattacaaatcctaataattcatttccacacaggataagtagatgaagaaaaaaattgaatcctaccagggtgctgccggtggttggggtgctgttaaatccgtagcgaatgcagtacgtaagcagatggatatacgccaggatgttattgccatgtttgacatgaataagccagagggctttgactgtccgggttgtgcatggccagatcctaagcacagtgcgtcattcgacatttgtgaaaacggcgcaaaagcaatcgcctgggaagtcacggataagcaggtaaatgcctctttctttgctcagaatacggttcaatcattacttacctggggagatcacgagcttgaggctgcgggacgtctcactcagcctttgaaatatgatgctgtcagcgactgttacaagccattaagctggcaacaagctttcgacgaaattggcgcacgccttcaaagctatagtgatcccaatcaggttgaattctatacttcgggccgcacttccaatgaagctgcctttctttatcagctttttgcccgtgaatacgggagcaataactttcccgactgctccaacatgtgccatgaaccgacaagcgtgggtttggcagcgagtatcggtgtaggtaaagggaccgtgttgctggaagactttgagaagtgcgatttagtcatttgcattgggcataaccctggtacaaaccaccctcgcatgctgacttcgttgcgcgctttagtgaaacggggagcgaaaatgatcgccatcaatcctctacaggaacgtggcctggagcgatttaccgcaccgcaaaacccgtttgaaatgctgacgaactctgagactcagttggccagtgcctactataacgtgcgcattggtggtgatatggcgttgctcaaggggatgatgcgcctgttaattgagcgcgatgatgctgcaagcgccgcaggtcggccctcattgctggatgacgaatttattcaaacgcataccgtcggctttgacgagctacgccgtgacgtgctcaattccgagtggaaagatatcgaacgtatttctggactaagtcagacacaaatcgccgaactggctgatgcatatgccgctgccgaacgaaccattatctgttacggaatggggatcactcagcacgaacatggtacccagaatgtacagcaactggtcaatctgctgttgatgaaaggtaacattggcaagcctggtgcgggtatctgcccactacgtggccactctaatgtacagggcgaccgaaccgtcggtatcaccgagaaaccgtctgtagagtttctggctcgcctgggtgagcgctatggcttcaccccacctcatgtacctggacatgctgcaattgccagcatgcaagcaatatgtacggggcaggctcgagcattgatctgcatggggggcaactttgcactggcaatgccagatcgggaagcgagcgctgtaccgttaacgcaattagatttggcggtacacgtagccactaagcttaaccgctctcatctgctgaccgcacggcatagctatattctgccggttctgggacgtagcgagattgacatgcaaaaaagcggtgcgcaggcggtaaccgttgaggattcaatgtcgatgattcatgcctcgcgtggcgtgttaaaacccgccggtgtaatgctgaaatcagagtgtgctgtggtcgcgggaatcgcgcaggcaacactaccccagagcgtggtagcctgggagtatctggtggaagattatgatcgcattcgcaatgacattgaagctgtgctgccagagttcgccgnctataaccaacgcatccgtcatcccggtggttttcacctgataaatgcagctgctgaaaggcgctggatgacgccgtcaggtaaggctaatttcattaccagcaaagggctgttagaagatccctcttcagcgtttaacagtaagctggtcatggcgacagtacncagccacgatcagtacaacacgacgatttatggtatggatgatcgctatcgaggggtattcggtcaacgagatgtggtctttatgagtgctaaacaagctaaaatttgccgtgtaaaaaacggcgaangagttaatcttattgcgcttacgccagacggtaagcgcagctcacgccgcatggatagattaaaagtggtcatttaccctatggctgaccgctcactggtgacctattttccagaatcgaatcacatgctaacacttgataaccacgatccattaagtggcattcctggctataaaagtattccggttgaattagaaccatcaaattaatgcctcttctcatttcttctgctgtcatccgcacagcagaagaattcctcattgactattatcgcgcaatttgctcacatggattaaattaaactacatactataagatataaacttctgccnacagctgtaagaaactccgctcagtactgaagcaccagtcctatttcctcttttctcaagcctgttatattaagcatactgattaacgatttttaacgttatccgctaaataaacatatttgaaatgcatgcgaccacagtgaaaaacaaaatcacgcaaagagacaactataaagaaatcatgtctgtaattgtggttatcttattactgacccttacgttgatagccattttttcggcaattgatcagctgggtatttcagaaatgggtcgcattgcaagagatcttacacatttcattgtcaatagtttgcaagactgaaaataaacagcaaattataaatatgaaatgttaaaaaagtatcgataaaactttattgttttaaggagataaaatgtcgctcgtttgttctgttatatttattcatcatgccttcaacgctaacattttagataaagattacgccttctctgacggcgagatcctgatggtagataacgctgttcgtacgcattttgaaccttatgagcggcattttaaagaaatcggatttaatgaaaataccattaaaaaatatctacaatgcactaacatccagacagtgacgatgcctgttcctgcgaagtttttacgtgcttcgaatgtaccgactggattgcttaatgaaatgattgcttatctcaactcggaagaacgcaatcatcataatttttcagaacttttgcttttttcttgcctgtctatttttgccacatgcaaaggtttcattacactattaactaacggtgtgctatccgtttcggggaaagtgagaaatattgtcaacatgaagctggcgcacccatggaagctgaaagatatttgtgactgcctgtacatcagtgaaagcctgttgaagaaaaaactaaagcaagagcaaacgacattctcacagattcttttagatgccagaatgcagcacgcaaaaaatttgatacgcgtagaaggttcagtcaataaaattgccgaacaatgtggttatgccagtacatcttattttatttatgcgttccgcaaacatttcggcaacagtccaaagagagtttctaaggagtaccgttgtcaaaggcacacgggtatgaatacgggcaacacgatgaatgctttagctatttgattatttgctaacgagtagtcaaccacgcaccctacgtaaaaattaaaaatggggcagtcattccctgccccgcgttgtttttaggcgatatatttattgaaataaataagtgacattcatcacatatttatgcatttgcataacttgttgcatgattatttatgatctcaattcggcattttgttagtaaaatacaataatttattaaatatcaatagattaattgtttatcgtcgagaaattacttagtagaacaaaaagtaatgtcaacgctttatggactgttatttccctttttttagctaaatctgctatctctttatgtgactaacttcacttacatccacttatttctcttcgtaaaattactttggaattaagtacaataagaagaggaacatttatgaagtctgcattaaagaaaagtgtcgtaagtacctcgatatctttgatactggcatctggtatggctgcatttgctgctcatgcggcagatgatgtaaagctgaaagcaaccaaaacaaacgttgctttctcagactttacgccgactgaatacagtaccaaaggaaagccaaatattatcgtactgaccatggatgatcttggttatggacaacttccttttgataagggatcttttgacccaaaaacaatggaaaatcgtgaagttgtcgatacctacaaaatagggatagataaagccattgaagctgcgcaanaatcaacgccgacgctcctttcattaatggatgaaggcgtacgttttactaacggctatgtggcgcacggtgtttccggcccctcccgcgccgcaataatgaccggtcgagcgcccgcccgctttggtgtctattccaatactgatgctcaggatggtattccgctaacagaaactttcttgcctgaattattccagaatcatggttattacactgcagcagtaggtaaatggcacttgtcaaaaatcagtaatgtgccggtaccggaagataaacaaacacgtgactatcatgacaacttcaccacattttctgcggaagaatggcaaccgcaaaaccgtggctttgattactttatgggattccacgctgcaggaacggcatattacaactccccttcactgttcaagaatcgtgaacgtgtccccgcaaaaggttatatcagcgatcagttaaccgatgaggcaattggcgttgttgatcgtgccaaaacacttgaccagccttttatgctttacctggcttataatgctccgcacctgccaaatgataatcctgcaccggagcaatatcagaagcaatttaataccggtagtcaaacagcagataactactacgcttccgtttattctgttgatcagggtgtaaaacgcattctcgaacaactgaagaaaaacggacagtatgacaatacaattattctctttacctccgataatggtgcggttatcgatggtcctctgccgctgaacggggcgcaaaaaggctataagagtcanacctatcctggcggtactcacaccccaatgtttatgtggtggaaaggaaaacttcaacccggtaattatgacaagctgatttccgcaatggatttctacccgacagctcttgatgcagccgatatcagcattccaaaagaccttaagctggatggcgtttccttgctgccctggttgcaagataagaaacaaggcgagccacataaaaatctgacctggataacctcttattctcactggtttgatgaggaaaatattccattctgggataactaccacaaatttgtccgtcatcagtcagacgattacccgcataaccccaacactgaggacttaagccaattctcttatacggtgagaaataacgattattcgcttgtctatacagtagaaaacaatcagttaggtctctacaaactgacggatctacagcaaaaagataaccttgccgccgccaatccgcaggtcgttaaagagatgcaaggcgtggtaagagagtttatcgacagcagccagccaccgcttagcgaggtaaatcaggagaagtttaacaatatcaagaaagcactaagcgaagcgaaataactaaaccttcatgcggcgnntttttccgccgccttattgagcgagatagcgatgcacgttacagccaagccctccagttttcaatgtaatctcaaatgtgattactgtttttaccttgaaaaagagtcgcagtttactcatgaaaaatggatggatgacagcactctgaaagagttcatcaaacaatatatcgcagcgtctggcaatcaggtctattttacctggcaaggcggtgaacccactctggctggcctggattttttccgtaaagttattcactatcaacaacgctatgcaggccaaaaacgtattttnnnngcattacaaacgaatggcattttattgaataatgaatggtgtgcctttctcaaagaacatgagtttctggttggtatctcgatcgatggaccccaggagctacatgaccgttacagacgcagtaattcaggtaacggtacttttgcaaaagtgatagcagccatcgagcgtctgaaatcatatcaagtagagtttaatacgttaaccgtcattaataacgttaatgtccattaccctcttgaggtttatcattttttaaaatctatcggcagtaaacatatgcaatttatcgaattgctcgaaaccgggacgccgaatattgatttcagtggtcatagtgagaacacattccgtatcattgatttttctgtgcctcccacggcttatggcaagtttatgtcaaccatttttatgcaatgggttaaaaacgatgtgggtgaaattttcatccgtcagtttgaaagctttgtcagccgttttttggggaatgggcataccagttgtattttccaggagtcctgcaaggataatctggttgttgaaagtaatggagatatttacgaatgcgatcattttgtctatccacagtacaaacttggaaacattaataaatctgaacttaaaacgatgaacagtgtacaactgacagcgcaaaaaaaacggatttcagcgaaatgtcagcaatgtgcatataaacctatctgcaatggcggttgccctaagcatcgtattactaaagtaaacgatgagactgtttcctatttttgcgaaggttataaaatccttttttcaaccatggtaccttatatgaacgccatggtggagttagccaggaacagagtaccgctttaccacattatggatgttgcaaaacaaatggagaataattaataacgctctcttttagctccattcttagcctccttcttatgaccttaacaaggcacccgacataaattcctgtcgggtgtttcgtcatcatcatcttcccttgcgaaaatcttggcttacgtggtatgcgtcagggcattagcaatacccttgattatcaatagcataaccataaccactgaaaattaaaaatttctatatatttcatattgttaaatgatacttaaataaatttcatcagtaaatcattgccatagataatcattggatggcagaatcaattttcgctaatgataaccattcccattacgttttgtatgttgatagcaaagtatctctgtctgctgaagcccttttggctgcgtaagaataataaaacttcagtgttgttaatcattattatcctcgccatgatccttggcgtggttaaaattcaggtctggttaaacgactggaataatgattttttcaatgcgctaagccagaaagaaaccgataagctttggcagcttgtcctttggttccctgccctgctggggatctttgtattaatatccgtaaacaaaacatggttaattaaactactgactattcgctggcgcgaatggttaacagattactaccttaatcgctggtttgcagataaaaactactacttcacgcagatctacggcgagcataaaaatacagataaccctgaccaacgtatcgctgaagacattctcttactgatcagcaaaacgctcagtctttcatttggcttcatccagtcacttagcatgctgatcacctttaccgttattctttggcaaagcgcgggtacgctctcattcactgttggtggaacagaatggaatatccaggggtatatggtctataccgttgtgctcattgtgatcggtggaactttatttacccataaggtgggtaaacgtattcgtccgcttaatgtggaaaaacaacgtagcgaagcgacatttcgaactaatcttgtgcagcataataagcaggcagaactgattgcgctaagcaatgctgagtctctacaacgccaggagttgagcgacaattttcataccattaaagagaactggcatcgtttaatgaatcgtcagcggtggcttgattactggcagaatatttattcgcgctcgcttagcgttcttccctactttctgttattgccgcagtttattagcgggcagatcaatctgggcggactgatgaaatcgcgccaggcatttatgctggtatcgaacaatctaagctggtttatttataaatatgatgaacttgctgaactggctgcggttatcgatcgcttgtatgagttccatcaactcaccgaacagcgccctacgaataagcctaaaaattgccaacatgcggtacaagtggctgacgcgagtattcgtactcctgataataagatcatattagagaacctgaactttcatgtttcgccaggcaaatggctattactgaaaggttactctggtgcgggaaaaaccacactgcttaaaacattatcccactgctggccgtggtttaaaggtgatatttcttctcctgccgacngttggtatgtgtcacaaacaccgttnatcaaaaccggcttactgaaagagattatttgtaaagcacttcccctgcccgtagacgataaatcattgagcgaagtactgcatcaggttggtcttgggaaattggctgcgcgtattcatgaccacgatcgctggggagatattctttccagcggcgaaaaacaacgtatcgccctggcacgattaattttacgacgtccgaaatggatatttcttgacgaaactacctctcatcttgaggaacaagaggctatccgcttactgcgtctagtgcgtgaaaaactacccacaagcggcgtcattatggttacacatcaacccggtgtctggaacctggccgatgatatttgtgacattagcgcggttnnnnaaaaacaataaaagccctgctgtacggagatataaataaatgaagcgagttcttattcctggcgtcattttatgtggcgctgatgtggcgcaggccgtcgatgacaaaaacatgtacatgcatttttttgaagagatgacggtctatgctcctgtccctgtacccgtaaacggcaacacgcattacaccagtgaaagcatcgagcgtttaccgaccgggaatggcaatatcagcgatctgctgagaaccaaccctgcggtacgcatggattcaacgcaaagtacctcgttgaaccagggagatattcgcccggagaaaatctctattcacggtgcgtcgccctatcagaatgcctatttgattgacggtattagtgccactaataacctgaacccagcgaatgagtccgatgccagtagtgcaaccaatattagcgggatgtcacaggggtattatcttgatgtcagcttactggacaatgtgacgctttatgacagttttgtgccggttgaattcggtcgcttcaatggcggggtaattgatgcaaagttcaaacgcttcaacgctgatgatagcagcgtgaaactgggttatcgcactacgcgttcggactggttaacatcgcatatcaatgagaataacaagagcgcatttaatcaaggctcttcaggaagtacttattactccccagattttaaaaagaacttttataccttgtcgtttaatcaggaactcgctgataactttggcgttaccgccggtttatcgcgccgccagtctgatatcacccgcgcggattatgtttcgaatgacggcattgtcgccggtcgggcacagtataaaaacgttatcgatactgcattgagcaaatttacctggtttgccagcgaccgctttacccacgatttaaccttaaaatataccggctccagccgtgattataataccagcaccttcccgcagtctgatcgcgaaatgggtaataaatcctatggtatggcatgggatatggatacgcagctcgcatgggccaaactacgtaccaccgttggttgggatcatattagtgattatacccgtcacgatcatgacatctggtacaccgaactttcatgtacatatggtgatattacagggcgttgcacccgtggcggattaggacacatttcccaggctgtagataattacaccttcaaaacacgcctggactggcaaaaattcgccgtgggtaatgtttcgcatcaaccctacttcggcgcggaatacatctattccgatgcgtggactgaacgccataaccagtctgaatcctatgtgattaatgctgccggaaagaaaactaaccataccatttaccataaaggtaaaggcagcctgggaattgacaactacacactgtatatggcggatcgcattagctggcgtaatgtgtcattaatgcccggcgtgcggtatgactatgacaactatctgtcaaaccacaatatctccccgcgctttatgacggaatgggatatttttgctgatcaaacctcaatgattacagcaggttataaccgttactatggcgggaatattcttgatatgggattacgtgatatccgcaatagctggacggaatcggtatcaggtaataaaaccctgacgcgttatcaggatttgaaaacgccttataacgatgaactggcaatgggattgcagcaaaaaatcggtaagaacgttattgcgcgcgcaaactatgtttaccgtgaagcgcatgatcaaatcagcaaaagcagtcgtaccgacagcgcgactaaaaccaccattactgaatataacaacgacggcaaaaccaaaacgcattcgttcaacctcagttttgaactggccgaacccctgcatatcagccaggtagatattaacccgcaaattgtctttagctatatcaagagcaagggcaacttgtcgttaaacaatggttatgaggagagcaataccggtgataaccaggtggtttataacggtaatcttgtctcttacgatagcgttccagtggcagattttaataacccattaaagatctccttaaacatggatttcacgcatcaaccgagcgggttggtgtgggcgaatacgctggcctggcaagaagcgcgtaaagctcgcattatcctgggtaagacaaatgcgcaatacatcagcgaatattcagattacaagcagtatgttgacgaaaaactggatagcagcctgacctgggacacccgcttgtcctggacgccacaatttctgaaacaacaaaacctgacgatcagtgccgatattctcaatgtactggatagcaaaaccgcggttgatacaacgaataccggtgtggcgacctacgccagtggccgtactttctggcttgatgtcagcatgaaattttaatagttcggattttacttaaccgggtaaattcgcccggttttcgcatggagataattatgagaaacctctgtttcttactgacgttagtggcaactctgttgctccccgggcggctgattgccgccgccttaccgcaggatgaaaagttaattaccgggcaactggacaatggcttgcgatatatgatttatccgcatgctcatccaaaggatcaggtaaatttntggctgcaaattcataccggttcattgcaggaagaagacaatgagcgcggcgtggctcattttgtagaacatatgatgtttaacggcacaaaaacatggccgggtaataaagtcatcgaaacatttgagtcaatgggcctgcgttttggtcgcgatgttaatgcctataccagctatgacgaaacggtgtatcaggtgagtttgccaactacgcagaaacaaaatctgcaacaagtgatggcaatcttcagtgaatggagtaatgccgcaacctttgaaaaactcgaagtagacgctgaacgcggcgtaattactgaggaatggcgtgcccatcaggatgcgaaatggcgcacctctcagnngcgccgccctttcctgntggcaaatacccgtaatttagaccgtgaacctatcggcctgatggatactgtcgccacggtcacaccggcacaattgctccaattttatcaacgctggtatcaaccaaataatatgacctttatcgtggttggcgatatcgacagtaaagaagcgctggcgctgataaaggataatttaagtaagcttccggctaacaaagcagctgaaaatcgcgtctggccgacaaaagccgaaaaccacctgcgctttaatatcattaatgataaagaaaaccgggtgaacggcatcgcactctattatcgcctgccaatggtacaagtgaacgatgagcaaagctttatcgaacaagctgaatggagcatgttagttcagctgttcaatcaacgtctgcaggaacgtatacagtcgggcgagttgaagactatttctggcggcactgcgcgcagcgttaaaattgcacccgattatcagtcgctgtttttccgtgtaaatgcacgagacgataatatgcaggatgctgcgaatgcattaatggcagagttggcaaccattgatcagcatggtttttctgctgaagaactcgatgatgtcaaatctacccgcctcacctggctgaaaaatgcggttgatcagcaagctgaacgtgatttacgtatgctgaccagtcgcctggcatccagctcattaaataatacgccgttcttgtcgccggaagagacatatcaactttcgaaacgtctgtggcagcaaattaccgtgcaaagtctggcggaaaaatggcagcagttaagaaagaaccaggacgcattttgggagcaaatggtaaacaatgaggttgccgccaaaaaagcattgtctcctgcggctatcctggcgctggaaaaggagtacgccaacaaaaagctggcggcttacatcttcccaggcagaaatttatcgttaacagtagacgctgacccacaggcggaaattagcagcaaagaaacgctggctgagaatctgacatcattaacactttccaatggtgcaagggttattctggcaaaatccgcgggtgaagagcaaaagctacaaattattgccgtatcgaataaaggcgatttaagtttccctgcgcagcaaaaatcacttatcgcgctggcaaataaagcagttagcggaagcggcgttggcgaactctcctcttccagcctgaaacgctggagtgcggaaaactcggtaaccatgagcagtaaagtcagtggcatgaatacgttgctctccgttagcgcgcggactaataaccctgaacctggttttcagttgattaaccagcgaatcacccacagcacgattaacgacaatatttgggcatcgctacaaaatgctcaaattcaggcgttgaaaacgctcgaccagcgtccagcggagaaattcgcccagcagatgtatgagacgcgctatgctgatgaccgcacgaaattactgcaagaaaatcagattgcacagtttactgccgcagatgcgctggctgccgatcgccagttgttttcatctccagcggatatcacgtttgtcattgtcggtaatgtcgcagaagacaaactcgtggcgttaattacgcgttacttaggatcaatcaaacactctgattcgccattagccgcaggtaaaccattaactcgcgcgacggacaacgcatcggttactgtaaaggaacaaaatgaacctgtggcacaggtttcacagtggaagcgttatgattcccggacacctgttaatctggcgacgcgtatggcgctcgatgcttttaacgtcgcactggcaaaagatctacgcgttaatattcgtgaacaggcatctggggcatacagcgtttcttctcgcctctcggttgatcctcaggctaaagatatcagtcatttgctggcttttacttgtcaaccagaacgacatgatgaactgttaacgttagcgaatgaagtgatggttaagcgtttgactaaagggatcagtgagcaagaactgaacgaataccagcaaaacgttcagcgcagcctcgatatccaacagcgtagcgttcaacaattagcgaacactattgtaaatagtcttattcaatatgacgatcctgcagcatggactgagcaggagcaattgttgaaacaaatgacggtagagaatgttaacactgccgttaaacaatatctttctcatccggtaaatacttataccggagtattattgccaaaataataacagccccgtcaacacatcgttggcggggattttagcaatattcgctatttttatgtaataattttataaatgcgttcaaaataataaccgcgtactaatagtgatattttaaggtctgatttttacgtgataattcaggaggcacagaatacgcataaaaataacagcataaaacaccttactaccacccaagaactccctactatattgtttttnnannnnaaatattattcatgcaatatctcaccataaataacattaggattttgttatttaaacacgagtcctttgcacttgcttactttatcgataaatcctacttttttaatgcgatccaatcattttaaggagtttaaaatggataagaagcaagtaacggatttaaggtcggaactactcgattcacgttttggtgcgaagtctatttccactatcgcagaatcaaaacgttttccgctgcacgaaatgcgcgacgatgtcgcatttcagattatcaatgacgaattatatcttgatggcaacgctcgtcagaacctggccactttctgccagacctgggacgacgaaaacgtccacaagttgatggatttatccattaacaaaaactggatcgacaaagaagaatatccgcaatctgcagccatcgacctgcgttgcgtaaatatggttgccgatctgtggcatgcgcctgcgccgaaaaatggtcaggccgttggcaccaacaccattggttcttccgaggcctgtatgctcggcgggatggcgatgaaatggcgttggcgcaagcgtatggaagctgcaggcaaaccaacggataaaccaaacctggtgtgcggcccggtgcaaatctgctggcataaattcgcccgctactgggatgtggagctgcgtgagatccctatgcgccccggtcagttgtttatggatccgaaacgcatgattgaagcctgcgacgaaaataccatcggcgtggtgccgactttcggcgtgacctacaccggtaactatgagttcccgcaaccgctgcacgatgcgctggataaattccaggccgacaccggtatcgacatcgacatgcacatcgacgccgccagtggtggcttcctggcaccgttcgtcgccccggatatcgtctgggacttccgcctgccgcgtgtgaaatcgatcagtgcttcaggccacaaattcggtctggctccgctgggctgcggctgggttatctggcgtgatgaagaagcgctgccgcaggaactggtgttcaacgttgactacctcggtggtcagattggtactttcgccatcaacttctcccgcccggcgggtcaggtaattgcacagtactatgaattcctgcgcctcggtcgtgaaggctataccaaagtacagaacgcctcttaccaggttgccgcttatctggcggatgaaatcgccaaactggggccgtatgagttcatctgtaccggtcgcccggacgaaggcattccggcggtttgcttcaaactgaaagatggtgaagatccgggatacaccctgtatgacctctctgaacgtctgcgtctgcgcggctggcaggttccggccttcactctcggcggtgaagccaccgacatcgtggtgatgcgcattatgtgtcgtcgcggcttcgaaatggactttgctgaactgttgctggaagactacaaagcctccctgaaatatctcagtgatcacccgaaactgcagggtattgcccaacagaacagctttaaacatacctgataacgtttaacggtaacggtgtcccgaaacgaacccgtttcgggacaatttccaaagtctgttcactggcattagcaacggaaaatattgttctgaatacgcttcagaacaaaacaggtgcggttccgacaggaataccgttttagggggataatatggctacatcagtacagacaggtaaagctaagcagctcacattactcggcttttttgccataacggcatcgatggtaatggctgtttatgaataccctaccttcgcaacatcgggcttttcattagtcttcttcctgctattaggcgggattttatggtttattcccgtgggactttgtgctgcggaaatggccaccgtcgacggctgggaagaaggtggtgtcttcgcctgggtatcaaatactctggggccgagatggggatttgcagcgatctcatttggctatctgcaaatcgccattggttttattccgatgctctatttcgtgttaggggcactctcctacatcctgaaatggccagcgctgaatgaagaccccattaccaaaactattgcagcactcatcattctttgggcgctggcattaacgcagtttggtggcacgaaatacacggcgcgaattgctaaagttggcttcttcgccggtatcctgttacctgcatttattttgattgcattagcggctatttatctgcactccggtgcccccgttgctatcgaaatggattcgaagaccttcttccctgacttctctaaagtgggcaccctggttgtatttgttgccttcattttgagttatatgggcgtagaagcttccgcaacccacgtcaatgaaatgagtaacccagggcgcgactatccactggctatgttactgctgatggtggcggcaatctgcttaagctctgttggcggtttgtctattgcgatggtcattccgggtaatgaaatcaacctctccgcaggggtaatgcaaacctttaccgttctgatgtcccatgtggcaccggaaattgagtggacggttcgcgtgatctccgcactgctgttgctgggtgttctggcggaaatcgcctcctggattgttggtccttctcgcgggatgtatgtcacagcgcagaaaaacctgctgccagcggcattcgctaaaatgaacaaaaatggcgtaccggtaacgctggtcatttcgcagctggtgattacttctatcgcgttgatcatcctcaccaataccggtggcggtaacaacatgtccttcctgatcgcactggcgctgacggtggtgatttatctgtgtgcttatttcatgctgtttattggctacattgtgttggttcttaaacatcctgacttaaaacgcacatttaatatccctggtggtaaaggggtgaaactggtcgtggcaattgtcggtctgctgacttcaattatggcgtttattgtttccttcctgccgccggataacatccagggtgactctaccgatatgtatgttgaattactggtcgttagtttcctggtggtacttgccctgccctttattctctatgctgttcatgatcgtaaaggcaaagcgaataccggcgtcactctggagccaatcaacagtcagaacgcaccaaaaggtcacttcttcctgcacccgcgtgcacgttcaccacactatattgtgatgaatgacaagaaacactaactatgtctgaatggttataagataagggagcgataattcatcgctccctttttcgtgcttgctgtcgtattgacttaaccgggataagtacgagaatgagcgcacatctgtttaccggaaactagcacatatggatatctgctcccgaaacaagaaattaacgattagaagaccagcgatactggttgcactggcacttttactgtgtagttgtaaaagcacgcctccagagtccatggtgacaccaccagcgggttcaaagccaccagccacgacgcaacaatcgtcacaaccgatgcgtggcatctggctggccacggtgtctcgcctcgactggccaccggtttcctcggttaacattagtaaccccaccagccgggcccgtgtacaacaacaggcgatgatcgacaaactggatcatttgcaacgtctcggtataaacacggtctttttccaggtcaagccggacggtaccgccctgtggccatcgaanattttgccgtggtccgatcttatgaccggtaagattggtgaaaatccgggttacgatccgctgcaatttatgctcgacgaagcccacaagcgtgggatgaaagtacacgcctggtttaacccctatcgcgtatcggttaatacgaagcccggtactatcagggaactgaatagcactctgtctcaacaaccggcgagcgtctatgtgcaacaccgtgactggatcagaacgtctggcgatcgctttgtcctcgacccgggcatccctgaggttcaggactggatcacatcaatagtcgcagaagtggtttcccgctatccggtagatggcgtgcagtttgacgactatttctatactgagtcaccgggttcacggctaaatgataacgaaacgtaccgtaaatacggaggcgcatttgcgtcaaaagcagactggcggcgcaacaatactcagcagttaattgcaaaggtatcgcacaccattaaaagcattaagccgggagtcgaatttggtgttagcccggcaggcgtgtggcgtaaccgatcacacgatccgntcggttccgatacccgaggcgcggcagcctatgacgaatcctacgctgacactcgtcgatgggtggaacaaggattgctggattacattgctccccaaatttactggccgttctcacggagtgccgcgcgttatgacgtgttggtaaaatggtgggcggatgtcgttaaaccgaccaggacccgcctgtatatcggtatcgccttctataaagtgggtgaaccttcaaagatagagccagactggatgattaacggcggcgtaccggagctgaaaaagcagctcgatcttaacgatgcggtaccagaaattagcggcaccatcttgttccgtgaggactatctgaataaaccgcagactcaacaagcggtcagctatctgcaaagtcgttggggcagttaaactcccattcttactttgtnacaagccggtgctttacccactggcttgttaccctcttgaactatcccaccagcaatcatgcttactaaagtcaaattaaccacgcaattaaccacgcttagttaaacagccataaatcccctaataaaaatgtatgaatatgaaaaaccatacgatattcgcagtcaccgaaaaataattacgatgggctatactcttctgaagaacagtagcgtagattgaaactgtcctaagtcgcttatttcttttcagtatatcttcatatttcaggagaatatggtgcagttagtcgatctcgcacgtcgcgtttcattttgattccgtctgatttcccagccttataagggtgtgaattatggagatgtattttaaaagaatgaaagatgagtggaccggacttgtcgagcaggcagatccgcccattcgtgctaaagccgcggaaattgccgttgcgcatgctcattatctgagtatcgagttttatcgaattgtccgcatcgacccgcatgccgaagaattcttgagtaatgaacaagttgagcggcagttgaaaagtgcgatggaacgctggattattaacgtgctttctgcccaggttgacgatgtcgaaaggctaatacaaatccagcataccgtcgcggaagtgcatgcccgcataggaattccggtagaaattgtcganatggggtttcgggtgctgaaaaagatcctctatccggtaatcttctcttcggattattctgccgcagaaaaacttcaggtctaccatttctcgattaacagtattgatatcgctatggaagtgatgacccgcgcgtttacctttagtgacagtagtgcctcaaaagaagatgaaaactatcgtatcttctcgttactggaaaacgccgaagaagaaaaagaacggcaaatagcctcaatactttcatgggaaatagatattatctataaaatcctgctggattctgatttaggcagtagtttgcctttaagccaggctgattttggcctgtggtttaaccataaaggtcgacattatttcagcggcattgctgaagtgggccatatctctcgtctgattcaggatttcgacggtattttcaatcaaaccatgcgtaacaccaggaatttgaataacagaagtctgcgggtgaaatttttattacagataagaaataccgtatcgcaaattattaccttgctgcgtgaattgtttgaagaagtatcgcgccacgaagtcggtatggatgtactgacgaaattacttaaccgccgtttcctgccgactatcttcaaacgcgaaattgcccatgccaaccggaccggtacaccgctgtcagtgctgattattgacgttgataaattcaaagagatcaacgatacgtggggccataacactggcgatgaaattctgcgtaaagtctctcaggccttttatgacaacgtccgcagtagtgattatgttttccgctacgggggcgatgaatttatcattgttttgaccgaagcttctgaaaacgaaacgttacgtaccgcagaacgtattcgcagtcgggtggagaaaaccaaactgaaagccgcaaacggcgaagatattgccctctcactttccatcggtgccgccatgtttaatggtcatcctgactatgagcgcctcattcaaatagccgatgaagctctgtatatcgccaaaagacgaggtagaaaccgtgttgaactctggaaagccagtctttagatgcgccaggatgcagaggtaatcatgaagctaaccgatgcggataatgccgccgatggcatttttttccccgcccttgagcaaaatatgatgggtgcggtgttaattaacgaaaatgatgaagtgatgtttttcaaccccgccgcagagaagctctgggggtacaaacgtgaagaagtcattggcaataacattgatatgctgattccgcgggatttgcgtcctgcgcatcctgaatacattcgtcacaaccgtgaaggcggtaaagcgcgcgtcgaggggatgagtcnggagctgcagctggagaaaaaagacggcagtaaaatctggacccgttttgcgctatcgaaagtgagcgccgaggggaaagtttattacctggcgctggtacgggatgccagcgtagaaatggcgcaaaaagaacagaccaggcaattgattattgccgttgaccatctcgaccgaccggtgattgtcctcgatccggaacgccatattgtgcagtgcaatcgcgcatttaccgaaatgtttggttactgcattagcgaagccagcggtatgcagcctgatacactcctgaacattcctgaattccctgccgataaccgcattcgtttacaacagttgctttggaaaaccgcccgcgatcaggacgaatttctgctgttgacgcgcaccggtgaaaaaatctggattaaagcttctatcagcccggtttatgacgtgctcgcgcatctgcagaacctggtaatgaccttctcggatatcaccgaagaacggcaaatccgccagcttgaaggcaatattctcgccgccatgtgcagcagcccgccatttcatgaaatgggggaaatcatttgtcgtaacatcgaatctgttctcaacgaatcgcatgtttcgctgttcgcactgcgcaacgggatgccgatacactgggcgtcatcttcgcacggtgcagaagttcaaaatgcgcaaagctggtcagcgaccattcgtcagcgtgatggcgcgcctgcggggatcctgcaaattaaaacctcgtcaggagcagaaaccagcgcctttatcgaacgcgtggcagatatcagccagcatatggccgcgctggcgctggaacaggaaaaaagccgtcagcatattgaacaactcatccaatttgatccgatgaccggtctgccaaatcgcaataacctgcacaattacctcgatgacctggtcgacaaagccgtctctccannnncggtgttgaccatattcaggatgtgattgatagccttggctatgcgtgggccgatcaggcattgctggaagtggtcaatcgctttcgtgaaaaactcaaaccggatcagtatctctgtcgtatcgaaggtacgcagtttgtcctcgtgagcctggaaaacgacgtcagtaacattacccagatcgccgatgagctacggaatgtggtcagcaagccgataatgattgacgataaacccttcccgcttaccttgagtattggcatcagctacgacgtgggtaaaaatcgcgattacctgctctccactgcccataacgcgatggattatattcgcaagaatggcggtaacggctggcagttcttcagcccggcgatgaacgaaatggtaaaagagcgtttggttttaggcgcagcgctgaaagaagcgattagcaataaccaactgaaactggtttaccagccgcaaatcttcgcagaaacgggtgaactctacggcatcgaagcccttgctcgctggcacgatccccagcatggtcatgtgcccccttcacggtttattcctctcgcagaagagattggtgaaatcgaaaatattgggcgctgggtcatcgcggaagcttgccgtcagttagcagaatggcgtagccagaatattcatatcccggcgttatccgtgaacttgtcggcgctgcactttcgcagtaatcagctgcctaatcaggtgtctgatgcaatgcaagcctggggtattgacggccaccagctgacggtagaaatcacggaaagcatgatgatggaacacgataccgaaatctttaagcgcattcagatcctgcgtgatatgggcgtgggtttatcggtagatgattttggcacgggcttttccggattatcccgcttagtcagtcttccggtaacggaaatcaaaattgacaaaagttttgtcgatcgttgtctgacggaaaaacgcatcctggccttacttgaagccattaccagcattgggcaaagcctcaatttaaccgtcgtggcggaaggcgtcgaaaccaaagagcaatttgagatgctacgaaagatccactgtcgcgttattcagggatatttcttttcccgccccntacccnccgaagaaattccaggctggatgagcagcgtgttaccgctgaaaatctgacaaattcctntcgcccgcactcgcgggttttcatttaacgtgacactgtcacttaaatactgtgatttcagctacgattccgggagattccttccttaacttcccctcttgcaccaaaactgcactacgctgcacaaatgttgatcaaaagttaaaaaatataactttaagccagcattctggcgcttatcccggcatggcatgagatctgcataagcggaaagcgcagcaatttttgtcttatacaggaaccgtttatgtcggataccaccgaactggttgatttagccgtgatcttccctgatctggagatcgaattgaaatacgcctgcgctgataacatcacaggtaaagctatttaccagcaagcgcgttgtctgttacacaaggatgcgattaccgcgctggcgaaaagtatcagtatcgcccagctatcaggcttacaactggtgatttacgatgcgtatcgcccacaacaagcacaggcgatgttgtggcaagcctgcccagacccgcaatatgttgttgatgtgacggtcggttctaatcacagccgtggcacggcgatcgacctgacgcttcgtgatgagcacgggaacatcctggatatgggcgcagggttcgatgaaatgcacgagcgctcccatgcctatcacccttccgtcccgcccgccgctcagcgcaatcgcctgttgctgaatgcgataatgactggtggcggttttgtcggtatctccagcgaatggtggcacttcgaattaccccaggcagcgagttaccctctgctcgctgatcaattcacctgttttatatcccctggcacacagcacgtcagttaatcaggaaactgccatgaagagatcgatatcgtttcgtcccacattgctcgcgctcgtccttgccacaactttcccggttgcgcacgccgccgtaccgaaagatatgctggtgattggtaaggccgccgatccacaaaccctcgacccggcggtaacaatagataataacgactggacagtgacctacccgtcttatcagcgactggttcagtacaaaacggacggtgataaaggctcaaccgacgttgaaggcgatctggcaagtagctggaaagcgtctaacgatcaaaaagagtggacgttcaccctgaaagataatgctaaatttgccgatggcacacctgtcactgccgaagcagtaaaactctcttttgagcggttactaaaaatcggccaggggccagcagaagcatttcccaaagatttaaagattgatgctcccgacgaacatacggtgaagtttacccttagccagccatttgcaccgttcctctacacgctggcgaatgacggtgcatccattatcaatccggcggtattaaaggaacatgcggcggatgatgcccgcggcttcctcgcgcaaaataccgccggttccggaccatttatgctgaaaagctggcaaaaaggtcagcaattagttctggtgccaaatccgcattaccccggcaataaaccgaactttaagcgagtatcggtaaaaattatcggtgaaagtgcctcccgtcgcctgcagctctcccgtggcgacattgacattgccgatgcgctgccggtggatcaactcaacgccctgaagcaggaaaacaaagtcaatgtggcagagtatccgtcactgcgcgtcacctatctgtatctgaataacagcaaagcgccacttaatcaggcggatctgcggcgggccatttcctggtctaccgattatcagggcatggttaacggcattctgagtggtaacggaaaacaaatgcgcggcccgattccggaaggcatgtggggctacgatgcgacggcaatgcaatacaaccatgacgaaacgaaagccaaagccgaatgggataaagtgacgagcaaacccaccagcctgacgtttctctactccgataacgatccgaactgggaaccgatcgctctggcaacacaatccagcctcaacaagctgggcatcaatgtgaagctggaaaagctggcgaacgccaccatgcgcgacagagtgggtaaaggtgattacgacattgcgattggcaactggagtccggattttgccgacccgtatatgtttatgaattactggtttgagtcagacaaaaaaggtctgccgggtaaccgctcgttctatgaaaacagtgaggtcgataagttactgcgcaatgcgcttgcgaccaccgaccagacgcagcgtacccgagactaccagcaggcacagaaaatcgtcattgatgacgctgcttatgtgtacctgttccagaaaaactaccaactggcgatgaacaaagaggtgaaaggctttgtgttcaatcccatgctggaacaggtcttcaatatcaataccatgagtaaataacgtgaccttctggagtattttacgccaacgctgctggggctggtgctcgtggtggcgggcgtctgcgtgattacgtttattatctcgcatctgatccccggcgatccggcgcggttactggcgggtgaccgcgccagcgatgctatcgtggaaaatattcgccagcaactgggactggaccagccactgtatgtacagttttaccgntacgtcagcgacctgtttcatggtgacctgggaacatccattcgtactgggcgtccggtgctggaagagttgcgtatatttttcccggcgacgctggagctggctttttgtgccctgctgctggcactcttgattggcatcccgctgggcatactctctgcagtctggcgaaatcgctggctggatcatctggtgcgaataatggcgattaccggaatctccacacctgcgttctggcttgggctgggcgtcatcgtgctgttttatggtcatctgcaaatacttcccggcggcggaaggcttgatgactggctggatccaccaacgcacgttaccggcttttatctgctcgatgcgttgcttgaaggcaacggtgaagtcttcttcaatgcgttgcaacatctcatcttaccggcattaacgctggcgtttgttcacctggggattgtcgcccgccagatccgctcagcgatgctggaacaattgagtgaagactacattcgtaccgcccgggccagcggcttgcccggctggtatatcgttctatgttatgcgctacccaatgcgttgatcccttcgattaccgtattggggctggcgctgggcgatttgttgtatggcgcagtgctcaccgaaaccgtttttgcctggcccggaatgggggcatgggtagtgacatcaatacaggcgctcgacttcccggcagtgatgggctttgccgtcgtggtttcatttgcttatgtgctggtcaacctggtggtggatttgctctatttgtggattgatccgcgtatcggacgtggaggtggtgaatgatgctaagcgaggaaacgtccgccgtacgcccacaaaaacaaacgcgatttaacggtgcaaaactggtatggatgctgaaaggcagtccgctcaccgtgaccggcgcagtcatcattgtattaatgctactgatgatgattttttcaccgtggctggcgacgcatgatcccaacgccattgatttaaccgcccgccttttgccgccttctgcggcgcactggtttggcaccgatgaagtgggacgcgatctgttcagccgcgtantggtcggcagtcagcaatcaattctcgccggattagtcgtggttgccattgcgggtatgattggttcgctactcggatgtctatccggtgtgcttggcggacgcgcagacgccatcatcatgcgcatcatggacattatgctgtcgattccttcgttggtactgacaatggcactggctgccgctctcgggccgagtttgtttaacgccatgctggctattgctattgtgcgaattcccttttatgtgcgcctggcgcgggggcaagcattagttgtacgccagtatacctatgttcaggcggcgaaaacctttggcgcgtctcgttggcatctgatcaattggcatattttacgtaactccctaccgccgctgatcgtgcaggcatcgctggatatcggtagcgcgattttaatggccgccacgttgggatttattggcctgggtgctcaacaaccgagtgctgaatggggcgcgatggtagcaaatggtcgcaactatgtactcgatcagtggtggtattgcgcatttccgggggcagcgattttgcttaccgccgtcgggtttaatctctttggtgatggtattcgcgatctgcttgacccgaaagcaggaggaaagcagtcatgacccaacccgttctggacattcaacaactgcatttgagtttccccggttttaacggcgacgttcacgcgctcaacaatgtgtccttgcagattaaccgcggtgaaattgtcggtctggtgggagaatccggctcaggtaaatcagtcaccgcaatgctgattatgcgtctgctaccgacgggcagttattgcgtacatcgggggcagatttcactgctgggagacgatgttcttaacgcgcgggaaaaacagcttcgtcagtggcgcggcgcacgagtggcgatgatctttcaggaaccgatgaccgccctcaatccgacacgtcgaataggtcttcagatgatggacgtgatccgccatcatcaaccaataagtcgtcgggaagccagagctaaagcgattgccctgctggaagagatgcaaatcccggataccgtggaagttatgtcgcgctatccgtttgagctttcaggtggtatgcgccagcgggtaatgattgcgctggcattctcctgcgaaccgcaattgattattgccgacgaaccgactacggcgctggacgtcacggtacagttgcaggtactgcgtttgcttaaacataaagctcgcgccagtggaactgcggtactgttcatcagccatgatatggccgtggtgtcgcaactgtgcgatagcgtttacgtgatgtatgccggaagcgtgattgagagcggcgtgacggcagacgttatccatcatccccggcatccgtataccattggtttgctgcaatgcgcaccagaacatggagtaccacgccagccattacccgccattccagggacggtaccaaatctcacccatttgcctgacggctgcgcttttcgcgatcgttgctatgcggcaggtgcacagtgtgaaaacgtcccggcgctgacagcgtgtggtgacaacaaccagcgctgcgcctgttggtatccgcagcaggaggtcataagtgtctgacacgttattaacgttacgcgacgtccatatcaatttcccggcgcgtaaaaactggcttggtaaaactacggaacatgttcatgccattaatggtattgatttacagatccgccgtggtgaaaccttagggatcgtcggcgagtcaggctgcggcaaaagcaccctcgcacagcttttaatgggtatgctgcaaccgagccacgggcagtacatccgttctggctcacaacgcattatgcagatggtgtttcaggacccgctctcttcgcttaatccgcgcttaccggtgtggcgcatcatcacagaaccgctctggatagctaagcatagtagtgaacaacagcggcgagcgttggcagaggagctggcngtgcaggtgggtattcgtccggagtatctcgaccgcctgcctcatgcgttctccggcgggcagcggcaacgcatcgccattgccagagcactctcttcgcagcctgacgtgattgtgcttgatgagccaacctctgcgctggatatctccgtgcaggcgcagatcctcaatttactggtaacgctacaggaaaatcacgggctgacttatgtgctgatttcacacaatgtctcggtgatacgtcatatgagcgatcgggtggcggtgatgtatctcgggcagattgtggaattaggggaagcgcaacaggtgctaacggctccggcacatccatacacccgattattgctggattccctccccgccattgataaaccactggaggaagaatgggcattacgtaaaacggatctgccaggaaaccgcacgttgccacagggctgttttttccgcgaacgttgcccccttgcaaccagcggatgcgaagtccggcaatcattaacgacgcgggctgacggacgtgagatccgttgctggcgggcgctgtagagatgctaacaacgcatcaggcattcatgcgcctgacgcgtcatccggcaatgctttacgatttcaactggtaatccagcgtaatttccgctttcagtacctgagagaccgggcatcctgcttttgctttctggatgatgccgtcaaaggtagaggcatcaatacccggcaccgcaacttcactcttcagtgcgattttcgtaatcgcaaaaccggcatccactttatccagcgacacatcggcggtggtatcaatcgatgttggcgtgaatcccgcttcccccagcattaatgaaagcgccattgagaaacatgcggcatgcgctgcgccaatcagttcttcagggttggttcctttttcgccttcaaaacgcgtgttaaatccatacggctgttggttcagcacgccactctcggtggatacagttcccttcccgcgtttgatatcgctttcccagtgtgcctgacctttcttatggattgtcattgttgctctcctgtgggcttaaaaaggaaattatagactacgtgagaaaccgcacgaggataagcaggatattccgaataaaatacnggcaaaaatattacttctgcacttaaattaaattcccacaatagataaccggaaatatatatctcaagagagattgcatcaatattaatcaactcatcacaataataatacctatcaatatcatggggttaaaatataaaaatcatcaaccaggactaatcttaacaacgaagcggcaannatttgccatgctgaatgtgctttataaatctgcgatccgtagcagacactataaatacacagacacggagaatcactatgtttacttattatcaggcagaaaattcaacagcagaacccgctctggttaatgccattgagcaaggccttcgggcagagcacggtgttgtcactgaagatgacattctcatggagctgaccaaatgggtggaagcttctgataacgacatcctcagtgatatctaccagcaaacgatcaattatgtggtcagtggccagcaccctacgctttaagatgctatgcttgatcggcaacctaatttaggggtttagcacgtgtttcttcgctacggcgatgttgtccttaaaactagcaacaggattgaggagttaaaatgaaatcgaaccgtcaggcacgtcatattcttggactggaccataaaatatctaaccagcgcaaaatagttaccgaaggtgacaaatccagcgtggtaaataacccaaccggcagaaaacgccccgctgaaaagtaattcataaccatcagncctcaatgacgattaaacaccattgcctgcgcaatggtgtttttgtttttatctgctttatacttggggccgacgccctggcggtaaagcaaagacgataaaagccccccagggatggatattcaaaaaagagtgagtgacatggaaccaaaaacaaaaaaacagcgttcgctttatatcccttacgctggccctgtactgctggaatttccgttgttgaataaaggcagtgccttcagcatggaagaacgccgtaacttcaacctgctggggttactgccggaagtggtcgaaaccatcgaagaacaagcggaacgagcatggatccagtatcagggattcaaaaccgaaatcgacaaacacatctacctgcgtaacatccaggacaccaacgaaaccctcttctaccgtctggtaaacaatcatcttgatgagatgatgcctgttatttataccccaaccgtcggcgcagcctgtgagcgtttttctgagatctaccgccgttcacgcggcgtgtttatctcttaccagaaccgccacaatatggacgatattctgcaaaacgtgccgaaccataatattaaagtgattgtggtgactgacggtgaacgtattctggggcttggtgaccagggcatcggcgggatgggcattccgatcggtaaactgtcgctctataccgcctgtggcggcatcagcccggcgtatacccttccggtggtgctggatgtcggaacgaacaaccaacagctgcttaacgatccgctgtatatgggctggcgtaatccgcgtatcactgacgacgaatactatgaattcgttgatgaatttatccaggctgtgaaacaacgctggccagacgtgctgttgcagtttgaagactttgctcaaaaaaatgcgatgccgttacttaaccgctatcgcaatgaaatttgttcctttaacgatgacattcagggcaccgcggcggtaacagtcggcaccctgatcgcagcaagccgcgcggcaggtggtcagttaagcgagaaaaaaatcgtcttccttggcgcaggttcagcgggatgcggcattgccgaaatgatcatcgcccagacccagcgcgaaggattaagcgaggaagcggcgcggcagaaagtctttatggtcgatcgctttggcctgctgaccgacaagatgccgaacctgctgcctttccagaccaaactggtgcagaagcgcgaaaacctcagtgactgggataccgacagcgatgtgctgtcactgctggatgtggtgcgcaatgtaaaaccagatattctgatcggcgtctcaggacagaccgggctgtttacggaagagatcatccgtgagatgcataaacactgtccgcgtccgatcgtgatgccgctgtccaacccgacgtcacgcgtggaagccacaccgcaggacattatcgcctggactgaaggtaacgcgctggtcgccacgggcagtccgtttaatccagtggtatggaaagataaaatctaccctatcgcccagtgtaacaacgcctttattttcccgggcatcgggctgggtgttattgcttccggcgcgtcacgtatcaccgatgagatgctgatgtcggcaagtgaaacgcttgcccagtattcgccgctggtcctgaacggcgaaggtctggtactaccggaactaaaagatattcagaaagtctcccgcgcaattgcgtttgcggttggcaaaatggcgcagcagcaaggcgtggcggtgaaaacgtctgccgaagctttgcaacaagccattgacgataatttctggcaagccgaataccgcgactaccgccgtacctccatctaagcctgcgcccggtagtgaaggctaccgggctatttccctctccctttttcagatctcatccatactgggtagtggcgaataaatctcatttgcctcacctgctatgcagaacatcatccgaaaaggaggcactatgaaggctgcagttgttacgaaggatcatcatgttgacgttacggataaaacactgcgctcactgaaacatggcgaagccctgctgaaaatggagtgttgtggtgtatgtcataccgatcttcatgttaagaatggcgattttggtgacaaaaccggcgtaattctgggccatgaagggattggtgtggtggcagaagtgggtccaggtgtcacctcattaaaaccaggcgatcgtgccagcgtggcgtggttctacgaaggatgcggtcattgcgaatactgtaacagtggtaacgaaacgctctgccgttcagttaaaaatgccggatacagcgttgatggcgggatggcggaagagtgcatcgtggtcgccgattacgcggtaaaagtgccagatggtctggactcggcggcggccagcagcattacctgtgcgggggtcaccacctacaaagccgttaagctgtcaaaaattcgtcccgggcagtggattgctatctacggtcttggcggtctgggtaacctcgccctgcaatacgcgaagaatgtctttaacgcgaaagtgatcgccattgatgtcaatgatgagcagttaaaactggcaaccgaaatgggtgcagatttagcgattaactcacgcaccgaagacgccgccaaaattgtgcaggagaaaaccggtggcgctcacgctgcggtggtaacagcagtagctaaagctgcgtttaactcggcagttgatgctgtccgtgcaggcggtcgtgttgtggctgtcggtctgccgccggagtctatgagcctggatatcccacgtcttgtgctggatggcattgaggtggtcagttcgctggtcggcacgcgccaggatctaactgaagccttccagtttgccgccgaaggtaaagtggtgccgaaagtcgccctgcgtccgttagcggacatcaacaccatctttaccgagatggaagaaggcaaaatccgtggccgtatggtgattgatttccgccgctaagaggcctttgctgcgactcccatgttcgggtcgcagcatcgcacactctccaacatgaaatggctaaatggattattgttgcgtaggaaggaacaataatgatagtgttcccagagaaggaacgctactgagagtaaagacactaatgaaaatggccaatcatccccgcccgggggacattattcaggaatcactggacgaacttaatgtcagcctgcgcgagtttgccagagcaatggaaattgctccctcaacggcaagccgattgctgaccggaaaagcagctttgacgccagaaatggcaattaaactttccgtggtgatcggcagttcgccgcaaatgtggctgaatctgcaaaacgcctggagtctggcagaggctgcaaaaacggtggatgtgtcgcgattacgccgtctggttgcg

SEQ ID NO: 441 - DNA, 1784 bp, Escherichia coli
  Strain O55:H7
  modified_base (1578)..(1578): a, c, g or t
cttttacagcgccattttcagcttaaagttcaaaagagattatatcccttcttcactctcttttttcgcttctgccttctcgatttcacgataccagcgcggatggtgtttcttcgcccagcgacggctcaccttcccttcgatcatccctttaatcgatcctttcacccagaatgccatatacatatggatcaggatggcgtggatcaggatgatacccgcagccgcgtggatcagcaggctgtagcgaacaacctgcatcgggaagtactgcgcaaagtacggacgccagataatcaccccggtcaccagcagcacgaaaatcatgctcatgatcgaccagaacatcatcttttgcccggcgttgtacttaccgacatccgccactttatgctcattgcctttcaatacttcgacaatgtttaacagccacggaatatctttcttatccgggatgttgtgatgcacaaaacgcacaaacataaacatcagtgcgacgaaaatcgcaatgccgaagaatgggtgcaaaatgcgtcccatctgcggcgtaccgaaggtttgcgtcagccattgcagcgtcgggaagaagaacgaaatcccggacagcgccaccaggaagaagcaaatcaccacggtccagtgacaggcgcgatcaataaatttggtgcgcacaatcattttcgacttactcatgatgatcctcctcgtcatcgtccacttccttattcgggccaataccgatgtagtggaaaatcaaccctgcaaaagtggcaataaagccagccgctgccagcggtttcaacgcgcctttccacaggcttaccgaggtgtcgatcttcggatctttcggcagaccgtgatacagctccggctgatcggcgtgatgcagcacgtacataacgtgcgtaccaccgaccccttccgggttgtagacgccagcatgttcgtaaccacgcgctttcagtttcgccacgcgctgttccgccagctccagcatctccttcttggtgccgaagtggatagccccggtcggacaggttttcacacaagccggttcctggccgacgctgacgcgatcgacgcagagcgtgcatttatatacccggttatcctctttgttgaggcgcggaatattaaacggacacccggcaatgcagtaaccacagccgatgcagttttccgactggaaatcgacaatcccgttagcgtactgaatgattgcaccggcagacgggcacgccttcaggcagcccggatcttcacagtgcatacagccatctttacggatcagccactccagcttgccgctctgttcggtttccctaaagcgcatcaccgtccaggacttggcgctcagatcggcggggttatcgtaaaccccgacgcagtgccccacttcatcacggatgtcgttccactccgaacacgccacctgacaggctttacagccgatacaggtggaaacgtcgataagttttgcgacttctgctttgtaatcacgcacctgagaaggcggcgtgatggagttagttgcggaccttttgataatgtcctgcgtttccatagccatctgttcgnccccttacgccttctcgatgttgactaagaacgctttatattccggcgtttgcgagtttgcatcaccgacattcggcgtcagagtgttagcgatataacctttacgcgcgacaccctcaaagccccagtggattggaatacccaccgtttcaacctgctgaccatttacattcagcggtttcagacgacgcgttaccacagccacc

SEQ ID NO: 442 - DNA, 4127 bp, Escherichia coli
  Strain O55:H7
  modified_base (2052)..(2052): a, c, g or t
  modified_base (4003)..(4003): a, c, g or t
  modified_base (4079)..(4080): a, c, g or t
  modified_base (4082)..(4084): a, c, g or t
gataaagccacgcttgcttgagacagtgacacgatcgccattattaatgcctttcgccgccgccagcgtttcgctgatttccacaaactgttccggctgagcaattgcgttgagcaacgcgtgcttggtccaggtgtggaagtgctcggtcagacgataggtcgtacccacatacgggaactgctcttttttacccatccgcagcgcgtcttgttcatacagacgaaccaccgggttagaaaccacgttcggatgcagcgggttagttcccagcggcgtttcaattggctcgtagtgttccgggaacggaccttccgccattttgttgatggcaaacaggcgtcccatcccttccggctgcatgataaacggcccggttggcgtacccggtgcggcattgccgaagtcagggatatcgttacccgtccacttgctgccgttccactggatcagcatccgtttcggatcccacggtttaccgttgatatctgccgaagcacggttgtagagtacgcgacggttaagcggccacgcccaggcccatcccagcgtattccccagaccggacgggtcggagttatcgcggttagccatctggttgccctgctctgtccagctaccggtgtagatccagcaagaagatgcggttgtaccgtcatcacgcagatgcgcaaagctactcagcaactgacctttcttcgcaatcagcacgccattagcatcatagagatcttccagcgcatagccgttgttctctttagctacttcgtcagattgcggttcgtgcggctgcttgtagttccagctcatcttcatcagcggttctacgcctttaccaccttcagcctggtacagctcgcgcagatgatggtagatacccgccagaatttcgccgtcgttacgcgcttcgcccggcgcgtcctgacctttccagtgccactgcaaccagcgaccggagttagcgatagaaccatcttcttctgcaaagcaggtcgaaggcagacggaatacttcagtctgaatagacgccggatcgacatcgttcgactcgccgtggttctgccagaaggtagaggtttcagtcaccagcggatcgataaccaccatgtacttcagcttgctcaggcagctcaccactttgtttttgtccgggaaggacgcaaccgggttaaagccctggcagaaataaccggtgactttgccttcatccatcatgttgaaatacttgatgacgtcgtaggtctggtcccacttcggcagccagtcatagccccagttgttctctttctgcgcggcatcgccatagaaagatttcatcaggctaacgaagaacttcggatagttgctccagtagttcacctgaccagccagcgtcgctttcggcgtgttcgcttccagatacgactgcaaatcaacctgtttttctgacggcagcgtcagataacctggcaggctggtagagagcagacctaagtcagtcagaccctgaatgttggagtgaccacgcaatgcattcacgccgccaccggccatacccatgttaccgagcagcaactggatcatcgccatagtacggatgttctgcgcacccacggtgtgctgcgtccagcccagcgcgtacaggaaggtggttgtgcgatccggtgcgctggtggaggccagcacttcacacactttcaggaagtcggcttttggcgtaccacagatgttttcaacaacgtccggcgtgtagcgggaaacgtgctctttcagcaggttccacacacagcgcggatgagtcagtgtttcatcgcgttttgcatagccgttttcatcgaactgatagttccaggacgacttatcgtactggcgtttttcagcgtcgtagccgctgaacagaccgtcttcgaaagcaaaatcatcacgcaccagcaggctggcgttggtgtaatgcttaacgtattcggcgttgattttgttgttttcgatcaggtagcgcaaaatgccagacaggaacgtaatgtccgtaccggaacgaataggcgcgtagatatccgccacagaagcggtacncgtaaaacggggatcgacaacgatcaaggttgcatcgttgttgtttttcgcttccatcgcccagcggaaaccgacgggatgcgcttcagcagcgttaccgcccattaccattacgacgttagcgtttttgatatccacccagtggttggtcatcgcaccgcgaccaaatgttggagcaagacttgctaccgttggtccgtgtcagacgcgcgcctggttgtctaccgccagcatcccgagggagcgggcaaatttctgggtcagcatcccggtttcgttgctggcaccggaagcacacagcataccggtagaaagccaacggtttaccgttacgccctgctcgttcttttcaataaagttagcgtcacggtcagctttcatcagcttcgcaatacgggagaatgcttcttcccagctaatgcgctgccatttgtcagaacctggcgcacgatattccgggtagcgcagacggttttcgctgttgacgtaatccagcaaaccggcccctttcgggcacagcgcaccacggcttaccggatgatccgggtcaccttcaatgtgataaatcgcttctctggcgtttttcgcgccatcacccaggctatacatcaatagcccgcaacctacggaacagtatgtgcaggtgttacggatctctttagcgcgtaataatttgtagtttcgcgcctgagccagtgcttgcttcggggcaaagcccaatgccgctactgttgttccagccataccgcccgcgcagattttaaaaaattgtctgcgactgacgtccattgctttcctcttttttcaggggtattactgcgcgaggaaactaacagtaaaattctgaatctttttgcgcgaaatcaaaaagaacacgtgtttgccacaaaataatccgcctgcgcaaattgacctacctcaatagcggtagaaaaacgcaccactgcctgacaggccagttaaaaaaatgctataaaattcagcttaatttttaacggcaagagagacaaaacagcgagcatgacacgacaaaaagcaacgctcatagggctaatagcgatcgtcctgtggagcacgatggtaggattgattcgcggtgtcagtgaggggctcggcccggtcggtggcgcagctgctatctattcattaagcgggctgctgttaatcttcacggttggatttccgcgtattcggcaaatcccgaaaggctatttactcgccgggagtctgttattcgtcagctatgaaatctgtctggcgctttccttagggtatgcggcgacccgtcatcaggcgattgaagtgggtatggtgaactatctgtggcccagcctgacaattctctttgccattctgtttaatggtcagaaaaccaactggctgattgtaccaggattattattagccctcgtcggcgtctgctgggtgttaggcggtgacaatgggttacattatgatgaaatcatcaataatatcaccaccagcccattgagttatttcctggcgttcattggtgcgtttatctgggcagcctactgcacagtaacgaataaatacgcacgcggatttaacggaattaccgtttttgtcctgctaacgggagcaagtctgtgggtttactattttctcacgccacaaccagaaatggtatttagcacgccagtcatgattaaactcatctctgcggcatttaccttaggatttgcttatgctgcatggaatgtcggtatactgcatggcaacgtcaccataatggcggtaggttcgtattttacgcccgtactttcctcagcgcttgcagccgtgctgctcagcgccccgctgtcgttctcgttctggcaaggcgcgctgatggtctgcggcggttccctgctctgctggctggcgacacgtcgtggctaaaataattgccgggtctacggcccggcaattaatcagataaaccccgacnatattaaaaaataaatttcaaataccagtaattcaccttatatctcatttcgacttcgatcacatatcgataaatnntnnnatttcatctatttttctcattgtttttaatcaccattctaatt

SEQ ID NO: 443 - DNA, 3100 bp, Escherichia coli
  Strain O55:H7
  modified_base (62)..(62): a, c, g or t
ccgtttaaaattcgtttagaaaatacgtttaacgataattaaaaggattctgttaaatgaanttaaaaatagttgcggtggttgtaactggtttgttagctgcgaacgtagcacacgctgccgaagtctataacaaggatggtaataaactcgacctttatggcaaggttaccgctctacgttattttactgatgataagcgtgacgatggtgataaaacttatgcccgtctcggctttaaaggagaaacgcaaatcaatgatcaaatgattggttttggtcactgggaatatgattttaaaggctataacgatgaagccaacggctcgcgcgacaacaagacccgtctggcctatgctggtttaaaaattagtgaatttggctctctggactatggccgtaactacggtgtcggctatgacattggttcatggactgatatgttgccagaatttggtggcgatacctggagtcagaaagatgtcttcatgacataccgtaccaccggtgtagcaacctatcgcaactacgatttctttggcttaattgaagggctgaactttgccgcgcaatatcaaggcaaaaatgaacgtactgacaacagtcatctttatggtgctgactacacgcgtgccaacggtgacggtttcggtatctcctcaacttatgtttatgatggctttggtatcggagcggtgtataccaaatccgatcggacaaatgcgcaggaaagagccgctgctaatcctctcaatgcctccggtaagaatgcagaactgtgggctacaggtataaaatatgatgccaacaacatctactttgcagctaattacgctgaaacattaaacatgaccacctatggcgatggttatatttctaacaaagcacaaagttttgaagtggtggcgcaatatcaattcgacttcggcttgcacccctcactcgcttacctgaaatcgaaaggcatagatctgggccgctacggcgatcaggacatgattgagtatatcgacgttggtgcgacgtatttcttcaacaaaaatatgtcgacctatgttgattataaaatcaacctgattgatgaaagcgactttacccgtgccgtagatattcgcaccgataacatcgtcgctacgggcattacctatcagttctaacatcctctcctgaccagcccttctctgggctggtttttgatttaagtgctgctgtatgactccttaagtaaaaatgagcaatttttgatatttctggccattcacctcaattaatattattccatacccccggggacatcttactataatatttattgatgagtgattatgaccaatattaatacagcttgtgtaaaaaataatgccagttatcaaattaataacgcattacctaacaaagaaaccatctccagcaatttttatgaacgactagaacaatggggtaataagtcgcttaataatggtgaagaaagagcaattgccgtggagcgaattaaagaagcttacaattcgaacatggcatctcttgatttgtcatatcttgatttgagtgagttaccgcctatcccctcgacagttaatacgttaaatctggaaaacaattgtctaacttgtcttgactttactgacaatgccagtctcgttaatatcaacctcagctttaataaaattaacacgataacctttccaaatgaatcaaatctggaaaacatttatattgatcataataatctggaaagtttagatttaaaaaatcagcattcattggttaatctggaagcgcaaaataataatctaaaaaaattaatatttctgatagttataaactgaaatttcttaatcttgattataacaagctagcatcgctggatgtctcccggcaagagtctctgattgagttaagtgcccatcacaatatgatcactgaccttatattacacaatcatcccaggatgaaaacaatcactttaaacgacaaccatattgcacatttaaacaccaaaactactacaaaacttgaatatttaaacttaagcaataacaatttattgccaaccaatgacattgatcaactaatatcatcaaaacatctttggcatgtattagttaacggcatcaacaatgattcacttgcacaaatgcagtactggactgcagtaagaaatataattgatgacactaatgaagtgaccattgatttatcttataatctggcaatcacaaatatcgataccagtgatgaacatcttgtagaagtaagcgataattcagaaggtaattatataaaagacaatgactcaatgtctattcgttatagatcaaaatattattccagagattccgccttaatagaagaagaaacaatattttctgacgcagaactaaaagctattctgcctatgcgtcgcatgtacggggttagtgactataagtcaaattcctcttctctatcctcacactcgggactcaaggacccaacgggcacacccgtctgttattatattcataatgagagtaaaccttccttaggttatggtccaacatccaataattggttaagccaatcctttacaacagagttataaaacacatcctggtttatcaagggtgataaatcagaaaaacattgtattactatggagcagttatgaaattcccttcaatatttaacaaaataaaaccacaatccatacagcaacatccagaaaaaaatcaacttaactggatgctcgaattaaataaatggaaagaagaacgtatacttacaggtgaaatccatcgtccggaatgtcgaaacgaagccgctaaaaggataaactgtgcttttttgtcgaaacagaatgacattgatttatcaggacttaatttatctactcaaccaccagggctgcaaaacttcacctctatcaatcttgataataaccaactcacacattttgatgcaaccaactacgatagactcgtaaaacttagtctgaatagtaacactcttgagtcaataaatattcctcaaggcagaaatgtaagcattacacatatatctatgaataataattgtctcagaaatattgatatagataggctttcatcaattacttatt

SEQ ID NO: 444 - DNA, 18017 bp, Escherichia coli
  Strain O55:H7
  modified_base (2)..(3): a, c, g or t
  modified_base (425)..(425): a, c, g or t
  modified_base (6011)..(6012): a, c, g or t
  modified_base (8517)..(8517): a, c, g or t
  modified_base (9353)..(9353): a, c, g or t
  modified_base (11206)..(11207): a, c, g or t
  modified_base (13306)..(13306): a, c, g or t
  modified_base (13612)..(13612): a, c, g or t
  modified_base (14253)..(14256): a, c, g or t
  modified_base (14991)..(14991): a, c, g or t
  modified_base (15147)..(15149): a, c, g or t
  modified_base (15793)..(15793): a, c, g or t
  modified_base (17880)..(17882): a, c, g or t
  modified_base (17979)..(17980): a, c, g or t
anntaataaactagagtttgtgcaattagaatcttgcgaatggctgcaatacctgaatctcagccataatcaattaactgatattgttacaggaaataaagaagaactcttactgctggatctatcccataataaactagcaagtttacacaatgccttatttcccaacttaaatacgttacttatcaacaacaacttgctttctgaaattaaaatgttttatagcaacttctgcaaagttcagacattaaacgctgctaacaatcagttggaaaaaataaaccttcatttcctgacttatctttcatctatcaaaagtttaaggctggacaataataaaataactcgcattgatactgagaacacatccgatattagaagtttattccccataataaagaagagcgaaagcttaaattttttanatatttctggcgagaacaattgccctactatccagctcatgttatttaatttgttttccccagcacttaagcttaatactggcctggcaattctttcgcctggtgcatttgaagatcactctgacggattagatgtggataacgaattgtttcactatactattaataaagcatataccccatataatatacatacttataaaacagaagaagttgtaaaccagaggaatataaaaattaaaaatatgaccttagatgaaataaacaatacttattgtaataacgattattacaatgaggcaataagagaggaaccgatagactttctggacagatcgttttcctccagctcatggcctttttatcactaattctataagtgtctggtcttgttaaaaatatagttaatatacaaccctttggattcatcatctgaagggttgaatcatgacatgcgtacatagcttaaccccgtttaatggttagcttgttagttacatttagtaacacataactggctgcttaatccccattctgcccccgcggttacgctttcttatctattctttcaatcagcacttcacccatttcatccttaattctaataactggctattgcgccttacctcctgttttgtctttttttcattaccaatgtgtacatgtgaggaacaatatggcactgcaaaatgagaaaaatagtcgttatcttttacgcgactggaaaccagaaaatccggccttctggaaaaataaaggaaaacatattgctcgaagaaacctctggatatcagtcagttgtctacttcttgccttctgtgtctggatgctatttagcgcagttaccgttaatctcaataaaatcggttttaatttcactaccgatcaactctttttattaaccgcattaccctccgtttctggcgcattattacgtgtcccctactcctttatggtgcctatattcggtggacgtcgatggacggtttttagtactgcaatcctgattattccttgcgtctggctcggaattgccgtgcagaatccgaatactccttttgggatatttatcgttatcgctttgctatgcggttttgcaggtgcgaactttgcttcgagcatgggcaatatcagtttcttctttccaaaagccaggcaaggtagcgctcttgggattaatggcggattaggaaacttaggtgtaagtgtaatgcagctggttgcaccgctggtcatttttgtacccgtatttgcctttctcggcgtcaatggagtaccgcaggccgacggttcggtgatgtcgctggcgaatgccgcatggatttgggtaccgctactagcgattgccacgatcgccgcctggtcagggatgaatgatatcgccagttcacgcgcgtcaattgccgaccagctccctgtcttacaacgcctgcatctctggctgctgagcctgctttaccttgccaccttcggttcgtttatcggtttttctgcgggtttcgccatgctggcaaaaacccagttcccggatgtgaatattctgcgcctggcgttctttggcccatttatcggtgccatcgcgcggtcggtgggtggtgctatttccgataaattcggcggcgtgcgggtgacgttgatcaactttatttttatggcgattttcagcgccctgctgttccttaccttaccgggcacaggctccggtaacttcatcgccttttacgccgtatttatggggctgtttctgaccgcgggtctgggaagtggttctactttccagatgatcgccgtcatctttcgccagataaccatttatcgggtgaagatgaaaggcggtagtgatgagcaagctcagagagaagccgtcaccgaaacggcggcggctctgggctttatctcagccatcggcgcagtgggcggcttttttattccgcaggcatttggcatgtcactcaatatgaccggctctccagtgggcgcgatgaaagtgtttttaatcttctacatcgtttgtgtgctactgacctggctggtttatggtcggcggaagttcagccaaaaataagagatcgatgcctgatgtacaaccgtgtcgcatccgacaaggcatcagatcccaattcattcctggagcaggagtcatgtcatgagtaaacttttggatcgctttcgctacttcaaacaaaagggcgatacctttgccgatggtcacggacaggtgatgcatagcaaccgcgactgggaggacagctatcgccagcgttggcagttcgacaaaatcgtgcgttccacccacggtgttaactgtacaggctcctgtagctggaaaatctacgttaaaaatggtctggtgacctgggaaatccaacagaccgactacccgcgcactcgccctgacctgcccaatcatgaacctcgcggctgcccgcgtggcgcaagttactcctggtatctttacagcgctaaccgcctgaaatacccgctcattcgtaaacgactgattgaactgtggcgcgaagccctcaaacaacacagcgatccggtactggcgtgggcatcgattatgaacgatccgcaaaagagcctgagctacaaacaagtgcgtgggcgcggcgggtttatccgctccaactggccggaactaaaccagctgattgccgccgctaacgtctggactatcaaaacctacggcccggatcgcgttgccggtttctcgccgatcccggcgatgtcgatggtttcttacgccgccggaacacgttatctgtcactattaggtggcacctgtttaagcttctacgactggtattgcgacctgccgcccgcctcgccgatgacctggggcgagcaaaccgacgtaccggaatctgccgactggtataactccagttacatcatcgcgtgggggtctaacgtaccgcagacacgtacgccggacgcccatttctttaccgaagtacgctacaaaggcactaaaaccatcgccattacccctgactactctgaagtggccaaattgtgcgaccagtggctggcaccaaaacaaggcactgatagcgccctggcgatggcaatgggccatgtgattttaaaagagtttcatctcgataatcccagcgactactttatcaactactgccgccgctatagcgacatgccgatgctggtaatgctggaacctcgcgacgatggtagctacgtacccgggcgcatgatccgcgcgtctgacctggtagatggactaggcgaaagcaataatccgcagtggaaaaccgtggcggttaataccgcaggtgaattggtagtgccgaatggttcgattggtttccgctggggagaaaaaggcaaatggaatctggaatccattgccgccggtaaggaaaccgaattgtcgttaaccctgctcggtcaacatgacgccgttgcaggcgtggctttcccctactttggcggcatcgaaaatccgcattttcgcagcgtcaaacacaatcctgtcctggtgcgtcaattacccgttaaaaacctgacattagccggtggcagcacctgtccagtggtcagcgtttatgatttggtactggcgaattacggcctcgatcgcgggctggaagatgaaaacagcgcgaaagattacgctgaaatcaaaccgtacaccccagcctggggtgagcaaattaccggcgtgccgcgccagtatattgaaaccatcgctcgtgaatttgccgatactgcccataaaacgcatgggcgctcgatgattatcctcggcgcaggtgttaaccactggtatcacatggacatgaactaccggggaatgatcaatatgctgatcttctgcggttgtgtcggacaaagcggtggcggctgggcacactatgtcggtcaggaaaaactgcgcccgcaaaccggctggttgccgctggcctttgcgctcgactggaaccgaccaccgcgccagatgaacagcacctcgtttttctacaatcattccagccaatggcgctatgaaaaagtctctgcgcaggagttactttcaccgcttgccgatgccagtaagtacagcggtcatctgattgattttaacgttcgcgccgaacgcatgggctggctaccttctgcgccgcagttggggcgtaacccgctcgggattaaagctgaagccgacaaggccggattatcccccacagaatttaccgcccaggcgctgaaatcgggcgatttacgtatggcctgcgaacaaccagatagcggcagcaatcatccgcgtaatttgtttgtctggcgttctaacctgcttggctcctccggcaaaggccacgagtatatgcagaagtatctgctggggaccgaaagcgggattcagggcgaggaactcggtgccagcgacgggatcaaaccggaagaagtcgagtggcaaactgcggcgattgaaggcaagctcgacctgctggtgacgctcgacttccgcatgtccagtacctgcctgttctccgatatcgttctgcccaccgccacatggtatgaaaaagacgatatgaacacctcggatatgcatccatttattcatccgctttctgcggcggtcgatccggcctgggaatcacgcagcgactgggaaatctacaaaggtattgccaaagcattttcgcaagtgtgcgtgggccatcttggcaaagaaaccgacgtggtattacaaccactgctgcatgactctccggcagagctctcacagccgtgtgaagtgctcgactggcgcaaaggcgaatgcgatctgagcccgggtaaaaccgcgccgaatattgtggcggtggagcgcgactaccctgctacgtatgaacgctttacctcgctcgggccattgatggacaaacttggcaacggcggtaaagggatttcgtggaatacgcaggatgaaatcgatttcctcggtaaactcaattacaccaagcgtgatggcccagcgcaggggcgtccgctgattgacaccgccattgacgcttcagaagtgattctggcactggcaccagaaaccaacggtcatgttgcagttaaagcgtggcaggcgctgggcgagatcaccggacgcgaacatacccatctggcgctgcacaaagaggacgagaagattcgctttcgcgatattcaggcgcagccgcgtaaaattatctccagccccacatggtctggtctggaaagcgatcacgtctcctataatgcgggatacaccaacgttcatgagttaattccgtggcgcacgctgtcgggacgccagcagctctatcaggatcatccgtggatgcgtgcttttggtgaaagcctggtggcatatcgcccgcctatcgacacccgtagcgtcagtgagatgcgccagatcccgccaaacggcttcccggaaaaagcacttaacttcctgacgccgcaccagaaatggggcattcactcaacctacagtgaaaacctgctaatgctgacgctctctcgcggtggaccgattgtctggatcagcgaaaccgatgcccgtgaactaaccattgtcgataacgactgggtggaagtgtttaacgccaatggcgcgctgacggcccnngcggtggtcagccaacgtgtaccgccgggtatgaccatgatgtatcacgctcaggaacgcattatgaatattcctggttcggaagtaactggcatgcgcggcggtattcataactcggtcacccgcgtttgcccgaaaccaacgcatatgattggcggttacgcgcagctggcctggggctttaactactacggcaccgtcggctcgaaccgcgacgaattcatcatgatccgcaagatgaagaacgttaactggctggatgatgaaggtcgcgatcaggtacaggaggcgaaaaaatgaaaatccgttcgcaagtcggcatggtgcttaatctcgataaatgtatcggctgccatacctgttcggtgacctgtaaaaacgtctggaccggacgcgaaggcatggagtacgcatggtttaacaacgtcgaaaccaaaccgggcattggttatccgaaaaactgggaagatcaggaagagtggcaaggcggctgggtccgcgatgtgaatggcaagatacgcccgcgtctgggcagcaagatgggtgtaataaccaaaatcttcgccaacccggtggtgccgcagattgatgattactacgaacctttcaccttcgactacgaacatttgcatagcgcaccggaaggcaaacatatccctactgctcgcccgcgttcgctgattgacggtaagcggatggacaaagtgatctgggggccaaactgggaagaactgctgggcggcgagtttgaaaaacgtgcccgcgaccgcaacttcgaggccatgcaaaaggagatgtacgggcagtttgaaaacaccttcatgatgtacctgccgcgcctgtgcgaacactgcctcaatcccagctgcgtggcgacctgcccaagcggcgctatctacaaacgcgaagaagacggcattgtgctgattgatcaggataaatgccgtggctggcgtttgtgcattagcggttgtccgtacaaaaaaatctacttcaactggaaaagcggcaagtcagaaaaatgtatcttctgttacccacgaattgagtccggtcaaccgaccgtgtgctcagaaacctgcgtgggtcgcatccgatatctgggcgtgctgctttatgacgctgaccgcatcgaggaagcggcgagcaccgagcgcgaggttgacctctatgaacgccagtgcgaagtgttcctcgatccgcacgatccctcagtgatcgaggaagccctgaaacaaggtattccacaaaatgtgattgacgctgcccagcgttcgccagtctacaaaatggcgatggactggaaactggcactaccgctgcaccctgaataccgcaccctgccgatggtctggtacgttcctccgctgtcaccgattcagtcctacgcagatgcgggcggtttgccgaaaagcgaaggcgtgctgcccgccatcgaaagcctgcgtattccggtgcaatatctcgccaatatgttgagtgccggcgataccggtccggtactgcgggcgctgaaacggatgatggcgatgcgccactatatgcgttcacaaaccgtggaaggcgttactgatactcgtgccatcgacgaagtaggcctgagcatcgcccaggtcgaagaaatgtatcgctatctcgccattgccaactatgaagatcgttttgttatcccgaccagccatcgggaaatggcgggcgatgccttcgcagaacgcaatggctgcggttttacctttggtgacggttgtcacggctcggacagcaaattcaacctgttcaacagtagccgtatcgatgccatcaacatcaccgaagtgcgcgacaaagcggagggcgaataatgcagatcctcaaagtgatcggcctgttgatggagtatccggacgagatgttgtgggaatgcaaggaggacgcgctggcgttgatccgccgcgatgcgccgatgcttacggatttcacccgcaacctgcttaacgcgccgctgctggataaacaggccgaatggtgcgaagtgtttgaccgcgggcgcaccacgtcgctgctgctgttcgaacatgttcatgccgagtcccgcgatcgcggccaggcaatggtggacctgctggcggagtatgaaaaggtcggcctgcagctggattgtcgggaactgcccgattatctaccgctgtatctggagtatttaagcgtactgcctgacgatcaggcgaaagaaggattgctcaacgttgcgccgatcctcgccctgcttggcggtcgcttaaaacaacgcgaggcaccgtggtacgcgttgtttgatgctctgctgcaactggcgggaagtacactttcaagtgacagtgtcacaaaacaagtaaacagcgaagagcgcgatgacacccgccaggcgcttgatgcagtgtgggaagaggaacaggtgaagtttattgaagataacgccacggcgtgtgacagctcgccgcttaatcaatatcagcgacgctttagtcaggatgtcgcgccgcaatntgtcgacatcagtgcgggaggtgggaaatgattcagtatctgaacgtctttttttacgatatctacccgtacatttgtgcgacggtgtttttcctcggcagctggctgcgctacgactacgggcagtacacctggcgcgcctcctcaagtcagatgctcgataaacgcgggatggtgatatggtcgaatctgttccatatcggcattttggggatcttcttcgggcacctgttcggcatgttaacgccacactggatgtacgcgtggtttttgccagtggcagcgaaacaactaatggcgatggtgctcggtggtatttgcggtgtgttgacgttgattggcggcgcaggactgctgtggcgcaggctgacaaatcagcgcgtgcgtgccacttccactacgccggatatcatcatcatgagcattttgctgatccagtgtctgttggggctaagtaccataccgttctcagcacagtatcctgatggtagcgaaatgatgaagctggtgggttgggcgcaaagcattgtcactttccgtggtggatcgtcagagatgcttaacggtgtagcgttcgtcttccgcctgcatctggtgttgggaatgaccatcttcttgctcttcccattcacccgactggtgcatgtgtggagcgccccgtttgagtactttactcgtcggtatcagattgtgcgctcgcggcgataatttcaccctggccggatagcccttcgctctccggccacttgcaggctatgatagttctccagtcacaggagaacgttaatgaaaccgcaggtttaccacgtcgatgcttttacctctcaaccatttcncggcaattctgccggtgttgttttccccgccgataatcttagcgaagcgcaaatgcagcttatcgcccgcgaattaggtcattcggaaaccgcttttctgctgcacagcgacgacagcgatgtgcgcatccgctactttacgccaacagttgaagtgcctatttgcggtcacgcgacagtagctgcgcactatgtacgtgcgaaggtgttaggtttaggaaattgcacggtctggcaaacatcgctggcaggaaaacatcgcgtgactatcgaaaagcaccacgatggttatcgtatttcgctggaacaaggtacgccaggctttgagccaccgctggaaggtgaaacacgtgcggcgattatcaacgcgcttcatctcactgaggacgatattctgccaggcttgccaattcaggtggcaaccacaggacactcaaaagtgatgatcccactgaaaccggaagtggatatcgacgccctttcgcctgaccttaatgcgctgaccgctatcagcaaacagattggctgcaatggtttcttcccgttccagatccgcccaggcaaaaacgaaaccgatggtcgcatgttctcgcctgcgattggtattgtggaagatccggtgactggcaatgccaatggcccgatgggtgcatggttggtacatcacaacgtattgccccacgatggcaacgtgttgcgtgttaaaggccatcaggggcgcgcattggggcgtgacggtatgattgaagtgacggtgacaattcgtgataaccaaccggaaaaagtcaccatttctggcgcggcggtgattttgtttcatgccgaatgggcaattaaactctgaaaccgttgcctgatgcgcttcgcctgtcaggtctacaaccgggctaatgtatgccggataaggcgtttacgccgcatccggcaacctgacataaattattttcccgcctccgggtgcgtatcaaacgccgccatcaccagcgctaactcatccacggtaaagccatgtttcgcatcatccacgcccagaccaaactgttcttgcatcacagcatataacgacgccacatccggtagatttcgctgctccaccgcgtgcccattttcataatggtaaaatgaaaattggtcagtgtcagcttgccgccgtccggcaaatggcggcacatcagcaaatgatggcgaaaatgcgactgcggccagtgcgccgaccagaaattacccatcacataatcgctttgttgctgctcgcagagatcaaaacggtacatcgactgccagtgctgatgatgattaaactgcaacacccaatcatcaccctcctgcaacaaccgatactctccgtgtggcgtggtctgcacaagatcgggaactaaacgaatcggcgcggttagcgtctgcccaccgaaaccgacatcagcaatccatttttcctcttccagttccaccaacagcaaacgatgggtgcgcggcggtaatgctggcggatttgataacactacccgccctaacaagctgcgaacgttaaaccccagctcgcgtaacacccgctcaaaaacgccattctgctcaaaacagtaaccgccacgacgggctatcaccagtttctcttccagcgattgatcatcaagctgcatttccctcggcagcaaaacgtcgaggttttcaaacggaatggtgcaattgtgtttcaggtgcaatgcacgaagcgtatcaatattgaccgcagcagctcccgaccagttaatacgggcaaaatagtgattcagaatgggcgtcatcaggcgtttcccttagtggttttctcaacttataacctggaatagacgccgcaccggctattttgtgcnntcgcggacatgcatcacgttcgcaaatcgccaatcccgttaatttcgttacttattgcgttacggactacgcttaaaaaaaccttcttcgcgaggcgataccatgagccgattcatccccatagaattacaccatgccagccggctgttaaatcatggcccaactgtcatgatcaccagtttcgatgagcaatcccagcggcgtaacattatggctgcagcctggtcaatgccggtggagtttgaacctccacgcgtgacgattgtggtagataaatcgacatggaccagggagttgattgaacgtaacggtaaatttggcatcgttatcccgggcgttgcagcaactaactggacgtgggcagtgggaagtgtgtcgggtcgtgaagaagataaatttaattgctatggcattccggttgtgagaggcccggtatttggtttgcctctggtcgaggaaaaatgtctggcgtggatggagtgtcgattgctacctgcgacttctgcgcaagaagaatacgacacgctgtttggcgaagtagtatcagcagcggcagacgcacgggtatttgtcgaaggccgctggcagtttgatgatgataagctcaatacgttgcatcatttaggtgctgggacgtttgttaccagcggcaagcgtgttacggcgggttaagcattacatgctgtaaccgggtttctttatcaaagcctccatttggggcgcgatttcggcatcccagatagcttgccaagattctggttgaatctgttgtagagcaatgcttatcgaactgtctttactgttcagatggcgaataataacgtcggtaatatctgcagcaagtgctgctttttgttgttcgtccagttcacgcggataacatttaatgtctatgtgcggcatgattacgctccttttgaaagatgtcagtaaaattaacacacattgtgaatgtcgtgtgtccggtaaagcgtttttacgacaataatgccagggcaagattacgaaagcccgctccccgcaaggactgacgccagatagtttctgtccatggctgcttttcgcatcttacgtcttaaccctgccttgaataccttatcattcgtcaaaatattaatagcaatgtgccgtatccctgaaaataattctgctgcatttcctcttcttattttgcagtcgtcttcattcattaccacgtccagacgccagtgcagcttattctccacgtgccagtggtttcggattgctgtgcgaacttctctgcggttaaatcagcagaactgatataatatctgaccgtcattttttggctctttcttttgttctgctgttctgctgttctgctgttctgctgttatcgaccgaaaggagactgccacgcataatttcttcagccctttccattcaaacgtgaaatcaataagttcatcagggacatcgcaaacaatatgaagacggatttcttctctgccgtgactcttttcactcattgcgtaactgtcatgctctggattatttaattctttcagcggaaatttttcctcaaaggctttatttagccgcccctggtttccttttaccgcgaataaataatcacctccctgtttttgtatcttctctgcaatatctttctggcaacccatcgcatcagttgtgatgatttttcctttaatatccagcatgttaagaagttctgggatagctgtaatctcattagatttctcatccgtcttgatctgtccgatgaccagactgtgcattgttgagaacgcactaatgacatgaatcgctcccctgcggcgactcttgtcataagagtgccggagcgtttttccatcaattgcaatgacgtctttatcatctgaagaatggcagtcacgcatccagttaataaagcactcgtgaaattttgcaggactgatacaggatacaactctggcaatgatatcgtgaacaggaataccattttcaaaatcaccatatcacttcaaaacatcgggatgtgtttccccaaaatcctctatatcttcccagccttctgcaccagaaataacggcacaaatagtcaacagtagaatatccgataatttatgttccantttccaggcttgtctgtaatcggggataatagaaatatgttccatcaattttttaagttccattttgttctccttaattatgtaaggagtatttgatcatgtataagcaataaaaaacagcttcaggtaatgaggaatatctcaatttttaaacataaaatgcgaattatttagtacaaaaagtgaacttttgatgatctttccctaatctcacataggatcagatctcgtctgatcgttccccctgcgctcactaccatggctctttaccacagcagccggggttgtttgggaccgacttccganagcagatcccggtgggcctgccaccatctcttcacaagcttatgcttattacatgcaaaacgtcccgttttgcatctttgtgcctacggcacaccgatgatctttccctgtgatctttccctgaatctgcccctgagaacctgaatcaaacgtctgactcgcagaaccatctgtttctcgcgctctgtagaacttcatgaaaaagtcatcggtgcttttatcgaaaaatacatgttctactaattgaagtcatcatcaaaaaatttaattaatcgaatcatacctataaccttttaattttacttttttgtcttcaacattaaacacaaaaacctcttggacaattctttttgaatattctgagaaatatatcaatgtaatttcatcgtttgaaaataatccgcgagtgattttttcagttttaagggttgattttttataagtcccaagatctttttcttttgcttcgttcattatgtcgataaatttttttcagatgtggcagtctgaaaatcacttgaagtgattttatatatatcactgtatttccctgtctgatataaaccacgaaagatattaacttcttgtctagctggctctatgtccactggagaacaaccatacaataaaaataaaactannnntatatattttttcatatttcctcctgttaattgacccagcattcttgccacgttctacaagccagagtcataactgaagcgtcaacacctgcaccgataccaacagattctgtcgatgattctggattatcaacatccactacataagtatacgcaaaatgccccccaactccgccgccaaccgttacacctactgaattgctgactcccgatgtaggtaaagacttggtctcagaatatgtgatagccgcatttatcccaccaccaattcctgcatgtccgcatgctgtagcataaatacaaatatcagataacatttcacctttctttttagcaaacgcaacgccaagtcctgcatgaccacctaatgatattagatctccactgccagtaatatcaattgatgatgttccatatgaatcatcatgccaaacatcatataataattgatataaattatacaaacccaaaggatccatccttattatcggattcagtgggtaattatacaggttccatccccccgccagcccaatggggtcttgtgtaatatacctcccctgtagcgggtcatagtaccggttccggttatagtacagccctgattcctcatcatgctgctgccccggcagacggtatggctggtgcaggtaatacgggttctcttcattaagctggttgccccattcatcatactccccgcgccacgccgtattgccgtcttcgctgatgagngccagcggcaggccccggtggtcgcagtggtaaaaatgaacttttcgcgccggtgtgtattccggctccacctgtctggccagttgctccaccgtcagcccgcactgcgcaagccacgcccggctttcactgctcacgcggtctgcccggatttcnnnctccagcctgtccagcagccgcaccagttcagccgggaacaccacgccgtggccgttctcactcccttcctgctggagcgtctctgccaggctgcgccgctgcgctttttcccgctcgccgttctctgtctcgacccggatgagcggcgtgaagcttcccggctcgtataccgtctggatacgtgtggtgtcagtctgcaccgtcgtcagcctgtctccgtcccagccataccacgtcacctccggtttacgcgacagcgacatccaccccgtcaggtcacgctcccgccgccagacccgttttgccattcgccgtcccagcgggtcgtagaggtagcggctctcgaccagtggctcgccatgctgtatccgcgtgtagaacaccagrcggtgctggctgtcgtagtggtagtggtgggtccgctcgtcgtccgtccgtatcacacccgccgggatgcggtccgtcttctccgtcagcctgccgtattcatcgtgtcggtagacatagtgcgcatcctccgcgatgcggttatccggccacgccgtgagcgtgctgtccgggtgtagctccgggtccggcagccggtttcccgccgggtcggtcgcatacgggatgcggatatccaggtctgatgcaagggtgngcacgctctccagcctgcccgtggcgctgtagccatattcccacgtctgtcgcgggccgctgatgcgcaccaggtcgccattgtcattccagtcgtagtcacggtcatacacctggctgttcaggcgctggctctgtaaatggcctgcgggagtgtatgtgctggtcagttcgtatgcgttattgccgaagctgcgcaccgtctcgcggtgcagcctgtcgcgcgtgaactccaccagcggcgtcccgcccagcttcatccccgcaagataaccgctgccgtaggtcagccactccacccgcggcaggctgtccggcgtgacgcggtttgccagaccctgttcgttgtatgcgtgctctgtctcatgctgccacagcagttcccccgtctccgggttatgcaccgtctggcgctccccggccaggcggcccttatcatcataaccgtaatgcaccgccacctgatggccttcgctcaggtggctgatttctgtcagccagccgtgctcgtcgtactgccactgctctgccggttcgccgttcaccgtgcggtgagtgaggcggtccgattcgtcgtagtgccagagggtgacaagcccctcatcttcactctgcgtgagttttccggtcaggtcatagtggtaacgttgcgtccgcccgtcaaagccgcgctgctgtaccagccggtcaagcgcatcgtaggtaaactcactccggctgccgttctcgttggtcagcgtggtgatgcgtccggcaaggtcgtattccatactgcgcgtcagcccgccctgcgtggtgctgaccgcctttccccacgcatcgtactgtgtctcgctccggttgccgtccggggtgataacggcagtcaggtcgcctgcggcgttgtactcataccgcgtttcatggccctgtgcgtctttcaccgagattaaccggccacggttgtcatagcggcggtaaaggctgatgccttcctcgcggtggaccgccgtcatctagccgaagcggtcgtattcatagcgggtctggtagcccgagcagtcggtgaacgccagcaactgaccgtagcggctccaggtcatctgccgggtgctgcccgtcgcatctgttgtcgtcgccggtaactcactgtacgcatcatcgtagcggtagcgtactgtctccccgctgcgcgatgtctccgataccagcctgcccggttcatcatatgcccggcggctctccagcccgtccggggacaccaccgccgtcagctggttcccgtcgttatagtaaaatttcgtctcccgcccgtccggtgtggtgatgtccgtgatatcgccggataccacattcagaccatactctgtccgccgtcccgccgcgtccgtctgcgccgttagccttcctgccgcgtcatacccgctgtgcgtgacgctgccgtccgccagttcttttttcaccacccgcttcagcccggccccgccttctgtatgcagcacctcacgccggttcaggctgtccgtgacggtgatgcggtcctgctcatactggtagcggtaactcaggcctgccgggttcagttgctccaccacccgccccgcatcgtcgtagcggtagcgcatctccggccttcccgcataacggtgccccaccatccggcccgggtgctgcgcgtcatacgtgaaagcgcgcacctgcgtattgctgcggtcatataccgccagcagttcaccggcttccgtatacgtgtaccgcaccagtggcgcagcgggcaggctctccgggtatgccgggtcgtgcgtcagccacaccgccgaaaggcggatacctctgtcgggaccgtattcggtaccgggcagtgtgtcggggaacgctgagtctgaaagagggcggggggtgtcaggggaagataaagaagcggtgtgctgtttacgggcctcttccgcccgctgcgcctgcgtggtcagcaccagacggaactcccgcccggcaccgtccgtcacgccggtgatttccccggccaggtcaccggcggcctcacgcctgtacgtcagcgtccgcccgaagcggtccgccatcccggtaagcacccggtacggcggcagnnncgctggcagtacgtcctcagcacccggcacccgctctgaccaccccagtatccaccacggcccctgtgcgctgttggtcgccaggtaaagatgcggnnttaaccggatatccggcggcagcgccccccacagccg

SEQ ID NO: 445 - DNA, 361 bp, Escherichia coli
  Strain O55:H7
ccgtccggctgcgctgccttaccaccgcgcaccagccacattgactcgctgcggctgtacaccgcctcccccggcagcagcggctcaaagtgaatgctccgcccgccgttgtcgttgagtaccagtgcatcatcgcgtagctgtaagcggatatcagaaggcgctttccagccggggccaaaaatccccaccggcgcaggcgtccgggtccggtagctgctgtaggtgcgggagagaatgaacggcagcgggccgggcagcgcaaggtccgtctcgccgggcagcaccttcgcccccagcagcggatttaccgggttgcccgaagtcatcccgcccgggcacaccgagcacgccacgccag

SEQ ID NO: 446 - DNA, 1958 bp, Escherichia coli
  Strain O55:H7
  modified_base (973)..(973): a, c, g or t
  modified_base (1236)..(1236): a, c, g or t
caattcttacacctgccgaaccctggacaataggaccgccatactgagtcatatctccctgacgcgccgctggttttccgctcatgattcaattccttcttctgtttatttttaatgcttgtttgttactgaataccgaacaggtacgggatcagtactctctcatatccggcgtatcctgcttttcatcaggggtcttcggtggggatttcgaggctgcacagttccagttaatcaacagtgagtcaccattaacctgctccttaccctgcaaatgaatttttgtgccgttgagaaaaatttgtccgtccttcgtcagcaccagccttgccttaccacagcagagctccagatgctcaccggcggagtaaatcgcggtctgcccggtatcatcctttttcgttttaccaacggtgaaggtaacgttatttccgactttgacgtcataacccagcccgaccctcaacgatttatgcaaaccgatctgcgaggactgcatcagagccaccgaagtgttcataatgccacctaccgtcgtctggtacgccacgcccacggtcagcgcacgaacaagtccaatcgtttccacctgaacagaacccacgttaatgatctggttactgcccaccgtctctatctggttaacgcccaccgtctgtatctgattgttggtaaccgcaatcatctgattgttgccaatggtctcagcatggttgtttatcacatccgtggtgcggttattcagcacctcggtgttcatgttcttctgcgcgtggatgtagacctgttctttccctgtcgcatcgtcaaacttcagttcattaaacccgctgcccttataggttttcgaacgaatggtcatctgcgtcttcgtccccggcaggctgccgggtgtgcggttttcctggtggtaggtacgccccataataatcggctggtccggatcgccgttgaggaagtccacaatcacctnctgacccacacgcggtatcgccaggttgccaaagccggtgcctgcccacgcctgtgccacacggatccagcatgaactgtcctggtttgacgggttatagcggtcccagttaaatttcacccgcacgcgaccatgttcgtcgcagaagatttcctcgcctgccggtcccgtcacgacggcgctctgcgggccatccaccagcggtttcagcaacggctgtggtcgccatgtccggtctgccggtattaccgcaaagtggttantcagcgtggtacctgaacccctgcgtcccggcaccgcctgtggctgctcgccgtgcagttcacttgccaccacctgccattcccggttcaggttcgcctgcggatgccccgtcagcacaattcgccgtcccggccatatttccggagaacggcttgttccgcgcgccacttctgcgttgttgcgccagccatccatctgccagcgggcaaagttctgcccgtgggcacccttgaaacgtccggggtagtcatacacttcatactgtgtgcgctggtaatcctggtactggccttcctgatcaaaacgccctgcccagccgggtcgtttaaaggtgtagtccttggtcaccacggaagaagggcggatttgtgcgctgtagcggaactggctgatgcatagggtgctcacctcggtacgggtgttcgggttccaggggatctcaaaggactccggcagataacgcacggtgtcgcacaggaccaggctctggtcgatacttttttgcgcgtgctcctcataaaagaagatgccttcctccgccgccatccggcacaggaaatcgtaatcagtttcgccgtactggacacaaaactcacgggaaggatgcggctcgctgaacagcggactccactcggtcacaccgttttctttcaggatcgtagcgagtatgctttcgatgtcctcattctggaagatacggaagttctggcgcagccctgtg

SEQ ID NO: 447 - DNA, 743 bp, Escherichia coli
  Strain O55:H7
  modified_base (2)..(3): a, c, g or t
  modified_base (9)..(10): a, c, g or t
gnnacaccnncatgctgtacagcatctggtttttgtcgttctcccccagttcaaaccaggtcaccacacctttcacccggcgctgtacgtcatcgccctgccataccgtcaggtaggccattttgtccagcacctgcgcaaattcaagggaaagaaactgctgactgaccagagaaaggtcgagggaaaaaagtgaagagagtgactggttcagatgaaaggagaccaccgcaaacgcgtccggtggcaggccgtccacttccagcgtgaaacgtaatccggttgacatagcaacctccgtgaaaatgaataataatccgcacatattgcatgtacaacatgtcgggcggatgaaataagtgagtcgacatctggcgttaccggggaatatcagaaaaatgtcatggttatgtgatgatttagtctgggattttacttcagagaaacgggtgtctgtttagtcaacaaaataatcacaaacgcaacggatgggttctcgacgttattcacgacaggctcgtacattacagcgagtaataaaaaacctgatatgcaaagtcaaaccaatattcataatgtctttttattcacaacaataaataatttaataacaatcattgaaatgaatgatgatttgtataaggaatatacgctaccgccccaccctgataacatgatctgcacattgccatcttaacgtcgttaaacactggcttaatagtggatatttcaaattaggaatt

SEQ ID NO: 448 - DNA, 2792 bp, Escherichia coli
  Strain O55:H7
attcacctgatgaatatcataagcaaatagcatagaaaataatgacaactcccccgaggggaccatttccaaagcactgcaccaccacctggtgcccggatgatcttgcttcagtggtaagagtacctgattcattgttcccaaaatggtgttttcccctgcccctccaataatgtgcagctctcacgtgataatctattgattaggttatattaagaatcaatatttaaaatacatccattttcttgaataaatcaacatgtttattaatcaattgctgttttagctctgactcatcaagctctccatatttgtcctacagataattgcgaataaatacagagaacgccatttatccttttagcatacctgccggatatttttatttgtattaatattaattgcatctccaactccgagcatatccatcattaaaaacattttgagattatagaatacctgtgataacaagtgaaacatctgcacaatgtgaatagttagtttcttttcagaggaaatgaaatagacaagctgaatgaaagggagtgtgatataaattaaaaaacataacatgaatctaattaattacgcacatcattgtggataaagttactgaataataaataacataatcttctggtatcccactcaaataatttcattcctttttagtatttcttgtaacgttggtaactgacatactgcatcagcaatcgcactgatattcgtggcattatcctgaaaccattcatgcccaggcccccatgtgcgcatagtgcaaagataacagtccaccagcgttagttgctcaccaaacgcataaggttcagcggtcaattgtgaattcagccagacataaagcgatttacgatattcaataacattcttctttaactgttcaggtgcgtcagatgcccaacgctcagggtaatcggcgaaagtgaacgttggatagacattagcaaccagccagaccaataaccgttgaaactgctgacgttcggcacgcccaaccggtggcgcaaggtccgggcgacgatcgagaaccatcaatgcaatcgccgctgtctccgtcataatctcgtcattttccagtgccagtgtcggaacctgacacaacgggttcagggttttcaataactcgcgtgaagttccctcgtggtcaaaaccactgacatcaacgaactgataaggaatatcagccagtgttagcatcagctcactgattgtagagccccatccgggtacgccatacaccttaatcatatgcccctcacaatcttttaaagattaaatgtaggacagtacacaggttaaccagcaaaaggatttgtcattttttcgtcagttgtattaatccccttcaggattgtaaggggatgttttgcatcgtttatcgataacgggtaggatgctgcgccgatagttttatacccataaagaataatggtgataactatcatcgccaggatgaataaacattgttcatggcaacttatatgactttttcattaaagcaatcagggagagcaatgagtaaacacgacaccgacacttcagatcaacacgccgcgaaacgccgctggcttaatgcccacgaagaggggtatcacaaagcgatgggcaatcgccaggtacagatgatcgccattggcggcgcgattggcaccggcttgtttttaggtgcaggagcccgactgcaaatggcgggtccagcactggcactggtttatttaatttgtggcttgttttcgttttttattctgcgtgcattgggtgagctggtgctacaccgcccttccagtggcagttttgtctcttatgcccgtgagtttttgggtgagaaagccgcttatgttgctggctggatgtacttcatcaactgggcgatgacggggattgttgatattaccgccgtcgctctgtatatgcattactggggtgcgtttggcggcgtgccgcagtgggtctttgcgctcgctgcacttaccatcgttggcaccatgaatatgatcggtgtgaaatggtttgcggagatggagttctggtttgcgcttattaaagtgctcgccattgtgacctttttggtcgtgggtacggtgttcctcggtagtggtcagccgctggatggcaacaccactggctttcatttaatcaccgataatggcggcttcttcccccacggtttgctgcctgcgctggtgttgattcagggcgtagtgtttgcttttgcctccattgaaatggtgggtacagctgccggagaatgtaaagatccgcagaccatggtgcctaaagcgattaacagtgtgatttggcgtattggcctgttttacgtcggctccgtagtgttgctggttatgttattgccgtggagcgcgtatcaggcggggcaaagtccgttcgtgacgtttttctctaaactgggtgtgccatatatcggcagcattatgaacattgtggtgctgaccgctgccctctccagcctgaattcaggtctgtactgcaccggacgtattctgcgctcaatggcgatgggcggttccgcaccgagttttatggcgaaaatgagtcgtcagcatgtgccgtatgccgggattctggcgacactggttgtgtatgtcgtcggcgtattcctcaactatctggtgccgtcgcgcgtatttgagattgtgttgaacttcgcgtcgctgggaatcatcgcttcatgggcgtttatcatcgtgtgccagatgcgcctgcgtaaagcgattaaagaaggcaaagcagcggatgtcagttttaaactgcct

SEQ ID NO: 449 - DNA, 2810 bp, Escherichia coli
  Strain O55:H7
  modified_base (259)..(262): a, c, g or t
  modified_base (1990)..(1990): a, c, g or t
  modified_base (2446)..(2446): a, c, g or t
gcccttcacttcctggctgacattactgtttttactgagtgtccttgtgctgatggcgttcgattacccgaacgggacttatactatcgcggcgctgccgattatcggtattctgctggttataggctggtttggtgtgcgcaaacgcgttgctgaaattcacagcactgcgccagtcgtcgaggaagatgaagaaaaacaggaaattgtgtttaagcctgaaacggcgagctaattgcaaaattgcccggctacgtgnnnngcaaatttagattactgacgaaggtgtgccgcatgcggcgtgatcaaagtcaggcaagtctctccgttatcaccctcgccatatctattacagcgcaatacgaatcacatcgtctggctgggtagcttcctgctgtttagtggatttttgtttcacactgacatacagcgttttgccatcggcagacagcgccaggctgttcggatgagtcggcgtatcgaacgttttcaccactttatagcttttcgcgtcaatcacactgactttacctgcctgacgatgcgttacgtaggcttcattacgcgctgggttaaacagcacagccagtgattccggtgccgcaaccttcgccagaatattgccattacgggtatcgaccactaacacttctgccgctttagaatcggtgataaatgcacgctgcctggcggtatcaaggctgatgttgataaagaagtgctctttgccgtcatccagcagctttttacggctgaggattttattgtcggcggtgtcgatggtaatcaattcgccgtcagcgttagtggtgtaaagacgtttgcctttgctatccagtgccagaccggtactcattttaccggtgttctggatggcggttttcagtttgatattctcgccatcaacgacccaaatcacgctatctttaccaataccactgatgtaaacggtgttcgtggcatcatcagctaccagctcacgcggttgcagcgggcgcacctcttccgtgcgcttacgatcatccagcaccagacggcctttcacctcgccagttttggcatctatcgccgtgaccgcgctgtttacggtgttaccaaaccacaacgtctgagtcgtgttattgatggtggcaccaaacggcttgagatcgttatggatcgcctgcgtcacttccagagtgaccggatcaagacgataaaccacgccgcctttatccagtttgcggctttgcgaagtggcgagccacagcgcgttttcttgctggctataagccatttcgtaggcacctttacctaccgctttacgcagcatttcttctgcggcctgcgtactgaatgatgaagcaacaagcaatgaacctaacagtaatgaaccacgcaggcgcaatgaaaacagatgacgtaaatgcatgacgactccctttgatgaaccgatatttttgctgcttcacaatgcttcgctaagcgtaatcatcgttacgctcttgttataaatgggaatggtaatcattatttactcaaatgtggagcatttcttgccgttacgactacaattctctcaattaattaacgtatcgtgccgtttcgttttccataaatttacaatttcattaccatgacggtgttttcccattcttaacctggcttttttcatgaagattgttttcgttcgacagaccgttttgcccgccctgcttgtcctttcccccgttgtttttgccgctgatgaacagaccatgattgtcagtgccgcgccgcaggtggtttcagaactggatacccctgcagcagtaagcgtggtggatggcgaggagatgcgcctggcaacaccgcgcattaacttgtccgaatcactgaccggcgtgcctggtttgcaggtacaaaaccggcagaactatgcgcaagatttacagctgtcgattcgtggatttggctcccgctccacttacggaattcgcggtattcgcctgtatgtggacggtattcccgntaccatgcccgacgggcaagggcaaacatccaacatcgatttaagcagtgtgcaaaatgtggaagtgctgcgtggccccttctctgccctgtatggcaacgcgtctggcggtgtaatgaatgtcaccacccagaccgggcaacagccaccaaccattgaagccagtagttactacggcagttttggcagctggcgctatgggctgaaagcaacgggcgcaacgggagacggcacacagcctggcgatgttgattacaccgtctcaaccacgcgttttacgacccacggctatcgtgaccatagtggcgcacagaaaaatttagctaatgccaaactgggcgtacgcattgatgacgccagcaaattaagcctgattttcaatagcgtggatatcaaagcagatgacccaggtgggctaaccaaagcagaatggaaagcgaatccgcaacaagcgcntcgtgcagaacagtacgacacgcgaaaaaccatcaagcaaactcaggctgggttgcgctatgaacgtagcctgagttcgcgggatgatatgagtgtgatgatgtatgccggagagcgagaaacgacccagtaccagtcaatacccatggcaccacaacttaacccgtcacatgcgggcagcgtgattaccctgcaacgccattaccagggaatagacagccgctggacacaccgtggtgaactgggcgttccggtcacgttcactaccggcctgaactacgaaaacatgagtgaaaaccgcaagggctacaataacttccgcctgaatagcggcatgccggagtacgggcaaaaaggtgagttg

SEQ ID NO: 450 - DNA, 6911 bp, Escherichia coli
  Strain O55:H7
  modified_base (6374)..(6374): a, c, g or t
  modified_base (6378)..(6380): a, c, g or t
acgcaatctgatgtggaacatcgatccctatttacagacgcagtggcagctgagcgaaaaactgtcgctggatgctggcgtgcgctacagctccgtgtggtttgattccaacgaccattacgttactccgggtaacggcgatgacagcggtgatgccagttatcacaaatggctaccagccggatcgttaaaatatgcaatgaccgatgcctggaatatctatctggcagccgggcgtggttttgaaacgccgacgattaatgagctgtcttatcgcgctgatgggcaaagcggtatgaactttggtttaaaaccatccaccaacgatacaattgagatcggcagtaaaacgcgtattggtgatgggctgcttagtctcgcattgttccagaccgacaccgatgatgaaattgttgtcgatagcagtagcggtgggcgtacgacttacaaaaatgctggaaagacccgtcgtcaaggcgctgaactggcatgggatcaacgtttcgcgggagattttcgcgtaaacgcgtcctggacctggcttgatgcgacctatcgcagcaatgtttgcaacgaacaggattgtaacggtaatcggatgccagggatcgcccgtaatatgggctttgcgtcgataggttatgtaccggaagatggttggtatgcaggcatggaagcgcgttatatgggcgatattatggcagatgatgaaaatacggccaaagcgccgtcttatactctcgtcggcttattcaccgggtataaatacaattaccacaatttaactgtggatttgtttggtcgtgtcgataatttattcgataaagaatacgttggttctgtcattgtcaatgagtcaaacgggcgatattacgaacctgcgcccgggcgaaattatggtgtcggcgtgaatatcgcatggcgatttgagtaattaccttgatgcccggtatttgccgggcatttactttaacgattgtattgctggtataaaatagcaatattttgttgcataatttcagcaagacaatgtctgcatccctctttgtcttttgcttttaacgcagcgagtaacagatgatagttttctatatgctcccgtaattccgctggattaatcgcttcatagagataatgtaaaccaggtcccatcctgacccacagttgctcaatcatctcacacaggatgggcatatttgagcgatgataaatcgctaagcgaaatagcctgtttacattaatgatttgttccatgtcgcccttttcttgcgcctgctgtaatttctcgagcaattcctggagttccgccaggtcttgcggggtgaggttttcaacagccagagcaactgccattaattccagttcgtagcggatccgattgatttcgtctaattgacgtttccccacttccggaactgtaaatgcttgcgctggtgcgacagaaagcgcattcaccgaaaccagacgtaataatgcttcacgcacaggtgtaatactcatacctaattgctccgccagatttttagtaatcaggcgtgcgccaggttttagtgcgccaatactaagctgatgtttcaggtcgttctcaacctgcagagtcaaactgacatgtttcattttttccgttccaggcattttaattccttcgcgtgttttctgtccaaccctgcctgcatggcagaaggaattcacctggtgtattaaagtgaataatcataaaccactcacctttgttgttattagcagcagaacaatgatgtggttagttaattaaagctgaaaataagctttttgcctggatttttatggcggcttacgccgccgttgaaactttaatcatcacccgccacgcggatcaccactttgccgaagtttttacccttcagcaggccgataaacgtctgtggcgcattctctaaaccgtcagtaatttcttcgcggtagtggattttatcctctttcacccattgccccatctccctctgaaactcatggatgcggtgaccataatcctgagcgataataaaaccttgcaagcgaatacgttttttcagcactgtagccatcaacagaggtaaacgatccggaccgggtggtagctctgtagcgttatagctgctcactaatccgcagacgggaatgcgcgcagatgtattaagtaacggtagcaccgcatcgaataccttaccgcccacgttttcataatagatatcaataccttttgggcacgctttcgccagttgttcggcaaaatcatccgcgtggtgatcaagacaaacatcgaagcctaacacctcggtagcatggcggcatttttccgcgccaccggctacccccaccactctgcaacctttaagtttgccgatttgccccaccgtcgcccccactggtcctgtcgccgcagctaccaccaacgtttcgccctctttaggctgaccgatatccagtaggcccatataagcggtaaagcctggcatccctagcacacccagcgaccacgatggattttgcggatgatcgccaagtttcaccagatcatcaccactggatatgtcatagtcttgccatccactgtagcccagcacccagtcgccagactgataatcaggatgattcgactccacgacacggctcaccgtaccgccgaccatcacgccgccaatatcaaccggcggtgaataagatggctcatcgctcatacgtccacgcatatacgggtccagggacaaataaactgtgcgcagtaacacctgtccttcacccggtgtggcgacatcatcttcttcaagacggaaattctccggaaccggtgcgccatgtggacgcgaggccagaacccaacgtcgattacgctgcttttgttgccccataatgctctcctgtgcttttggcatgaatccatcaatagtagcaggctcgcaggattggttttgtttgcagccgtcaccccccctctgcaacacgcaataatttcatcgaggaatccgttgcttcgggctgttttcgatagtattgataacatcatcatcattattttattgaggccagacatgtccatccgttttgcccgcaaagccgactgtgctgccattgcggaaatttataaccacgccgtgttgtatacggcggctatctggaatgaccaaacggtggatgcagataaccgcattgcctggtttgaagcgcggaccatagcaggttatccggtgctggtaagtgaagaagatggcgtagtgacgggatatgcctcatttggcgactggcgtagtttcgatggttttcgccataccgtggaacattcggtttatgtccatcccgatcatcagggcaaaggtctggggcgtaaattgttaagccgattgattgatgaagcgcgagattgcgggaagcatgtcatggtcgccgggatcgaatcgcaaaatcaggcctcgctgcatctgcaccagtcgctgggatttgtcgtcaccgcacaaatgccgcaggtgggcactaaatttgggcgctggctggatctgacatttatgcagttgcaactcgacgaacgcactgaaccggacgcgattggatgaatcagtcgctcacccttgcctttttgattgccgccggaattggtctggtagtccagaacacgctgatggtgcgcatcacccagacctcctctaccattctcatcgccatgttgctgaactcactggtggggattgtgctctttgtttctattttatggtttaaacaaggtatggcggggtttggcgaactggtgtccagcgtgcgctggtggacacttatacctggcttgctgggatcgttttttgtcttcgccagtatcagcggatatcagaatgtgggagcggcgacaactattgcagtactggtcgccagccagctgattggcggtctggttctggatatcttccgcagtcatggcgtaccactacgggcgttgttcggcccaatttgtggcgcaattttacttgtggttggcgcctggttggtagccagacgctcattttaatcacaggatggtgccgcctttggttaactgttcatggcgcgcttccatatcttctttatgcttgcgaccgtgatgagcaatagcggtgcgcaaacgctgctgctgggtgtagcgatcttcccgacttaactccgcgtcatcgctcagggcgattaataattcgttcatatgggcaatgacgctctcttcaatcgcggcatccacgcgcgcgatgacttcatccagatgcgacatactttctccttagccacttgtgaaatttatcgattcatccaaatgatataagtctgcgtggtgccgtcaagccagtgagtaagatttaaaacagtgaaaacaacagcgccaccgggaaactcatcggccatgttgcccccaccagaaaggcgcttaagaaacggatgcgtttcttatcgtgagaaagaaaccaagtgataagaaatgcgattgctgccataaccgcataaaaaacaagcatgtgttgatagagagacatgtacgggcgtccagccagatgaataaaacgcgcgcaaatatgcgtcattttttgacgtgcatcaagttttttaaccggtttgagaaaaaaacatcaaacagcaacttgcccttatccatcttcagaatgagtattattgcggattttcttaacccgtactatacacataggggcaatgataaaaggtggcaaaaatgaatgtttccagtagaactgtagtactgataaatgtctttgctgctgttggtttgtttactcttatctctatgagatttggctggtttatttgatgtagtgattttgcacgcagcacgtactgtcagagaaatcagtgctctgacagtacgcaagatcatctcatactcttacgatctgcaatattatccttaatgtttaaccatgacgtggcggacgacggtgtaatcctccagcccataaagtgacatatccttgccgtaaccagaaagtttctgcccaccgtgcggcatttcacttaccagcatgaaatgggtattgacccaggtacaaccatattgcagccgtgcactgacgcgatgcgccctgcccacatctttcgtccataccgaagatgcaagtccgtactggctgtcattcgcccagtttaccacctgttcttcgttgtcgaagagcgtaacactcactactggaccaaatacctctttttgcacgatggcatcgtcctgtaatgcgccagccagcagcgtcggcgcatagtaatagccattacccttgcgcttttcaccgccagtgatcactttgatgtgccctgtcgctttcgcctcttctactgccttgctgacgcgttcgagatgcgccagcgagcttaaaggtccaagctccgtagactcgtcatccggcgcaccagattttaacgttgccactgcagcaccgagtttttccaccagcgtatcgtaaatgcctttttgcgcgtagatccgacaagccgcagtacaatcctgtccggcattgtaatagccaaatgtacgtacaccttcgaccactgcttcaatatccgcatcatcaaaaacaatcactggcgctttgccaccaagttccatatgagtacgcttaatggagggcgcggtatggctgatgatgtgctcgccggtggcgatagagcccgtcagcgacaccatccgcactttgggatgaccggtcagcggatcgcccaccgttttgcctctgccaaacagtacgttaatcacgcctgccgggaagatatctttcgccagctctgccaacttcaacgcggtcagcggggtaatttctgatggtttaagcactacgcagttccctgccgccagcgccggagccagtttccacgctgccatcatcagcggataattccacggtgcgatagaagccacgacccccaacggatcgcgacggatcatcgaagtatgaccttcaagatattcacctgccgccagaccattcagacagcgcgccgcacccgcgaaaaagcgaaaaacatcgacaatcgccgggatttcatcattgaacgcactatgcagcggtttgccacaattacgggactccagttcggcaaaaacctgaccattttcttcgataacatcagccagtttcagcagacattccgcacgcactttcggcgtggtttgcccccattcggcaaatgctgcatctgccgcgcgcacagcagcatcgacctgctctgcggatgcctcggcaatctccagtaaaacgtcccccgttgccggattatagacaggctgtttttccccttcgccgctaaccagttctccgttaatcagtaacttatgttgcatagcatattcctgtatcagtggttattgaccattgtcgccttcgcgggttagcccncagnnncccaggatcggcaaggttgttaccaacataaccagcagtgccaccacgttagttaccggtacatcacgcggtcgcccaagctgattgagcaaccacaacggtaacgttcgttcatgacctgccgtaaaggtcgtaacgatgatttcatcgaacgacaaggcaaacgccagcattcctcctgccagtaacgccgaactgagattcggcaacactacgtagcggaaggtttgccagccattggccccaagatccattgacgcctcaaccagactccatgaggtgcggcgaaaacgggcgatgacattgttaaacaccacaactacacaaaaagtcgcatgaccgaccacgatggtgaaaaatcccggctccagattgatggttttaaaggcggttaataacgccagaccagtgacaatgcccggcagcgcaatgggcagcagcagtaacagcgaaatggcgtttttgccgaaaaagtctcgtcgccacagcgcggcagctgccagcgtccctaacaccagcgccattaatgtc

SEQ ID NO: 451 - DNA, 8220 bp, Escherichia coli
  Strain O55:H7
  modified_base (1481)..(1481): a, c, g or t
  modified_base (3882)..(3882): a, c, g or t
  modified_base (5090)..(5090): a, c, g or t
  modified_base (5595)..(5595): a, c, g or t
  modified_base (5895)..(5895): a, c, g or t
  modified_base (5918)..(5918): a, c, g or t
  modified_base (5921)..(5921): a, c, g or t
actttaagtgacagtgtcacggcatcaagaatatcactacgctgtgctgccacgctaaaccagcgcagcgtcaggccctgcggtggaaaactaaacgccgcatcttcagtgttaaacgcataggcggcgattatcaggatgggaaaatgtaggaaaacaacgccgccccaggccgccagtttgaggaaaaacggtgcgcgttcagagtgcatcaaacgctcccagacgtttcacgaacgccaggtacagtgcgataagaacaatcggcaccagggtgaatgccgccgccatcggcatattgccaatcgccccctgctgggaataaaccatattgccgataaaatatcctggcgggccaaccagctgcgggacgataaaatcgcccagtgtgagtgagaaggtaaagatagagccagcggcaatacccgggatcgccagcggcaacaccacatagcgaaaggtttgtcgtggacgtgcgccgagatcagctgacgcctgcaacaatgacggcggcaaacgctcaagcgccgcctgcacgggcaggatcatgaacggcagccagatatagagaaacaccagaaagcgccccagcccggaagttgacagcgtattgccgcccaccgcaggtaatgtaaggaacgctgtcagcagtggttccagcccaagatgttgtaaaaaccactgagccacgccatcttttgccagcaataacgtccaggcataggctttaacaatgtagctcgcccacatcggcaacattaccgcaatataaaaaaacgctttcattttcccgctggtatagcgcgccatataccacgccattggaaaagccagaatggcgctggcgatagtgactgccacagccatagtcagcgtgcggagaatgatgtcgtaattcgccggattaaacagcgcacggatgttcgccagcgtcagttccggcgttaccgacatggtgaaatcgtcaaaggtataaaagccctgccataacagcgttagcagcgagccgaaatagacaatgccaaaccacattagcgggccaagcagcagcaaaaacagccccagccccggattccgccagaagaaaccggacaccttacccagacctggacgtgaaggtgattgcaatacgttcatcgccattcacctctcctcaaccagcggcaccatcacatcacgcgaccaggaaaccatcacctgttgtccgggcgtgagcgtggcaggcagttcttcgcctgtcatattggcctgactcaccagcagtttttcaccgccgttcaatttcagttcaaaacgagttgccgcgccctgatattgcaccgcctggatcgtgccattggcctgcagttcaccaggggtgttgaggcggatatgttccggccgcagggcgaagcttcccgtcatgccacaaagtttctctgccatcagtccatcaaaaacattcgatgtaccaacgaacccggcaacaaacggcgtgcgcnggcgcatatagagatcgcgcggggaatcgacctgctcaatgcgtccattattgaaaaccgccacacgatcggacatcgataacgcttcgccctgatcgtgggtaacgcagataaaagtgataccgagagactgttgcagttttttcagctcaagctgcatctgctcacgcaatttgagatccagtgcgccgagcggttcatccaacagcaatacgcgcggttcattcaccaatgctctggcgatagcaacccgctggcgctgaccaccagaaagttgtgacggtttacgttgctgtacaaaccccaacgccactttctccagcgcctcttgcgccattgcgtgccgctgctttttattcacgcctttgaccatcagcccataggcgacattgtcaagaatcgacatatgcggaaatagcgcgtagtcctgaaagacagtattcacgtcccgctcccacggtggcagattgctggcgggtttaccaaagatagagatagccccgccggaaagctgttcgaagccagcaatcaggcgcaggcaggtggttttgccggagccggacggccccagcatagagaagaactcaccatcttttatcgcaatactgacgccatctactgcgcgcacgtcaccgtacaaccgcgagacgttgtcaaactccactgcgtacgtcataaagcaccccagcgaagttagcgaccgcccataatggcaatgtaatcctgcgtccagcgactgtagggaacaaacttgcccccttctgctataggcgttttccagaaggctattttatcgaaatagttaaaaccgtttgtttcacaacctttctcgcctaataacgaactggctttacacccttccggcacgactggtaacgagccaaaccaggccgccacatcgccctgcacttttggcgttaatgaccagttcatccatttgtaggcgcaaaccggatgtttcgcttcgctatgtagcatggtggtgtcagcccaaccggtaacgccctccttcgggaaaacggtagcgacaggctgaccttcggctttcagggcgttggtctgatagggccaggcactggaagcgaccacaccctcgtttttgaaatcgctcatttgcacggtagtgtcatgccagtagcgatggatcaaactatgttgatcacgcagcactttcagcaccgcctggtactgttcttcggtgagttgatacggatcgctgatgcccaactgcggctgagtggctttaacgaacaacgcagcgtccgcaatgtagatagggccatcataagcctgaacgcggcctttattgctcttgccgtcctgcagattttgctcaacaaaaaccacttgccagctatccggcggcgtcgggaaggttttagtgttgtacatcagcaggttcggcccccattggtaaggtgtgccgtaaactttgccgccaacgttaaaccagtcgcctttaaccacgcgcggatcaagcgttttccagttgggaatcaaggcggtattaatcggctgcacgcgtttacccataatcaaacgcagcgaggcatcgccggatgccgtaaccagatcgtaaccccctttggtcatcagactgaccatctcatcggaagtcgcggcggttttaacattcaccgcgcagcctgtctctttttcgaattgcgttacccagtcgtattgtttatcagtttgtccgcgttcgatatatcccggccaggcgataatatccagtcgcccttccggtttatctaaattggtaggcggttcggcggcgtgagcggtcattattgtcatgctgagcgcacacaggctgctgcgggcaaatgtcttgctcataaggtcttactcctgtcgtaattaattgttcagccgccgtgccgtaaaaatatctccttgtttaaccatagacggcggcttgcaggcacaccttcgcccctgagaaaatttaatcaggttgtgagctaccgcgcattatgccgtctgtaaggttatcttctggagtatagacaaggagttaggaaatatgactgctattcgaaattcatattacccaatctaagaggaattaaattaaacgctattacagccgttcttgaataagtttgcctaattgttttaccgcctgttcttcacgttctccccacagccacgcggtattaaaacgaaaaaaacgtgaccagttttcaccggtagaaaacattttacctggcgcaatactgatatgatgcgtcagtgccgccaggctcaattcgccggcatctaacggctcggggagctccagccagagaaaataaccgctgtcattatgatgaattttcacttccgcaggcagataacgcagcagtgcctgccaggcacgttgtttacgttccgcaagctggcgacgcaggcgacgaanatgggcgtcgtatcggcgcgtggaaaggtaatccaccagcgcaagctgcatcggtgagctggtggaaagcgtactcatcagctgcaagcgttgaattttacgtgcatgttttccggcggcgacccaaccaatacgaaaaccaggcaccagacatttcgaaaacgaagagcaatgcaaaacgccatcgtggcgatcccacgctttcgcaggcagcggtttttcccgtccaaaataaagttcgctgtaaacgtcatcttcaatcagcgttacgttgtactgattgagcaacgccaccagttgtgcttttttttgcggcgttaaggtaaatccgagtggattctggctattagtcatcagccagcacgctttcaccggatactcctgcaacgccagttccagcgcctgaagatcgatcccttctttaacatccgtcgccaccgataacgccttcagccgtagccgctccagcgcctgcaacgcaccgtagaaacaaggattctctactatcacccaatcgcccggttcagttaccgcttgcaaactgaggtttaatgcctctaacgccccggcagtgatgacaatttcatcaggagaaatggtgatcccctgtaaggcatagcgacgggcaatagcctgacgcagttctgcgtttcctggcggcaagttttcaatcacgctcatcgccgtggcggttttgcttacctgcgccagcgagcggtttagttgttggagggggaaaagtcgcgggtcgggaaaggccgaggcaaacggaacgaccgacggatcgcgactggcctgcaacatatcaaaaatataagtgttgatatcgactgcttcatctcgagtgactggaatgactggcactttcggcatttttattgcctgtggcgcaacgtaataacccgactgcggtcgtgcgataatatatccctgactttcgagcaactgataggcatggctgacagtcataaagctcatgccagaaagcgccacctggtcacgcaacgaaggtaaacgatcgccgggttgccagatacccgacgcaatctgctcgcgtaattgttctgcaagctgctggtattttttcattatcgaatcgtaattatgtgcagatgattcggcagtctatatcagttgttaaaaatgacaacttttcgttaactgtaattaaaccatcaccagcgataactctttgccaagcgcctttnccgcgagctggactgcgtcgatttttgtcgcatgatgcaagttaaataggcgagtaatctcttgtttaggtttgccaattcgcctggctaactcttgctgagtgatttctgactgtaaaaaagcatttaacagcaataccttagaggcgacgctcaaaggtacttcaataaagtgatcatgactatttaatggcgaaggtaaagggataagctcgttatcttcaaaataaaaatcaaatgcggtcagtaaagcatcttttgccgcttccatcgcttcagcgacagtttcgccctgcgtcaacgcttcagggatatccacaaaagaaaccatataaccgccttccggcgcgggtgtaagagtgacgggataacgcataatttcgactgtctctcgcatgtcattaacctttttaattggcgattaactcaaaccgagttgtttcaggattgctttacgcaatggttctttaatctcatcgcaggggtgacgcggcatgacactgcncctcccatgaaacctgagtttcaaatggttgctgccattcgctacatcgacgccctgagattcgagccaacgtctgaactcgctttgtttcacatcgcctccctgcggctgagtatatcaacaaagtaaacattagtgtttacctccgtgtgtaatttgctcgaaaatagcactaaatcgccgcaacggcagaatgcaatgcaaaatcaggaaggaagattccagaatttctttgcgctaatttgcaaaactgaataataacctcaagaaacgatcggcatcatagcggcaaaaggtaanaaaaaggtggcaggatgtttacnaangcgttatcggttgtcttattaacgtgtgcgctgttctcaggacaactcatggcagggcacaaaggacatgaatttgtgtgggtaaagaatgtggatcatcagctgcgtcatgaagcggacagcgatgaattgcgtgctgtggcggaagagtcggcggaaggtttgcgcgagcatttttactggcaaaaatcgcgcaaaccagaagcgggacaacgttgagtcgtttgatgccggatgcggcgtaacgccttacccggcaggcaatatcatgcagattcaataagttgtgagtaaccagaaaactggcgttttacccttttcgcttcggcaatgttttcagcagctcatccggacttacggatgccactacgcttcccggtaacggcattttcagtatgtgatttttgattttgccaatgacgtgcatctcgcatgggcggcaatcaaactttagcgttaatacttcatcgccgttaaccagttgcattggcgtcgccttccagcttttgatattgcctttcgcctgtttcgggcacagattaaaggcaaagcgcagacaatgcttggtgatcatcaccgggacttcgcccttctcttcatgtgcctcatacgccgcgtcaatcagctgcacaccatagcgatgataaaattcacgcgctttctggttgtaaacgttcgcgaggaaactcagatgtgtttgcggataaaccggcgcaggatcagcaaccggtttacggctgccgcgctggtaactggcaagacgcgcagcatccagcatgtcggcagcttcacggcggaactggtttaacagactgtttggtacaaacagcgcccccggcaaattaatttgcacatcgcgggcgtaatagagggtttgccccagttttgccagaccatccttcagattgttcattgctttttctgcgttattggcttcgtcgaactgcccatccagcgtatgcgttatgctgaccccctcttcactggtgagagtcagaatcaattgttcctgccaaccgcccagttcaatgtctaccgccacccgacgttcgctggaggtttttgtcagtgcctgctgccagttatgatcaagattacggtttagtgggtgatgcgggcgaattttgtgcaaatctgctggcatttcattgggccagacgcggtactgattttctccggttttctcgaccgtattggcacgaaaaccgacgacttcacgtttaatcaacacgttcaggccatcgccatttgccagtggctcggtaacggcaacatcgagatgatctttcgccactttcactacttcacctaccggcaggccgataaatttcggcgaatcgaacgcgccaatatcgcctttacgggcattcacaaaataatctgtgctaccacggtggaaagtcttttccgtcgatggaacaaagaaatgttcagtacgacctgatgaagcgcgcgccagatcgccacgttcttcaataatggcatcaagcatctggcgataatgggcggtgatattcttcacgtagctcatatctttgtaacgcccttcaatcttgaaggaacgtacgccagcatcaatcagcgcgccgaggttggcagtctgatcgttatctttcatcgacagcagatgtttttcataggaaaccacccgcccctgatcgtctttcaatgtgtatggcaaacggcacgcttgcgagcaatcgccacggttggcgctacgccctgtttgcgcatgagaaatgtagcactgacccgaataggccacgcacagtgcgccatgaataaagaattcaatggtcgcgtccgtggcctggtgaatcgcgcggatctgatcaagattcagctctcgcgccagcacaatctgcgtgaagccaacatcagagaggaacttcgctttttctactgtacgaatgtcgcactgcgtactggcgtgcagttcaatcggcggaatatcaagttccagaatccccatatcctgaacaatcagcgcatcgacaccggtctggtagaggtcagtaatcagccgttgcgcgggttccagctcatcatcatgcaaaatggtgttaagcgtgacgaaaatttttgcaccataacgatgggcaaacggcaccagctcggcaatatctttcaggctattactggcattatgacgggcaccaaaaccagggccgccgatataaacagcatcggcaccgtgcaaaatagcttcgcgggcaatggcggcatcgcgtgccgggcttaacagttcaagtcgatgagaagatacggtcacattcttatccagtagctgaaaaatggc

SEQ ID NO: 452 - DNA, 2636 bp, Escherichia coli
  Strain O55:H7
  modified_base (1848)..(1849): a, c, g or t
  modified_base (1851)..(1852): a, c, g or t
tttagccacaagcgcgacgttgcgaaatagttttcccgcttaactgcgcgggtaatggatgagggaatgaaaatgtacggtttgctccccaccattacgatagatatgcgtgacgtctgcagcaaatcgaacgccttccccacaattaagggtctgccattcaccatcaacgcacagatcaagttgtccatcaatgacgacgacatgttcgattacccccttctcatggggcgtcgattcgcttattgcaccgggtgccatctgaatcgagaagtgttcaaagcagagttgtggatcataaggaaacagcgaaatgatcaccatcgcctgctgttgtggatcataaactgaaggcgtagcggactgtggcggagaaataaatgtcgaaaatggcacgttcaacccagtggcaattttccataatgtcgcgaccgtcgggctggactcattacgctcaatctgtcctaacattgctttagaaacgcccgtcgcttctgccagtcgcgaaagactccagccgcgctgctgacgtagttgtttaagtgtggtggataaaaagcgagcgagattttccatgcgactcctccggcaaaacggaagtttatcacttgtgcgttataacggacaaatgctacggtgcctgtacgctataacgcacgaggtgactatgcgtctgttttctgttcctccacccacgctactggcggggtttctggcggtattaattggctacgccagttcagcggcaataatctggcaagcagcgattgtcgccggagccaccactgcacaaatctctggctggatgacggcgctggggctggcaatgggcgtcagtacgctgactctgacattatggtatcgcgtacctgttctcaccgcatggtcaacgcctggcgcggctttgttggtcaccggattgcagggactaacacttaacgaagccatcggcgtttttattgtcaccaacgcgttaatagtcctctgcggcataacgggactctttgctcgtctgatgcgcattattccgcactcgcttgcggcagcaatgcttgccgggattttattacgctttggtttacaggcgtttgccagtctggacggtcaatttacgttgtgtggaagtatgttgctggtatggctggcaaccaaggccgttgcgccgcgctatgcggtaattgccgcgatgattattgggatcgtgatcgttatcgcgcaaggtgacgttgtcacaactgatgttgtctttaaacccgttctccccacttatattacccctgatttttcgtttgctcacagcctgagcgttgcactccccctttttctggtgacgatggcatcgcaaaacgcaccgggtatcgcagcaatgaaagcagccgggtattcggctcctgtttcgccgttgattgtgtttactggattgctggcactggttttttcccctttcggcgtttattccgtcggtattgcggcaatcaccgcggctatttgccaaagcccggaagcgcatccggataaagatcaacgttggctggcagctgccgttgcaggcattttctatttgctcgcaggtctgtttggtagtgccattaccgggatgatggctgccctgcccgtaagttggatccagatgctggcaggtctggcgctgttgagtaccattggcggcagtttgtatcaggcgctgcataatgagcgtgagcgcgacgcggcggtggtggcatttctggtaacggcaagtggattgacgctggtcgggattggttctgcgttttggggattaattgccggaggcgtttgttacgtggtgttgaatttaatcgctgacagaaaccgataataaaaagnncnntctaacgatggcgcgtctggaactactttttgttaacgtcaaacatggtggcatcggtcgccatgtcatcaataacttgtttaatattttcgaaagccattggcgtactttcgttattcaggtctttaccttcgccctgacgaacgactttgataaccggtttattagtcgctgcatcaatcagctcaccttcaaaatacaagcgagtatccatggtacggtggcctgtagccatttgcgtccccgcaaccactaatgcaacaggaaccacttcatagaattgcagcccttctttgctggtatctacaccggtaatggccccacggaaaatcagactacgcggccccgcggtggtaaccagtggtttacgctgcgctatcgcttctttcatttcggtgttggtatagttcaaaattttatccagaactttctgccctacctgggtcgaaggtttcggtaccggataataagtgattgggttccagacgatgctgtcatatttgctttgatcaaaactcgggtctacccaacgtaaaaccggtttacctgtagccgaggttgtttcttttaaatcagagtaattgtttaaaaaaccagaatatttatctggctgggtgattttagaggcacaaccagacagagccaacaagccgcataaagctgcaactttcgcaaatgatgtggtacgcatgaatagtttcctgagatgattatattactttttaagttatagcaaaaagcgccgcttcgtgttgtggcaaaaaaagtgttggtgaaaataaat

SEQ ID NO: 453 - DNA, 5705 bp, Escherichia coli
  Strain O55:H7
agccccttttcagacgacatagtcaatgccgcaaaaggggctaagtcaatcatcagtagttaaatttcagtaagttaagctgctaaaaaaacttcgactactgtgattaatttcacatcccttcgataaaaaatatgcttaccgaaaagaaggacagtaaaccatctcagcggtggggaattttcacgcgctttgttcttaccgggtcattttttacgtgccagcatcgtggcgaaacgcagtttaatacgattaccgttggcgtcggtgcggtgcagctcgccgacgtcttcattgtatttcaccatctcccagccttcgtaatatcgacgtaattctccctctttgaaggcaaacgggaagccgacggtacatggataatcagcggtatccatcgccgccacaatcaggttgtaaccgccaggtttagtgcaacgttgcatattggcaatcagccctgggatggttttagcctcaaggaacatcagcaccacagtcgaaagaataaaatcgtactctccatcaaatgtgaggttattcagatcaacgacccgggtgtgtaaattatccagattttcaatggatttaatgcgctcgacgttggcgatactcatggcatttttatcccatgcgtcaacatcataaccattggctgccaggtaaagactgttacgaccattgccacagcccagatccagcgttttacccggtttaaccactttcaccgcttccagtacttcagagtgtgtgcgggttaattcatatttatcagtaaaataattttcgtcacgaatgatcattctttgtcctctgctttcattaaaacggcgcgctcggttctgactaacaattttccctgcatcagaagcgccaaagtacggatgagcagtattgcaataataaaattggtaaagataaacagcggcaccgccagcgtatggaaaaatccattatcgctgccactccccagatgcaaaccggtggttgccagtgcagatacgccgaacgagaaactccagaatgaagcattaaatggctgggagagataccatggcatcagacgtagcataaacagcagttgcagcagtccataaccgaaaagcattttcgccagcgtgtcaccctcgccgccgttgacgctcagccaggcactacaggccaccagcgcaggagcgagctgaatgccgagtgatgtccgcagtgccgtgggtaattctcccgaactacgcagacgctgcaagatcaccggttcaaggcttagccatgagaaaacgcctgcgcctaaaaacaccagaccggcgtcggtgtagcccaacgcaccacaggccattgcgctgataaagttgttggcaactgtcggcagatacagtccaggcgtagtagcttcttcagggtgagatccgcgccataatcccgcagtttgccaggcggcataagccaactgaaccacgacaccaaaactgaacaggcacaccgccagtgggcgaaaccacggaacaaaaccaatcgccaccagcatcgtcgttgcaggaaacaaactcacaaaactgctcagcactggatggcgaacttccgccagcacgctatgcggaaagcgtatgagtcgggtaataaatgcgctagtcaataatccccagatgatcatcgccagaatcaccagcccatcccctaaccagtggctgacctgccaaacctggctggcatagcgccaggcaaatcccatccctatcgtccccaacacaataccaaagtagcctgccggcaaattgagcactttatcgctctgcatcttcttactcattttgtttaatttataaagtatatttgaaatgcattttatggaattttctcgagcatagccagagccgcagaatttgctacggttatagtaagtcacctgtgggaaaacgctatgcgcaaatatcgtctaagtgaagaacagcgagcctttagttatcaggaagatggcactaaaaaaaatgtgttattacggcagattatcgccattagcgattttaacgatgtgatagcaggaaccgctggcggctggatcgatcgcgaaacggtgttagcacaggaaggaaattgctggatttacgaccagaatgctattgcgttcggcggaacggtgatttccggtaatacgcgcatcaccggcaccagcgtactgtggggagaggtttacgcaacggataatgtctggatcgataatagtgaaatcaaccagggtgcatatataagtgacagtgtcaccattcatgactcactggtttgcgggcaatgtagaatatttggtcacgccttaattgatcaacattctatgatcgtcgccgcacaaggcttaacgcccgaccatcaactcctgctccaaatttatgatcgcgcaagggttagcgcctcgcgtattgtccaccaggcacaaatttatggcgatgccgtcatccggtatgcttttattgaacatcgcgccgaagtttttgattttgccagtattgaaggtaatgaagagaacaacgtctggctatgtgattgcgctaaagtctacggtcacgcgcaggtgaaagctggcatagaagaagatgccattccaacgattcattacagttcgcaggtggcggaatatgccattgtggaaggtaattgtgtgttaaaacatcatgtcttgattggcggaaatgccgtggtacgtggcggaccgattctgctcgacgagcacgttgtaatacaaggtgagagccgtattacaggtgcggtgataattgaaaaccatgtggagttaaccgaccacgccgtcgttgaagcctttgatggcgacacggttcatgtccgtggtccaaaagtcattaacggcgaggagcgcattacgcgaacgccgctggcagggttattatgaatcgataatacgcgcgtataagttcacatcatcataggcatcattcaggaactcagcctgtttcaggcaaccttcaaggataaaaccattgcgcaaagcgacctggttgctttgcggattgtccacccgacatttgatcacgaagcgtctaagttcaccagactgagcgtaatgatgaatcagtgcctgcagcgcctgagaaatgatcccctgcccctgatgagattcgtccagccagtagccgatttcagcggttttattcagtggttcaatacgattaaacgagataacgccgataagttcatcttctttgaaaatcatgaacattttggcatagccgcgttgatgcaacatcacattaccctgcaccgtttttcgcgtgtcctcttcaatctgaacgaactgcggccagtttagcgactgctgtaaccaggttttatttttacagattaactgataaagaggagtgacgtgattttctgcaacagcatgtaattcaagtgattcgcttacttttatcgtttcagtcatcttatctccagtcaatccatgcagttgttaaaaaagccgcctggctggcggcttaggaaagtttacacctctttgacgctctcatgctgcaggattttgggcatctcatcttttaactgtagcttttgttttttcatgcggaccacttccgcattgtaccctcgaccgtcggaaccttcctttctggcaatttcatgatcaagtttattgtgtttatcgaacaaggacataaagcgaggattttcgtttttcagacgggatattaaatctcgatattctggaaacatacgcactccctgttagtggctgacaaggtgtatctgaaatacacaccatcagattactcatttaacttagggaaaaatgcgagcgggatcgtgtttaaccagacggcacctcccgaagaaggtgccgaagaaaaaacgattaactcatcacgcggtcgtcaacatactgacgtttatccggcgctggcgggaaatactgatacagccatgtttcactgatagcgtcgccctgacaacgcagatacatccgcatatcgaccggatcagtggagtccgaagtcggataccagtcaaactgaatacgataaccatcaatgggttcaatatagagaatttcgatttgcttcgcttccccactggaaagcgtaatcaccggctcaatgccttttggtgcggcagctttcagatcaccaccaacgaaatcgacggcaaaacgacgcgcccatttttcgggatagtgttcacctggtgcccaaccttccgggaaaccgcccatgccggtacgcgtcgccataacgcgcgctaatgggcaatgaacaggcggttgcgcactccagtacagacgatactggaatgcaaactcatcacccgcctttacagctttttctggctgccagaagcagacaatgttatccagcgtttcgcccgttgttgggatttccatcaggccgatggtgcccttaccccacttgttacgcggttccacccacagacttgggcgtttgttataccagcccataatgtcctgataatgggagaaatcacgatccagttgcaataaaccaaaccctttcgggttgttgtcggtgtaagcattgaactgcaatttttgcggattattcagcggacggcaaatccactcgccgttgccccgccacatggacagacgatcagagtcatgaatttgcggatgaatggtgtcgcacatccgacgttcattagtaccgcagctgaacatactggtcatcggcgcaatgcccagctgtttaatgtctttgcgcgcatacaggtgattttccacatccataatcacctgacttttctcacaatggatagtgaacttataggcaccagtaatgctggcgctatcgagcaacgcataaacggtaaaggtagttgcccccggttttaccgtatcaaaccagaaggcggtaaagtcggggaactcttctttactgtcggtgtaagtgtcaatcgccaggccgcgggccgacaaaccgtattgatatgtgtcatcaacggcgcggaaataactcgctccgaggaatgatactacatcacggcgcgccagttcgggggctttaaacacgcgaaaaccggcaaagccgagatcgctttgcccttctaattgtttggtatcaacacctgcatcgttgtatttgaacaactccgggcgaaagtgaatttcacgcgccagatgtgttgctggatctacagaaaacatacgaacgcggcgacggaatcccattcccatatggaagaactgagcgtccagttgacggttctcaacgttatgccagagcgatttttcggcgtcgtattgaatactgttataagcctgcggcgtcattgtcgccagcgtgtcaggtaacggacgaggcgcaccacgccacgctgtttgcgctaagtcgtgcgccattgactgtagaatggagaagtcaaaacgctgggtttgcccgtcggcaatatcagaatctgccgcgaatgccgcctgagaaaaaagagaagcaatgccgctggtaccgcacacggcggccatagccattgaacctttaataaatcgtctacgatccatacctgaaagtgagtccttctggtgttgtgaatggtcccgcgctggtcgttttcagcggcaagaaagtgcttatttatgaccgctcactctagacaatatttattaataatccaattgttgaactgagagaatatgcataaatcggcaatttttttatgtcgatgggatgagcctgattcgtttgtaaaatcaggcaaat

SEQ ID NO: 454 - DNA, 928 bp, Escherichia coli
  Strain O55:H7
  modified_base (553)..(553): a, c, g or t
atggtcagaatttaaagcaaaccacagcgacgtttactgcgttcttccgcttcctgataaagctggaactcatccaaaaccggacaacccaacgcctgctcaaatgcttcgcgactggcattaccgtggctgcgtgcctgcgtttcattacccagatttgactggaagatccccgccgcgctaacgggcaagaaatcttcataggtaatgggttgcgccgcgacccaaccacgttcaattaagggctgtggatcgtctccgggatgaatcgcctgacgatgcgcctcacctgaaggcgtcagacggtaccggaaccatgccagcccttgctgacgcattaaaaactcactgtcaggaaaagtgcggaaggtttcctgtaaatgcatttggtgagtgagattatcctgcccggttccagcgttacgcagaagatcatcatacagttgtcgacctttcggcgttaatgccacgccacgctgctcaatttcaccaaagcgcgcagtatgcgtgccctgtttctgccccgcaaacaacaccgtctcttccagtgctntaaagctggtctggcgtagtaaaatcggtacctcgcggcgcggcgggcccttcgatcagaatttttggttcaattccgcattcaggcatcatcgactgcacccggtcaatatccagcgtacgtggcgtcagatggttgatatggcatccaggaaaacagaccacatcagcaatcaaccgatgttcgttgtgcaaggcgcgataggtttcttcatctaccgttgctgactggtgccaacggaacgtttccagggcctcctgcacaaactcctgtgcctgtgtttcgttaaaaccgccccgctggtcatactcctctaacagttgtcgacaacgtggggtgaagatatcgcgctgacgcagaatctccgccgctttc

SEQ ID NO: 455 - DNA, 243 bp, Escherichia coli
  Strain O55:H7
  modified_base (240)..(241): a, c, g or t
aaaatttcgttctcgataagctcaaggcggagtaaggaggtaaaaacgcggaagggattacgcgccagagaagcatcatcaatgggccgaaatgctgtcgaatgtaccggcacccctgcctgcgagagatcgtaatagctcaccgggtacatccccataatggcaaacatccgccgaagagtagcaagctcttgtgcagtcccaacgcgaatcgccccatgacgttcaacattcagtcgnncc

SEQ ID NO: 456 - DNA, 6204 bp, Escherichia coli
  Strain O55:H7
  modified_base (4060)..(4060): a, c, g or t
cgtctgcatttaccattttttcgtgcagttgaggattgttttccagcacagccagattcacatcagctaccagttccagcagcgtgccatattgcggaacttcttgctggtacatggctgacattgcctgcgaaaactgttcccgaatctcatccgccgtgatgctgttcgccatagtgtctgcctccagtggtcagtaatctggagtgtaggtaaccgcattcactctggcgggaagaatttacaaactgtgatctcgccgcgaaaacatcaatattatccattttgctgtaacataattgctttaattgttaataatattttgcaatcaagttatcataatcaaacaacttcacttgtcagcgacaccgcttcgtttttaacatcgcttatggaaaaaaatagtctgtttagtcagcgcatccgtttgcgccaccttcatacattcgtagctgtcgcacaacaaggaactttggggcgcgcggctgaaacccttaatttgagtcaacctgcgctctctaagacattaaatgaactggagcagctgacgggcgctcgcttgtttgagcgtggtcgtcagggggcgcaacttaccttacccggcgaacaatttttaacgcatgcagtcagagtacttgacgccatcaacactgccggacagtcgcttcatcgtaaagaaggtcctaataatgatgtcgtcagggttggtgcactacctactgcggcactggggatattaccttcggttataggtcagtttcatcagcaacaaaaagagacgaccttgcaagttgcgacaatgagtaaccctatgattctggcgggtttgaaaaccggggaaatcgatatcggcattggtcggatgtcagatcctgaactgatgaccgggcttaattacgaactgctgtttcttgaatcgctgaagctggttgtccgccctaatcatccgctacttcaggagaacgtaacgctaagccgggtgctggaatggccggtcgttgtatcaccagaaggcactgcgccacgccagcattcagatgcattagtacagagccagggatgtaaaattccttcgggttgtatcgaaacgctgtctgcttcgctatctcgtcaacttacggttgaatacgactacgtgtggtttgtcccttctggcgcggtaaaagacgacctgcgtcatgccacgctggtggccctgcctgttccgggacatggtgcaggcgaaccgattggaatactgacccgcgtagatgcgacgttctcttctggttgccagttgatgattaacgctattcgaaaatcaatgccgttctgaaaggtgaagggatctgtcgatccctcctttaacattttcacaccggagcgaaactaactggttcacccgctccgcgaggttctgccaacacagattgtttgttcagacggaatacgtccaccgcctcagttaatcgtgccgcctgttcttcaagggacaccgccgccgctgaggcctcttctaccagagaagcattctgttgcgtcaccttatccatttcagaaatcgcctggctaacctgcgttatgcccctactttgctcatccgaggcggcggcaatttcctgcatgatatgtgtgacactcgcgacggcatcaacaatagtgctcatggttttcccggccgttgccacctcatccgatcccaggtcaattaacctgactgattcactgatcaagccttcaatttcttttgccgcctgggcgctgcggcttgcgagtgtccgtacttcgctggcgacaacggcaaatccacgcccttgctcacccgctcgcgcagcttcaacggcagcattcagtgccagaatattcgtctggaaagcaatactgttgatgacggcggtgatctcagaaattttcttcgaactcgtggagatagcgcccatcgtttttactacaccggaaaccgtctgcccgccatcgctggctttaatagaagcctcttgcgccagtttgctggcataatgcgcgttatccgcattctgtttcaccgtcgcagtgagttgctccatgctggcggcagtttgttcgatagccgccgcttgttcttcggtgcgagatgacaggtccgcattgccagctgaaatttcgctggtgccacgataaatctcttccgcaccctgtcgaacagtccctacggtcatccccagtgaatgctgcatttgctgtaaatgacgacttaagcgaccgatttcattacgacccgccggttcatccttcatcgtcagatcgccactagcgattttttcaatccgttgtgcggcatgttgcagtggacgaatgacgatccgacgtagcaccataaatgttatcagcgtcatgaccagggcaagcacaaacgcaccaatcatgaacatcccgcccaggcgggtgcgctgatgggccagttccgccagttggttggctctggtgctacgtatcttaacggctttgttcaaaatatcggtataagcattatccagcgttcggatctgctcactttcatgattgataatcgcttcaaacatgccatttttggcatatttcaacataggttgcatacccgtgatataagcctgaaagcgttgatttaattcagtgtcgagggcttcatcagcaggtgttttcaccggccgattctgataagcacgataaccttgctgcgactgtttaatctccgattcggcttgcgcaatatttcgcttcattgcttccatttccgcaatacgactcgcagccccggcctgaatcatattgatccgggctgaacgcaaaaaatctgaactgttcgctaacccggtccgaatctcaatctccgcagtaacatcacgctgatcgcgatcggcctgccagaggaaatagccagccagggctgaacttaatgcgaatagaactaagataccgcctagaatgcaggcaaataacggaaccaacctgatgtgatgcaaaaaacctaatcgctgtgagggagttgtattcattaccgttgtctctcgtccaggtttactcctgatagaaagtcatcggcatttgacggtaattacttacgactaaaagcctctttgcgtcacatttttacaacaattattgcagagaagattaatgccattggaatgaagagagtaacgaatggttaaactggctaacccgaatgacgaaaaattctggaaaacagcacgcaatttcgtcaggtgattattttcgtccctaaggaaaccacataggatgctcacgggtgcctgagactttctgttttcaggctaaccgggaatcagaaagacgaaggccccgaccgatatttctatcaaccgaggccaacgaatgaaccaagcaattcagatgttagcctcttacccgccatccggcaaggagaaaggctatgaagcgcaaccctctggtggtgtgtctgctcattatctgcattacgattctgacattcacactcctgacccgacaaacgctctacgaactgcggttccgggacagtgataaggaggttgctgcgctcatggcctgcacgtccaggtaagggcaagcgcggggattttccccgcgcatctgactagcagattcattttctcatggcaccccttttacacttcagttagtgcatgtttttttcgatgcactaatagaaccatcattacagacaaatttgccgcctgccgtacagtgtgagatcccccctttcgaaccagaacagggtttgcgcccggcatcggcataaaaggaaacaagcgttcccataaacaaaataagtaccagttttttcatataacctccatggtttatcgaatcttatgttcgatttgaacgttatacgctggtttattttgataccgttgatgagatcaaagatcgggtgaattgattaaaaataagccagatggacgtatgggcaaggattatggttttatttgtcatacaaataaatataataggcgcttccgatgtagacccgtattcttcgcctgtaccacgggtcggttttagtacaggcgttttctttaaatatccttcaggaacgtttacgcggcatcatgcgtanaagtgtgttgtccttccagaaatagtggtgtgccagtgcagccgcagcgtgcaaaccgatgacaaaatatcccagattcgccagcgtttcatgccacgactttaagctatctacccgttcgaaattggcctctgaagcgtaaggcatcgtcaaaccaaacgcaaaccacgggttgcctcggttatacatcatcaccaaaccaatcactggcagcgcaataaacaggagataaatcaccaaatgtcccaaatgcgccagtcccgtcatcatcggttttggcttaggtataatcggcggggttgggtatttcagccttaacaaaagacgaacgaccatcagcacgagaattgatatgccgcaggaaacatgaatcatgttgatgagtggccgatcgctacgtgggaataaaccccgaaactccattgcgcaatacgctgcgataaccagcaaaaagaccagccagtgaatgctgatttgtaaccttgagtatttattttccataacatttcctgctttaacataattttccgttaacataacgggcttttctcaaaatttcattaaatattgttcaccctttttcagtacgttacgtttcactgtaagaatggagattgcccatcccgccatcctggtctaagcctggaaaggatcaattttcatccgaacgttcctgacaggagaaaaccatgagtaaagttggtattaacggttttggtcgtatcggtcgactggtgttgcgtcgattacttgaagtcaaaagcaacatagacgttgtcgctattaatgatcttacttccccaaaaattctcgcctatctgctgaaacatgattcaaactatggtccgttcccctggagcgttgattttacggaagattcacttatcgttgatgggaaaagtatcgcggtttacgccgaaaaagaggctaaaaatattccgtggaaagcgaaaggtgcagaaatcattgtcgaatgtactggcttttatacctccgccgagaaatcgcaggcgcatcttgatgctggcgcgaagaaggtgttgatttccgcccctgcaggtgaaatgaaaactatcgtttataaagtcaatgacgacactctggatggcaacgacaccattgtttccgtggcatcatgcactactaactgtcttgcgccgatggccaaagccttgcatgacagtttcgggatagaagtcggcacgatgacgaccattcatgcctatactggcacccagtcactggtggatggcccgcgtggtaaagatttacgtgcttcacgcgccgcggcagaaaatatcattccccacactacgggcgcggcaaaagccattggtctggtgatcccggaactgagcggcaaactgaaaggtcatgcgcaacgcgtgccggtgaaaacaggttcggtcactgaactggtatcgattctcggaaaaaaagtgactgccgaagaggtgaataacgcacttaaacaagcaaccaccaataacgagtcatttggttataccgatgaagaaatagtctcttccgatatcattggcagccatttcggttcggtgtttgatgccacgcaaacggaaattaccgccgtgggcgatttacaactggtgaaaacggtcgcctggtacgacaacgaatatggcttcgtcacgcagcttattcgcaccctcgaaaaattcgctaaactctgacgcgcacaggcggaggaaaaaacctccgcctctttcactcattaagactgtaaataaaccacctgggtctgcagatattcatgcaggccatgtttaccatctgcgccgccaataccggatttacgccatccggcgtggaagccttgcatagcttcgaagttttcacggttgatgtaagtttcaccaaacttcagccctttaatggctttcatcgcgacgttcagattttgggtatagattgatgaggtcaggccgtaatcactgtcattagccattgagatagcatcttccagcgtgtcaaatgcgactaccggcagaaccgggccaaaggtttcctcatgcataatcgacatttcctggcgaacatccagcagcaatgtcggcggataataatatcctttcccctctaccgctttgccacccaacgccactctcgccccttcttctactgcg

SEQ ID NO: 457 - DNA, 22245 bp, Escherichia coli
  Strain O55:H7
  modified_base (2417)..(2417): a, c, g or t
  modified_base (3709)..(3710): a, c, g or t
  modified_base (4456)..(4456): a, c, g or t
  modified_base (5832)..(5832): a, c, g or t
  modified_base (7147)..(7150): a, c, g or t
  modified_base (13726)..(13726): a, c, g or t
  modified_base (15661)..(15664): a, c, g or t
  modified_base (16611)..(16611): a, c, g or t
  modified_base (17762)..(17762): a, c, g or t
  modified_base (18863)..(18863): a, c, g or t
  modified_base (19605)..(19605): a, c, g or t
  modified_base (20124)..(20124): a, c, g or t
  modified_base (21419)..(21419): a, c, g or t
  modified_base (22212)..(22213): a, c, g or t
cactttttgctcgaccctttccagcgccgcggcgttaatcaacggccccatcgcaatgtcgttgcgttcagcggggttaccaaattgaaccgcctgcatcgcttcacccagccgattgacgaactgatcataaatgcctttctgtacataaacacgttctgcacagttacacacttgcccactattaatgacgcgtgaatcaacgatggctttgactgccagttcaagatcggcatcgtccattacgatagctggtgctttaccccccagttccaggcacactttggtgatgtttttcgccgcagtcgccatgatcttctcacctgcagagacgctgcctgtcatactgaccattgcgacctttgggttacccgccagttcttgcccaacggtttcaccacgccccagaacaaggttaaacacgccgcgcggaaggcctatttcatcgacgattttggcgaatgcaatcgcattgtttggcgtaaattcactgggtttaatgacaatggtattaccagtcaaaagagcgggagccattttgcgggcaatgaggaagaacgggaagttccacggcagaatgccggtagtcacaccaagcgcacgtttaaacagaagaatattttctcctggacgatcgctttgaataatctcgccctcgtaacgccgtgcccactccgccatgtaatcgatatagtcggcagtaaaagccacttcgacttcagccagctgctggatcttgcccccttcttcaacaatcagcgcactgatttcgctggcgcgttcgcggatcccggcggagattttgcgcaaccaactggcgcgttcaattgcaggcaacgcttcccattctggttgtgcacgttctgctgcatcgattgccttacgggcatcctcggcctgaccatcgggaatgcgggaaatgacagcctctgtagcagggtttaccacatcaatccatgcgtctccacgccaggtaacaaactgtccatcaatatacataggatgttgaacgggtactgacatgggcgactcctgtgatttatatgtttgtttttggtaaatacattgttaattaacatcaatcatcatagagacggcatcatgaaaggacaattctgtgaagggcttcataaaaacaagtgtaaaaggaataagaggcagaaataaaaggcaggagttatgcccgtttgcaaacaagtggttcacaaacgggcaatttttaacgtaacgagcgactttccatcgcctcgatgagcaccgcatcgtgtttcagcgtttgccatgcatggatgacttctgccggaaaatcaacgtgaacgataaaatctcgcccgcggggaccgtagccatcgctatcatcgcgtaaacgcggcagctcgccagtgagtagtgagagataacgctcaaccggccataatccttgtaactgattaataaagattacactgtctgcgttatttcctaactgaggaacgaatccgggataacttaaccagcgtggtacatcgggattgtccccggtcatacggcggaacgtcgccatcgtgcgccgctgcatggtggggtcctgtacaacgatagctgtgtgaactcgttctacggcctgattcaatagcgcgatgctaaagcgtgcgttttcaccgcagtttgttgactggtcttcaatccagattttttcatgcggaatatgccagaactgatgagcgatatccgccaggatggtcgcttctgctctgccagtggtgcggatagtgttgtagtgcggatgctgtgcgatggcgctatacaaaaaagtggtcgagtgaccgataccaccactaatcagtaaaggaatttgctgatcgcgagcaatcttacatgccgcatcgatagtcggcataaccgcatttcctgcaagtatgacgcaatcagcctgatacggcacctcaccggagaaatcatcctgcgccagccactgtccgataacatttatggcatctatagttgccgtcgaaagcgtcggaaacggggtaatgttcatggttcctccttatcgttcccttaagaatactgcgtgagataatagtgagaagcggagcactctgaaaggaagataatgctttttctatctcgccatcgcgaaccagacactggttttagtcatacactatttgcggagaaactgttgataaaacatcaataacatcatttgacgtggcaataacataatgttcgatcattttatttttatgaatttcacaactttgcatagtaaaccatgtaagataagtggaattggctactctatagatccccgtttggttaattccctgctttcctgacatacctaacaaatcaccttcgtcagtaacacgaaatgagtgtatccagtcaaatgatatcttaacttctgacttgatcgccgggcatatcagggncagttcaagcctggcattcttatagcttaaacctgacagatcggcgtgtttaaaagacaacgaagtcggcgtgatatttataaaacgttcatccatgttaacacccttaatatatgagactgtactcaatttaaccttctacaaaaatggtgtgagtctgtttaagtaccatgtataatcgataaccgttgctgaattttaaaattatcttgtccagttattaaccatttttcatgggaaacatctgcaatacattcattaatgcgaaatacaatttcccctcaggcacccatattctaatcttatcatcccctaatattataaattgcaattgacgtttgaaatctaaagttttattttcaggtaattcagtttgtatttttttcttgatatcatcaaggtagatgtgatgacaatgttcaccaaacatactcatcacttccagaccgtttacagatgtccatctttgttcactttcccaataaacaagaaccggtttgcgacaggtatatctgcctaaaaagcgccgaatgtgttcttcctgattctcgtaaaatattgcctctgcattcgagatttgccgacgcattcgccagcggattttttcttcataaaaagacaagttgtcgaatttgacattacgcacattcattgtcaataactcgcatggttttaaatgtaaaacttaaaaaaccaccaaacaaatgaagtgaaattttatacttctttgccttataaacaattgtcgcatctttaatattacctgcattttggttatctataagttcagcaatatccataacctgcgataaatgttccactcctgtaaactcgaacctttttcgttcccttccggctgtaaattcatcaacataaagctccgccgtcaatataaaattatactcggtgtggtgacattccattctggtttctactaaaacaccatcatgccagataatattttctacatttttcatgctattaactattctcaggtaagtaaccattagagtttctaaactggttcgatgacgcagatactctcgttaacaaacaatctagctcaaatgtgcattgcgtaattatgatatcattattctttttaataagttcacgcaaaacacttttttgagtttcagtaaattcaataacatttattgagcgtacaaaatcgctaatggtctgttggcgtagaaattttttctgtgacatgatgtaaaaaataaacttaaattcgtcgtcaccgacgttaagtttaatcggataaattattgataaaatatacagcgcgnntcggtaattttcctctggaagtttttcatagaaagatattaaagcctgaccaacgcgatcaccctctattatccgttcaaattgcgacctcagtaaaatatcatgtctactcattgcaatacgtcctgttcgcccaaggcgaagtatgaatgaaacttatgtaaaatagtaccgcccttgctatatttcagaattcataaagaaaaaacccggcgctaaatgcttaccgggttttagatttatcaggcaaatagcagggttaaccgctaatctgctccatcgcctgcaaaatacgcttatctgaaatcggataaggcgtaccaagttgttgagcgaagtaactaacgcgcagctcttctatcatccaacggatctctttcacgtcttcatcctcacgacgtgcaggcgggagtttgttgaaccattgctgccacgcctgctggacgttttcgactttcagcatctgtgcacgatcgcgatgtggatcaaccgccagtttttccagccgtttttcaatcgcctgcaaataacgcagcgtgtcgcccagccgtttgaagccgttaccagtgacaaaaccgcgatataccaacccgcccatctgcgctttaatgtcagaaagccccagcgccatggtcatatccacccgccctttcagacgtttgttgatattgaacactgccgtaaggatttgctcgacctgcttcgcaatatccaccaccgtgtcgttcagttcggcacgcactttntcatgcagcgcagcaaagccttcttccgtccagaccgggcctccattggcgtcgatcagttgatccacaccgcatgagatacagtcgtcgatcagctccagcactttgccatacgggttaaagtacagccccagcttggctttgtttggtaacttctcatgtaaatacttgattggtgagggaatattcagcagcagtagacggcgaagaccgttccacattgcctgtttttgctccagcgggttatcaaacagtttgatcgccacactgtcgcgctcatccaccagcgccggccacgccttcactttgtagttaccacgcttctgttcgtagctttccggcaactgaccaaaactccagatatgtaagccgctctgctcgataccgtcatccgccaccgcagatagcgtttcctgcactttgcctttcagcgcatctttcagatcttgtagcgagcgcccttcttttagcttcttgtttttgtcatccaccacgcggaaggtgattttcaggtgatcgggcacctgatcccagtgccagtcttcgcggtcaacggtaacgccggtcatccgccgtaactcgcgctcaaggctgtcgagcaacggtaactccagcggtgtgacgcggcctaaaaacgcttcggcatagtttggcgcaggtacaaaattacggcgtaccggtttcggcaacgatttaatcagagcaatcaccagttcgcggcgcagaccagggatctgccattcaaacccgctttcctcaacctggttaagtaacggcagcggaatatgtacggtcacaccgtcagcatccgcgccgggctcaaactgatagctcaaacgcagcttgagattgccctgatgccagaagttcgggtaatccagcttgctgatcttttccgccccttctttgatcaacatgctcttttcaaagttgagcaaatcaggcgtttcgcggctgacttttttccaccagctgtcgaagtgacgagcggagattacatcgtggctgatgcgctggtcgtagaactcaaacagcgtttcgtcatcaaccagaatatcgcggcgacgtgatttgtgttcaagctcttccacttcggcccgcagtttcaggttttcacggaagaatgcgtgacgcgtctgccagtcaccttccaccagcgcgtggcgaataaagagttcacgacataacgccggatcgatctggctgtagttgaccttgcgcgcggcaacaatcggcaaaccataaacagtgactttttccgttgccatcaccgcgccctgcgcccgttcccagtgcggttcgctgtaggtacgtttaatcaaatgctgagcgacaggctccacccattccgggtcgatacgcgcagcaatgcgccnccacaggcggctggtttctaccagttccgccaccattacccatttcggcggttttttgaataaaccagaaccggggaagatggagaaacgcgcgttacgtgcgccggtatattcttgtttatcggcatctttcatgccgatatgggaaagcaaccccgtcagcaacgcaatgtgaatttcacgatactccgccggttcgctgttcaccggaatgccgagttctttcaccacctggcgcaactgggtgtagatatcctgccattcgcgcacacgcagatagttgagataatcggtacgacacaggcgacggaaggcgttggaagaaagcgccttttgctgctcgccaagataattccacagattcacaaacgcgaggaagtcagactctttgtcgtggaagcgacgatgtttttcgtccgatgcctgctgtttgtccatcggacgttcgcgcggatcctgaatggagagcgcagacgtgataatcatcgcctcacgcacgcagccatgtttttgcgcttccagcaccatacgcgccagacgtgggtcgacaggcaactgcgagagctggcgaccgagcggcgtcagtttataggcgctggcctgttcatccgtggtgatcgcgcccagttcttcgagcagacgcacgccatcctggatattgcgtttatccggtgcttcgacaaacgggaacgcagcgatatcgcctagccccagcgcggtcatctgcaaaataaccgaggccaggttggtacgcagaatctccggatcggtaaactccgggcgcgagaggaaatcgtcttcggaatagagacgaatacagatcccttcggacacacgaccacagcggcctttacgctgattggcagacgcctgcgaaatgggctcaatcggcaaacgctgcactttggtgcgatagctgtagcggctgatacgcgccgtaccggggtcgataacgtatttaatccccggtacagtcagcgaggtttccgcgacgttggtcgccagcacaatgcgtcgcccgctgtgcgactggaacacgcggttctgttcgctattcgaaagccgcgcataaagcggcaagatttcggtatggcgtaagttcagcttgttcagcgcatcggcggtatcgcgaatttcccgctcgccgctcataaagatcagaatgtcgccggggctttcctggcttagttcgtccacggcatcgaaaattgcctgcaactggtcgcgctcagtgtcgtcggcttcttcaacaatcgggcgatagcgcacttccaccggataggtccgaccggagacttcaataatcggcgcattnnnnaagtggcgcgaaaagcgttccgggtcgatagtcgcggaagtgataatgatttttaggtcaggacgccgcggcagcaactctttcaaataaccgagcagaaaatcgatattcaggctacgttcgtgcgcttcgtcaataatgatagtgtcgtactgcatcagcaggcggtcttgctggatctccgccagcaggataccgtcggtcattagcttgaccatcgtgttatcacttacgtgatcgctgaaacgcactttgtaaccgatgcaaccgcccggctccgttttcagctcttccgcaatacggttcgctaccgttcttgccgccaggcgacgcggctgggtatggccgatcagccctttaatcccgcgccccagctccatacagattttcggtaactgagtcgttttaccagaacccgtttccccggcgacgatcaccacctggtgatcacgaatcgcttcgagaatgtcctgttttttctgactaaccggcaaattgtcaggataagtaatttccggtcgtgccgcttcacgcagcaggactttccctgccgcctggtcaatctctttcgccatctcctggaaaatggcctgttgtgcatcaggatttttaaccttcttcacgccgtgcagacggcgagaaaaacgcagtctgtcacgcagcatcagcgaatccagccgctgctgcaaggccgtaaaggtcaatttttgttgttctgtcataacgttagtgggcagtagtctgcctgattaattttctttgaaatgatagatatagagtaccacatcgcggctttctatgcgttgttcaataaattcgaacataggcttcgatttattgcgctatctctgtggcaggattgtgaataaagtgtcaacaagcaacggggcatcgcccattcaaatatctataaggaaacaccatgagcaaggtattagttcttaaatccagcatcctggcagggtactctcagtctaatcagttgtccgattattttgttgaacaatggcgcgaaaagcactccgctgatgaaatcaccgttcgcgacctggctgcaaatccaattccggtactggatggcgaactggttggcgctctgcgtccgagcgatgcgccgctgactacgcgtcagcaggaagctctggcactttccgatgagctgattgccgagctgaaagcccatgacgttatcgttattgcggcaccgatgtataacttcaacatctcgactcagctgaaaaactattttgacctggttgcacgtgcaggcgttactttccgctataccgagaatggtccggaaggtctggtaacgggtaaaaaagccatcgttattaccagccgcggtgggatccacaaagatggaccaacggacctggtgacgccgtatctgtccacgttcctgggctttatcggcattaccgatgtgaaatttgtcttcgccgaagggatcgcatacggtccggaaatggcagcgaaagcgcagtctgacgcgaaagcagccatcgacagtattgttgctgcataaccggacacgatcttgatgtggactgtagttcagtccacatctcaatccacttacctgttttcccataatttcaacatcgctttgtgctcttccttaagcacaatatgcgagcgtctggctcgaataaagctaatcgcttcatcaactgttttacagtgtccgtaacataacagccatgccgccactaccagcgcactgcgcgataatcccaatgcgcaatggaccagaacgctgccttgctcttcgcgtaatgtttccagcatcgccacggcctgtcggagctccccctcttccggaaccaccagatccagcatcggtacacagcaatagagtcgatcttttgtcgctcgtccgcgagggaattcaaaggtgacatccagaaccgcattctgtgccggaatatgtcgtggaaacgcccctaaataaacaccagcagtcattttgctcaccggctccaggcgacgacaaaaccaacgcatagatagccacatcccgatgcgccagggcaatgtcagccagtaaacggcgggcgggagtttcccctgactatctttccctgttgttatcgcgccaagcccaccgtacccacggccaataatgagtagcgataatactggccaacataaccagactgaccaccataactgaaccatcatcattagctccatcaacacaatgcacgcgcacgcgcctacgacatatggcagtgctattttgattcgacgttgatcaggtttctgataattccaacgacggtcgacgggtatcatccagtcaatcaacatacctaccgccagccctgtgatgacatcaataaaatgatgctgccaggttgtcagcgtcgaaatggcgatgagtaaaaaccatccgccgcagactttacgccacctcacagccagatgctgacgaaagtgacgccaaagtagccagcagagaacaatatgcagcgaaggagactggttataaggcagatcaaacagttcaagttgcgaaaatagccatcctgtcaccccactcacttcaggacggataaaactaaacttcagcgggtagagaaaaaaaccgcagcaggccattaccgttgccagaataagccggtggacaagtcggcgctgttcgaatgtcgagctacaaacgaacagcgaaaatccatataaaagatccagactccagtaagggacaatagtccagggaagaaaagggatcgccgtttcccagccgaatacctgactggggatatcatggctgttaaagtcctgaaccgcggtgaactgatttagagatccataggtgaagaagaaaaacggggccagcaacaataaccagccagcgccttgtagcaatacgttccggcgttcagttatcacgacgcaccgccatcgaaaccgtaaaaatgccccactcatcaatccgttgtgtgcatttatcaaatccggcatcacgcacgagtgaatccatctccccttgcgaacgcacgcgcattacccacggtttaccatctttatgactggttaacaccccggcaatcagctccagttgtgggtgccacggctgcccggtgtagaggagaatgccgcccggttcgatggcattggcaagacctgcgagtgagttttttacctgctcatttccgggaaaaagctcatacagtccagagacaatcgccagcgtaggccgcggagttaacgcgctgagttcctccgggttaaacgcatcgccctgttcaaaacgcacccgcccagacattccccgttgagcaatcatctcttgcccctgtgcaacatttaactcgctgtaatcacgtaacaaaatatcgcttacggcaggctcgtttgccagcgcatccagtacatagcgcccatgccctgcggcaatgtcaaccacgcggacggctaaacctttggcgtggagatcggcaacggcttgtttaatcagtatttgtaaatgggttttgcgctggcgaataccgcgccagccaacactgttcaggtagattttgtcgattaagcgcccgaatgcgttactaccttgcggttgattttgatagacataatccagcgaactgcctgaatcaaagccggtgctcattccgagatgcaggcccgcagagtgcgtcccgaacaatttcatcgctttacgcataaagcgatacgccaaatcaaccggcgataatggcacgggtccacctgaaaggagccgccagcgatccgctgatggtccagtgcggtcttcatgctgataatcaaatttttgtgacttgttagcatataaacgactaataaagctttgcattttttcaaatgcctgcgccctgttctcttcacccaacgtgtcgtgataaaagcctggcagcagatgcagctctttcagagggctacgtaatctatgataaaaatcaatctgcggttggcgatgcaccacatagtcatcgcctgatatcagaagttgcgtggggagcgtaatcgccgccgcatcgctaacaatacgttcagacgttttataaagatcgagcaagatattaacggcaatcgcccgtgtgatcagcggatcattattgaaactcgccacccgttgccgatcgtgggtcaaatagcgtcctttcacataggaattaataaaaaacagaccacgcagacgatgccataacgccagcgcaggacgtgccagcggcacatacaatttaaccttaaaggccggagaagccagcaccagcccgcgaattgcaggcgcataatcatgaacccatgtggcaaccagcactgcgccgacgctctgcgcgatcactaccacctcttccagcccgacctggctgtcgctggcagcaaaacggacaaactcatcgacatcccgcactgaacgcgcaagagatgggctataaccacggggccccgaagtttgtccatgccctcgggcatcccatgcataaaaagcagtatctggcatcgccagttcatcaacgatatgttgtagacgaccagaatgttcatgaccgcgatgaaataagacgatgacctttttcgcccctggctgtaaagcgggccagtgccgataaaacaacgctgtattatcactggtggtaaaaaaatgttccccagggatgcgtgaattttccattttctctattttccttcagtaacagcagtagcgaataaaataaaaaaataccggagcggtgaaaattaatgagtcaatcctgtcaaggagtccgccatgtcctggtaatagttttccgctatctttaacacccacatctcgtttgacggctgacatcactacatcgccgcaaaaaccactaataccaattaacaaacccgctaataatgcctgtaatgtatttagcggtgtcagcaacggtccaataatcagtgacgcaatcatggtggtgattacgccccccaccagaccttccagcgtttttcccgggctgactttggggaccacttttcttctgccgcaggatttcccccataaatactgtgcaatatcgtttgactctgttaacgccaaaagaaataacaccagtaacgccccgccctgggtatttgtggttgtcaacattaataaccaggcggcatgactcaaggcgaaaacggtcattatccagccccaaaaaatggcgctcacggtatgcagaaaaccggaggtatcacctactaaaactcgccaggtggttaatatcagaaacccagccaaaggtataaataacagaaacagctcaaagcaactaaaaccgataagcaaatagttaagaggaataacccaatataaccaacgcggaaaatgtacggatataagcgtacaatattctttcaatgccagaaaacttatcagcgcaaaaaacgtcaacgtcatccagcgtggacctgaaatcaccagtgaaaaacaaatgacgataccccaccaggtacgaatacgtagtgtaacttcatccccttttctctccggtaaccgccatacccgaaaacggtttatcagcgttgctaaaattaacaacgcgaaaagtgttgccagagatttttccagcattatctttcagcactcatcaggagcacactccgacaacgattaatcgcagtccagagaagcagaattgaagcaatgctccataaaagattattccattgcatccactgtggataaatggcaacggccagcccccacaacccaaatattaacgcgcgatcgcttttgccaaaaggaccgacataactacgaataccgttaatcgtctgcgcgagtaaaccgcaaaactcagtcaatatggtgcaaaataacatgagtattacgagtgatgcgttactttccggtaaaaataaaaacggtaaatagagcgcaatatcggaaataacatcgccagtttcatttaaaatcgcccccagacgtgtttgctgattgcactcacgcgccaacatgccatccagcgcattgagtaccatacggataaaaagcacgatgggcaatagcaaaaagaggatgggttgtgcgaccaacatcaacagcaatccggtaataagagaaagcgccagtgcagcaagagtgatgtgattcgctgtaacatggtgcttataaagccaaaacatcgtcggccttaacagcgactgaaagagcggttttatctggtagagcgtcattatcaatccttgataattcggtttgcgctatggtgcatcaattcccctgacggagatatcgcaacacgacgcttcattaaaaattcagaatatatcaaggtattggggactcactgtcaggaatgattatccccaataaatcaagtggttaaaaattattacgctgttattcaatacaactcatcaagttttctcatcgcttgttcccgtattgcgcgcgtcttaccgttaagcgccagctggcgaactaaatccagttcagggttaacacgctttaacgccagcaaaggatcacgtttcagcctcgcctttaatacatcaactggaaaacggggattattcatcgccacaatccaccactcgggatcaatttctgccgccagtactgcaggcggtgtgtggcggttgttaagtgcnccgaacttgaaaaatgtgagattgcttttcgccagtgtactccaccatatacgatccggttgttttgccagtacatccagttgtgctaacgcatcggggtctagtgcataataaacacgtaacgcttcgttaacctgcgcacgggaactgttttcctgcctcagaaaaaacttcgcccaaatatcattgcgtggcgtgttttgctgtaattccttgagaacaacagcgggtaaattatcccaactaattaatgcactctctaaaaagtcccagtcgtccgaacgtatcagagaggtggcatttaatagcatctggtcatcaacttcaccgtagctgataagctcagacaaaatcatatcagcgctggtttcatatgcatctgaatctgctttgggattatttttccgatgcgataaagcacgttgccaaattttttgtttcatcgacgtgctcagatactgatttttcgccagattactccacccctcaggatcgttgaaacgtgtcaataaccgttgtaaagcagcgtcagagtgaattatctgcatatcccgacagcaaaagtaggcaggggattttttctccatccttttaacaaaattaaactgtaagttatctggcaacgctaaaaataacgcacctattagatcatcgtcattctcgaatttttggtataaatatactgctattttgtcactctcttgtggcgtcatccgcaacaattgaccatggtgtttcatctctgccaactttaacgctaagcttgtgacaacatcgtttgatgaatcgttcgccaactgcattgcctgattgtaggtgagttgtcctccagcaccgacctgacgaatagaggaatcatcactgcggatatagccatcaataatggattcgggcaataaccacgcatctttataaagctcctgaatgatcatatcccaatctcttttcgccagagtcatgacgatatccagagggagattttcacgtagcgcaagattcaacggaccgacaccatcaggtagatgactcattcgcgtcattatttcgacagagagcggttcacggtcgagcaaccccagaacaacaggctggtaacccaattgctgatcggtcaactccagaatctcattgtcaggcatatatctcgccatactttcaatcgtttgtccatcattgctattaataagttgtttgcgtcggttagctgaaattcctttaagccttgggagagttcgcattatggcaagatcaaatgtcgcaatatctcgtccttcaaatgcagcaacgttgccttcatccagcatttgcaattcctgcactaactcaggagaaggcttaaggcgaaacagcgcttcttttttcatctgattacagacattccctgccatgcgaatattgcttcgcttaaaaatttctttcagagcatcttcatcatttattagaccccaataatatgcatcaggatttattatcatcagcgcttttttgacattttcagtgtcatttttgtcactcgcacggaccatgaattcactatttgtcgaagacgcaacaacaggtgcaattatgtcattgataaatatcccacgcgcattaatactccccttaatcgtagacggattatcgtaatatgagtcgataaataccagtccacttgcatttatcgaaccggtaattaacagtggtgaatccgtaactatattcgttgccgtcacgttaccgagaataacccatggattagaaagagagaaagtggaaatattacctttgactgtcaaattgccaagaacaatcaatttttgattactctctatattaccttctaccactaaatcgccacgatgcactttccagtccgatgcagataaaccgaaggggacaagattcacgctactgttgatagcttgttcaacttgttgtttatcttcagcggtnnnngcagaaaaaaaaggttcaatatcaactgcatttgcaacgcatcgaagttccgcctgtactggaagactcagcataaacaggggaagtaaacctatccagctgcaaatcctgggcttaaacatatgcactccatgccattaaaaaagaaacaaaagggaaatgcatctttcccttttgtatattcgttattctcgcgaaataccatccaacgtagacaacactttctcagaaagatgcaacttttcagcagccatattctcccgtaaatgcgcaacagaagacgtccctgggatcagcaaaatattcggtgaacgttgtaacagccacgccagcgccacctgcattggtgttgcacccaagctcgcagcaacatcggaaagcgtggaagattgcagcggcgtaaagcccccgagcggaaagaacggcacgtaggcaatgccgtcacgagccaaagcttcaatcattgcgtcatcagcacgatgagcaatgttgtattcgttctgcacacagacgatttcggcaatcttgcgcgcctctgcaacctgcgtcggtgtgacgttgcttaggccaatatgttttaccaggccttgttgttgcatctctgccagcacggtcaggctggcttcaatcgatccttccgccgggccatgaccatcccccatcatcacgcgcaggttaaccacatccagtacgtccaggccgagattacgtagattatcgtgcaccgctttttgcagctctgccggagaaaatgcgggcaaccaggatgcgtcctctccacgccgcgcaccaattttagtgacaattgtcagatcgtcagagtaaggataaagcgcttcgcggataatctgattggtgacgtgcggaccataaaagtcgctggtatcaatgtgattgacgcccaatgccagcgcctcacgcagcacggttatagcgacgtgacgatntcttggggggccaaaaaccccaggacctgccagttgcatcgcgccataaccaagacggttaacggattttgtaccgagagtaaatgtattgctgctcatcgcaccctgccctgtaataaaacggattaagaaaaatcagtatagaaacgaaaagagataaataatgcgaaggcgtaaacaagatttctggatgagtagcactattgtcctgaaagacaccaaaacattagacagcaaaagataagtcaagcgtcgcatccggcaataaaaaaccgcaacctgtatcagcgttgcggtttgtgtatcacatgctaaaaattagaacgttttcttaaagttcagcatcacgcctttgtcgctgatgccgtcctctttccagtgatacgcatccagattcagcgaactttctttgctactgtacttcacgccgacgctcgccaggctgttgataccgccgcccttctgaccgtcatcgacgttaaagtgctggctgcctgcccctgcaaggcttgccgtgcgctggctcttgctgtagctcaggttcggcccgccttccagcgtcgcattcgcgctccagccgcctttccctgcgtagtccagtttcagcccgacgatgctgtccaccgccgtttcgctgccgctgttcatgctcaggttaaagtctccggcattgcgctcctgatagccgccttccagcgagtgacgcagtttcactccggcgtacggggtgattttcagcccttcgcgcggctcaaaggttttcgccccttcgctacgcaactccaggtactgctgtttcacatccgtatccgccgttttgctgacgtcgccgtaagcgaccgagcggctgctgtcgagattatgcacgtcataacgcagcgcgttgttccaacgtataccattgtcgaaggacatctggtgcttcaggccaaagaactggctgtagccgccggttacgccattgtcgcccgctttctgcgcaccgtcgccatccagacgcgcgataccgtattccaggctcatgctctggctttcgctcaggtcaacggttttacgcagtgccagcatgtcatactcggtgttatttccgagttccgcacgcgggtcacctttcgccaccacgttaaaggccaggccattgcccaccttcngcgcggcatccgccagcatgctgaagcggttgcttaacacacgcgcttcacggaataccgtggtcgcctggctaccgctcacctgcttcagggcgctattcagttcagcagtggtgcccacgttcaggctggtatacagctcgttattggtgtaacccgcatccagtgccttcgccacatcgttcaccgaagcatcggtcgccacatcggtgtaggcgtttttgctcatgatgacgtcaacgttgccgctggcatcggtgctgcctttggcggtccataccacggacgttgaggtgatggcatcggcgtcggtcaggttgatgccttccaccacgttgtcgaaactgaccgtggtgtctgccgtaccggcggcgaaaccggtgttgatcccgacaccattcatgctggcgttgttgaccttcagtttaccggcgctgccgtcaacgttggtaccgacgatatagccgttgaggttgttactgctgccatcgctactaccgctatcagtcgtttcactgaaaggtgaagtggtgtaagtgtttggcatgtccggcaacgtgtagtcggtgtaatgcacttcggtattgttaccgctgttgccgttcaccccttccacattcacgctgtcgccctgcttaatcaaccccgaaccagtcacgccgtcggcaatcaccaccgtaccgttgttaacgatatgaccttctgtgcccagtacgctgaacgcaaacgagtcgttagcaaaaatattgatcgtgccgttgttctcaattaccgcatcggcggtggcattggcatccagttgcataccagtcaatccggtatcggtggtgccttcggtaccgagattgataacgccgttgttaaccagctgtgcgtttttatcgccttccatcgccacggcgttgttgccgctgatgttcattacaccatcgttgagagcaacatagttgttgtgggtgaatttaaccgcgctggcgttgtctttatcgaagttaattaccccgccatcctggttccacaagaaggcatcgctttctgtcgcaccggcagtacttaccgccacggtgactttcgcatccaccacgcccttgttaataaacnggctggcgccatcgtcgtagtgaatagcgcccgcacctaatgcggcatccagcgtcatttcaccggtgttatataacgtggcgttagcattgctgccctggaagcgaatggcgtttttgctgttatcaaggatgagtttgccgctgttgttgaacgttgacttatcgtcaatatccagcgtcccggcattgttgttttcatcctgataacccattttccaggtacccgcgttattcactaccgcagagttatagagaatcgcgcctttacgcgcctcgccgcctgcaaggttattgaataccgcatcgccctgagcgttaacgcgcgccgacgcaataccgctgttattcaccgtaccatcgtgaagttgtaaagttgacagggaaccggtgttattaattaccgcgttgctgtttttctcaatttttacgacgtcattaagcgttccgttgttattgaaggttcctccttccagagtcaccgtgttcaatacaccttcattggttaacgcaccgccttcattcacgacgatggctgagctaatggttccgctcgactcgttaaccagcgcaccattttcgagtatcctgatcgttccatttttaacagcacccgcactggtgacatccccgttgataatcgcacctgacgataataatacggtctcacccgcagaacttaatacagcgccatcatcatataaatcagcaatataattatccgttggattatattcatcggncccctagcaaacgccaaaggtacaaattgtgccatagttgataataagcccagtgccatcgttatagaatgcctgaccattttccgcgttaatgttgattacgcctgtctggtcattaatggcggtgccttcgtgataaaccgccatgccgacgagtttattcacaccgagagaatcgttgtaattttcatttttctccaggttgatggttccctggttaatgaccgtattagtattcccatacgccgccatccccgcaccggcgttgtagacagtaatcacaccattctcgtggttggttgccgtggctttagttaatgccccattataggcatcggtacctgaagccattcccacaccgaaatctttcgccgtgctatttgcaacattattacgcagcgatgtttcatcattttcatcaacccacagcgtatccagggtgatttgcccttcgttatccgcggttgatttatcgatggctagcatccctacactgccacggccatacatatcaataangcccgtttcgccgttcagaatggatgacgagtagctggcaagcatacctgtcagccctaatgccttgttattgaaagaggtaccatcagacaagttccactctgccggataattcagcacactgtgctgattcatcattttggtggtcatggtaccattgttaacgccaatcccaccgtattcaacatcaaagacttttggtgccgggtcggtaccaaaatcgtacatcgccaggccaatggatccgttattgattaccgttgaatctttattccaggcagccgcaaaaccgatatttttcagttccacttcaccgttgtttgtcgccttcgcaccagaatcaatactaatggtggataacgctacacgataataataagtgaaagaatccacatcactcatatcaaacgttgcgtcagcgccaatctccagctccgcgccatggctcaactgaatgagattttcgaaccccagcgggaactcgccgctgatggttgactcaccattcaggtagaccggggaatgcccatcaacgttaataagcggtgtgtctccgataccacgtcgagaagctgatggttttgagccatcatccatgacatttttttcaccgacaaaatggacaccgccattaagcgtaaaggtattgtcatcgccagcaataacaatacctgcaatgtgttcctgagcaccgtcgtaactcgcataggaacgcgacgtggtttcactatcagcaacaacggttaactgaccatccagcgtgacgtcgttgttgtcaccgctgatatttaccccggttgagggattaaagaagtaaggctgcgcattatcggctttctgatctttatcaaccagaatactgcccgctatttcgatagtattaccatcacccgaaacattaacacccgtcgctttttgccctgtcacattcagctcataagtcgccagcgtcatgttgttattattgccagagacatcaagaccggtggagaaatccccaacgtctaacccacccgcgagtgaaatattagctttatccccagcaacgctgacaccggttccggcattggtcgcggaaatatcaccaacgttaacaaatgtcgcattatcaccgtcgatctgaatgccaatggcattttcacccgctgcggcctgaccaacattgaggtcgcccatgttgatcacgctgacgccatcaccatcaagcagcatgccaatagagttatcttcgatgaccgtaatattacctttgttgctaacgaacgtatcattgccgtcaacgtcaataccgtgcncaccaccgcttacgtataagtcgccttcctgtttgatggtggcaccgtcaccgacaattttcgagccagtggaattctctccgtcaacgctcatggtaccttgattatcgacccgcgcattatcgccattgataaggctacccgtaccaccattggtgatggtcgagtcgcccgcagtgtttagcttggtattatcgccattgatgattaccgcggtaccgccatcaacttccgtctcgccattattgttaatggtgatattgtcgccagtgagtataccgacaaccgagccttctccgatggccgtcgttttgccgtcgttgttgagggtgatgttgtcaccatcaaccgtcatgacagtaccgccattcagcgccgtgttgccgccctgatcggtgatgatcgcgttaccaaactcaatcgcattcccggttgtgccgtcaacaacgacgccggcctctttagtgatgtggatgagtccatcatcgtcgtaactccaggtgatgccacctgaggtatttacgccatcaaagacaacggtgttgctgtcgtcatggactgtccaggacttaactatcgtctccttgccctcaggcgccgttaaggtgtagctcccatcggcattttggctgtaggtaaaggtagtttcgcgaattttgacagtttttgcatcctgatcccaggttacgccatttttatagacgacaggatcgtgtttaaccggggtatcgccaccatcgtctggcggaactggcgtatcaccgccgtcatctggcggaaccggcgtatcacnncccgtcatcaggcggaactggcgtatcaccgc

SEQ ID NO: 458 - DNA, 4040 bp, Escherichia coli
  Strain O55:H7
  modified_base (224)..(224): a, c, g or t
  modified_base (1664)..(1664): a, c, g or t
  modified_base (1735)..(1735): a, c, g or t
cggaacaggcgtatcaccgccatcatccggaactggcgtatcaccgccgtcgtctggcggaacaggcgtatcaccgccatcatccggaactggggagttattatggtggtgattgtcatcgtcacttaaggtatatatagcaattcccgtagctactgcagcaagacctgcagctgcccatggtaaaactgcactatctttattttctctgcactccgcggatnaattttctagctgctctttgctcagggaatgaatatttgccggacatgttatcttactggacttacgtgttttttcggttgagtcgggtattgaagtatccgcagcccatgtctggctacttaacgccatggcaacacaaacagacaataattttttcctttgcatataaaattccttagatctagaccgtgcgtaacaagccatgcagaatttgaagataaatcgtagtaaatattcatagtgaaataagcagtaaagaaatgcttatataattcacaaaatcaatattaaaatcaggcaagtaaaagcatacaaaaaaaacagttgatggaattatattccacaaaaaactcacttcaatctaaaaattaacgacaaaaaacaaaaacacactaataattcattgacgctgcatatatattttgtgattatatatatattggtaatgatttgttatttaagggaaggatatataaggtttttgtagaaatacccacggtaattaagcatgctaacgtcagtttaaatactgtaaaagatcattacattaatagatacattttgtagccaactataatttatttgcgcaaccatttaccattaactccctgaacatattgccccgacttcgcgcgagcaacaagcttttgtccagccagtttggctatctctttagtggatacactattttgctttgccagttgttggtaactatggttacgagcttcattaatatcttttactaatgcctgtgtttcggcatccgtttgtagcgccaccaggtaaccgttaagcgtttcacctacccgcccctgacttctggcttcgttcagggttaaagccattgcactgtcgctcatcaggccaatggcccatacagctatgagtaatgttcttttcatcatcacctcaaaatagatcgctacgggttttgagcaggtcttcaacgtccttatccgctttaatgatgatttcatgctcaattttaacgttcatattaatggtgattggctctttcggcgcagccacttcaatgcgaggcgtgcaaccaaccaacataaaagaggacgcaaacgcggctatcactattttcattgtttttcctcacactcttttcctgatgggcagccagtttccggtagctgggcattctgctccagccatacctggagattatcgccaaagcgtaaactgcgccataacgtaaaaatattctcttcatggtgataattaaggtttaccgtaccgcttttaccatcgacgcgactggtgcccgaaatgttggcctgcatggttaacacaccgagattatctaaattaatccttgttgatgagcgactgatttccatataacgcaaccagttgatggcagttccagcggtcatattgtctttggccaccgcatctgcagtgtctttatccagacgcagcgtcatcgnccccgcgtttgccaaccagccatctttgacaatccatttttcattgttcagccatagtggcaacgccccantaaatgccccagacatagcaaactgtttcggattaaccgcgctaaccagttcgctggatgagagattattcagccgcaacagcgccgggtcatgttgcggcatacgtaattgtttcatcagcacgttaccgcctaacacatcgacgctaacatcagtcaacagcaatggttcttcttcagtccacggataacgcccttgcaaatcagccgtaatatttttcgctgtcaccagattaatcacttcggcaattcgcaacgtaacggggccgcgagtccccagatgccaggctccatcggcaaaacggaaaggcaggacaaaatcgacaccattaacctgattatctggcatccaggcactaccgcctttcaacacgccgtgccctcccgcgcggaatccttgttcaggcgcagcagaaaatgcaacctgagcatacagttcaccatcgcgtaagttcatcttccagtcgggtggcaccagcggctggaatacagtcagtgattgtttaggccaccaggcgttaccgcgcagacgaataccgtcccagcgaccatttacccgaaccgggccaatctcaccagcatgtaaatcgcctttaaagaggaaatacgtcggatcgcgcccatcgacgctaaattttaaggttgatggcggtaacacactgccgccagtgaacagcgtttgcccggcgtccagtgacagcgcgccgctgaaggagggatgctgtgcgtcacgtacccagacgacgggcttgtcgagaattaatcgcggcttttctaccgtcatcgtaccgtattgtaactggtcgaaaccggtggagagatcggtcagcgtaatcgtgctgtcatgccactcaccttttcctgcgacatcccaggtggcattcatcggtgtaaaactcccttttccccagtagcgccactgccagcggccagcgtcagggagaaaatcattcgccagcccatccatatgcagcacgaaatcgcccagttcattttcatgcgcctgcaaaatggcctgcaaacgtccgtcaacaccacgttgggtgacttttacacccgctaaaggccagcggatttcatcgatgtccagcgaatcgatgactcttccctttgaacgaagtaacgcgcctggctcaaaggtcagcgttgggtcagacagacttccacttagctgcgcaggtaaacgggcatataaaatgaggtccgcctgtttcgcttcaccggtcagctgcagaggcagctggctgttatccatgcttaattttcctgggccaaaattaagcaccgcgttgcccttacccgcttgcccctgggtcagcacactcagtcgtccgctgaccagagcgttctcaagccctgcctgccagttgtcgactttgacacccagtcggccactcaaaggaaaacctgcatacggccagctccagcgaccatcgcttacggtcaattgttgacgagtaatttgccacggcaaatcgagcaacggatcgccgttatcccgtgccagcacgatcaattgcccgctattttcctgccagtccagctcggcatccaccagtgacggttcctgcggcaagtttaacgtcgcagtagcatgcccacttacaggaagtccatccggcatgagcggcatagtaaattcccccaccagtttaaccgacggctgattttcaaacgcgacgacatccagttcgctgactgtaagttgttgccctttcagctggccttgaaatttaactttttcgccctgataacgcagttgctggatatcagaggttaatgcgagagagagttttccctgccattcctgccagggagaaaaaatcagtttatcaatattgatccaggtgttaggcagcatggactgccattgcgcgagggtttttggagcagctggcgattgctccgtctgcggcaatttcgccagacaagcagaatcaagttctaccgtgccgacgttcaataaccagcggctgggatgtgaaaggctggcgttggtgatatgcgcaagctgacaatctcccaccagataacggagatcgggaatgattaaacctttacgcgtaatgcgtgggctttcatctaatgcaatacgtgtcccgagcggtagccagatgcccgccagcgtgggaacccacagcccgagcgtcatcagcagcgtcaacggcacaagaataatcagtaataacagcgcgagaacggctttatatttacccagcatgggtagttaatatcctgatttagcgaaaaattaagcattcaatacgggtattgtggcatgtttaaccgttcagttgaaggttgc

SEQ ID NO: 459 - DNA, 59 bp, Escherichia coli
  Strain O55:H7
  modified_base (58)..(58): a, c, g or t
agcatagttgttgatgaatttttcaatatcgccatagctttcaattaaatttgaaatnt

SEQ ID NO: 460 - DNA, 5798 bp, Escherichia coli
  Strain O55:H7
  modified_base (5105)..(5105): a, c, g or t
tttttagtaacttaaatgtgattcaacatcactggagaaagtcttatgaaactcgccgtttatagcacaaaacagtacgacaagaagtacctgcaacaggtgaacgagtcctttggctttgagctggaattttttgactttctgctgacggaaaaaaccgctaaaactgccaatggctgcgaagcggtatgtattttcgtaaacgatgacggcagccgcccggtgctggaagagctgaaaaagcacggcgttaaatatatcgccctgcgctgtgccggtttcaataacgtcgaccttgacgcggcaaaagaactggggctgaaagtagtccgtgttccagcctatgatccagaggccgttgctgaacacgccatcggtatgatgatgacgctgaaccgccgtattcaccgcgcgtatcagcgtacccgtgacgctaacttctctctggaaggtctgaccggctttactatgtatggcaaaacggcaggcgttatcggtaccggtaaaatcggtgtggcgatgctgcgcattctgaaaggttttggtatgcgtctgctggcgttcgatccgtatccaagtgcagcggcgctggaactcggtgtggagtatgtcgatctgccaaccctgttctctgaatcagacgttatctctctgcactgcccgctgacaccggaaaactaccatctgttgaacgaagccgccttcgatcagatgaaaaatggcgtgatgatcgtcaataccagtcgcggtgcattgattgattctcaggcagcaattgaagcgctgaaaaatcagaaaattggttcgttgggtatggacgtgtatgagaacgaacgcgatctgttctttgaagataaatccaacgacgtgatccaggatgacgtattccgtcgcctgtctgcctgccacaacgtgctgtttaccgggcaccaggcattcctgacagcagaagctctgaccagtatttctcagactacgctgcaaaacttaagcaatctggaaaaaggtgaaacctgcccgaacgaactggtttaatcttgccgctcccctgcaatccaggggagctgattcagataatccccaatgacctttcattctctattcttaaaatagtcctgagtcagaaaactgtaattgagaaccacaatgaagaaagtagccgcgtttgttgcgctaagcctgctgatggcgggatgtgtaagtaatgacaaaattgctgttacgccagaacagctacagcatcatcgctttgtgctggaaagcgtaaacggtaagcccgtgacctgcgataaaaatccgccagaaatcagctttggtgaaaaaatgatgatttccggcagcatgtgtaaccgctttagcggtgaaggcaaactgtctaatggtgaactgacagccaaagggctggcaatgacccgtatgatgtgcgctaacccgcagcttaatgaactcgataacaccattagcgaaatgctgaaagaaggtgcacaagtggatctgaccgcgaaccagttaacgctggcgaccgcgaaacagacattaacttataagctggcggatttaatgaattaatagctgccacagctcccggcggcaagtgactgttcgctacagcgtttgccgttgggtaatgcacacatcccaatcgccgtaccatccagttgacgggcaacagaaagcgaaccgccgatcattgcacaatttgcttctccactactggacatcgacgcttttaaacctggcgctacgtgcgccgcagtcgcctgctgaacaggctcactactacacgccgacaacaataaagcggcacaccctacccaaaacgctgctcgcatctcttcttcctctgatcttcaagccaaacgacaccgccataaataataggcagcacagagggcgacgtcgagagctgtcctgcgcgttgccccgcatttttacttttttatggctatttttttgccctctgtttgatcaaaacattcattacgctgatgtgggggacacaaaagcgaaaatgcagaagaaagccatttgctaaaattgaaagattactactgggcgcgcagcaatttcgtgcgcccctcatttgcgcaatgtaagggtgtcatatgattactattgacggtaatggcgcggttgcttcggtggcgtttcgcaccagtgaagttatcgccatctaccctattacccccagttccacgatggcagaacaggctgatgcctgggccggaaacggcttgaagaacgtttggggagacacaccacgcgtggttgaaatgcagtcggaagcgggtgctatcgctaccgtgcatggcgctttgcagacgggtgccctttcaacatcgtttacgtcatcgcagggtttgctgctgatgatcccgacgctgtacaaactggcaggcgaactcacaccgtttgtcctgcatgtagcggcacgtaccgttgccacacatgcactctctatttttggcgatcattccgacgtcatggcggtgcgccagacgggttgcgcgatgttgtgtgcggcaaacgtccaggaagcgcaagactttgctctcatttcgcacatcgcgacgctgaaaagccgcgtgccatttattcatttctttgatggtttccgtacgtcccacgaaatcaataaaattgtcccgctggccgatgacactattcttgatctcatgccgcaggccgaaattgatgctcatcgcgcccgggcgctcaacccggaacatcccgtgatccgcggtacgtcagccaatcctgacacttatttccagtctcgcgaagccaccaacccatggtacaacgcggtctatgaccatgttgaacaggcgatgaatgatttctctgccgcgacaggtcgtcagtatcagccgtttgaatattacgggcatccgcaagcggaacgggtgattatcctgatgggctctgccattggcacctgtgaagaagtggttgatgaattgctaacccgtggcgaaaaagttggcgtgctgaaagttcgcctgtaccgtcccttctccgccaaacacttgctgcaagctctgccgggatccgtacgcagcgtggcggtactggacagaaccaaagaacccggtgcccaggcagaaccgctctatctggatgtaatgaccgcactggcagaagcctttaataatggcgagcgcgaaactctgccccgtgtcattggtgggcgctatggtctttcatccaaagaatttggcccggactgtgtactggcggtatttgccgagctcaacgcggctaaaccgaaagcgcgctttacggttggtatttacgatgatgtgaccaatctgtcactgccgttgccggaaaacaccctgccaaactcggcgaaactggaagccttgttttatggccttggtagtgatggcagcgtttccgcgaccaaaaacaatatcaagattatcggtaattccacgccgtggtacgcacagggctattttgtttacgactccaaaaaggcgggcggcctgacggtttctcaccttcgcgtgagcgaacagccgattcgttccgcttatctcatttcccaggctgattttgttggctgccaccagttgcagtttatcgataaatatcagatggctgagcgtttaaaacctggcggcattttcctgctcaacacgccgtacagcgcagatgaagtgtggtcgcgcttgccgcaggaagttcaggccgtgctaaatcagaaaaaagcgcgcttctatgtgattaacgcggcgaaaatcgcccgcgaatgtggcctggcggcccgtattaataccgtcatgcagatggcttttttccatctgacacaaattctgcctggcgatagcgccctcgcagaattgcagggtgcgattgccaaaagttacagtagcaaaggtcaggatctggtggaacgcaactggcaggctctggcgctggcgcgtgaatccgtagaagaagttccgttgcaaccggtaaatccgcacagcgccaatcgaccgccagtggtttccgatgccgcccctgctttcgtgaaaaccgtaaccgctgcgatgctcgccgggcttggtgatgccctccccgtttcggcgctgccgccagacggcacctggccgatgggcaccactcgctgggaaaaacgcaatatcgccgaagagatccccatctggaaagaggaactctgtacccaatgtaaccactgcgtcgccgcttgcccacactcagctattcgcgcaaaagtggtaccgcctgaagcgatggaaaacgcccctgccagcctgcattcgctggatgtgaaatcgcgtgatatgcgcgggcagaaatatgtcttgcaggtggctccggaagattgcaccggttgtaacctgtgcgtcgaagtttgcccggcgaaagaccgtcagaatccagagattaaagccatcaatatgatgtcgcgcctggaacatgtcgaagaagagaaaatcaattacgatttcttcctcaacctgccagaaatcgaccgtagcaaactggaacgtattgatattcgtacatcgcagctgattacaccgctgtttgaatattccggtgcttgctccggttgtggcgagacgccgtatattaaattgctgactcagctctatggcgaccggatgttgatcgctaacgccaccggctgttcttcaatttatggcggtaacctgccctctacaccgtataccaccgatgccaacggtcgtgggccggcatgggcgaactctctatttgaagataatgccgaatttggccttggtttccgcctgacggtcgatcaacaccgtgtccgcgtgctgcgtctgctggatcaatttgccgataaaatcccggcggaattactgacggcgttgaaatcagacgccacgccagaggttcgtcgtgaacaggttgcagctttacgccagcaactcaacgatgttgccgaagcacatgaactgctgcgtgacgcagatgcactggtggaaaaatcaatctggctgattggtggcgacggctgggcttacgatatcggctttggcggtctggatcatgtattgagtttgacggaaaacgtcaacattctggtgctggatacgcaatgctattccaacaccggtggtcangcgtcgaaagcgacaccgctgggtgcagtaactaaatttggcgagcacggcaaacgtaaagcgcgtaaagatcttggcgtcagtatgatgatgtacggtcatgtttatgtggctcagatttctctcggcgcgcagctgaaccagacggtgaaagcgattcaggaagcggaagcgtatccgggaccatcgctgatcattgcttatagcccgtgtgaagagcatggttacgatctggcactcagccatgaccagatgcgccaactcacagctaccggcttctggccgctatatcgcttcgatccgcgtcgtgccgatgaaggcaaactgccgctggcgctggattcacgcccgccgtcagaagcactggaagaaacgttacttcacgagcaacgtttccgtcgtctgaattcgcagcagccagaagtggcagaacagttatggaaagatgctgcagctgatttgcaaaaacgctatgacttcctggcacaaatggccggaaaagcggaaaaaagcaacaccgattaaatgctctggataaggattatccaattctaaaaaaaagcccggacgactgttcgggcttgtctttttatatgttggaaaatcagtggcaatgcaatggcccaacagaaaataaaatctgtgacaataaaggcatataacccgcgcagaataacgtatagaaaattaaaa

SEQ ID NO: 461 - DNA, 530 bp, Escherichia coli
  Strain O55:H7
  modified_base (4)..(5): a, c, g or t
  modified_base (11)..(12): a, c, g or t
  modified_base (233)..(233): a, c, g or t
  modified_base (316)..(316): a, c, g or t
ttannttgtanntattatcttcgatacattcaccagacttattatcatttcagaggaattatttgattaaggttttacttaaggcgtaacaaatgatatttatcggctaactgaacttctcctttaggatgttttcactccccgaaatggggataaaaggcaaataaaataactaaaggatttattcaatgaaaagcaaagtactggcacttttaattcctgccctgctcggngcaggtgctgcacatgcagccgaagtttataataaagacggcaacaaattagatctgtatggcaaagttgatggcctgcattntttttctgataattcagcgaaagatggcgaccagagctatgcgcgtctgggttttaaaggcgaaacccaaattaacgatcaacttactggctacggtcaatgggaatacaatattcaggcaaacaacactgaatcttcaaaaaaccagtcatggacccgtctggcatttgccggactgaaattttcagattacggttctttcgattacggacgt

SEQ ID NO: 462 - DNA, 2621 bp, Escherichia coli
  Strain O55:H7
  modified_base (143)..(143): a, c, g or t
  modified_base (146)..(146): a, c, g or t
  modified_base (220)..(220): a, c, g or t
  modified_base (279)..(279): a, c, g or t
  modified_base (291)..(291): a, c, g or t
  modified_base (569)..(569): a, c, g or t
ctggaccgatatgctgcctgaatttggcggtgactcttataccaatgcagacaactttatgactggtcgtgccaatggcgtcgcgacttatcgtaatactgatttcttcggtctggtaaatggtctgaacttcgcggtgcagnatnaaggtaacaacgaaggtgccagtaatggtcaggaaggcaccaacaacggacgtgatgttcgccatgaaaacggngacggctggggtctttccacaacatatgatttaggcatgggctttagcgctggtgcggnatacacctcttntgaccgcaccaatgaccaggttaaccatactgcggcgggtggtgataaagcagacgcgtggactgctgggctaaaatacgatgctaacaatatttacctggcaaccatgtattcagaaacgcgtaatatgaccccgtttggcgacagcgattatgctgttgcaaacaaaacccagaactttgaagtcactgcacagtaccagtttgattttggtctgcgtccggcagtctctttcctgatgtctaaaggccgtgacctgcacgctgccggtggtgcanacaacccggcaggtgttgatgataaagatctggttaaatacgccgatgttggcgcgacttactatttcaataaaaacatgtccacttatgttgactataaaatcaacctgttggatgaagatgacagtttctacgctgccaacggcatctctaccgatgatattgtcgctttaggtctggtttatcagttctaaatcctcctgcccgctgttatggcgggctttttctgcttattcttcctcctttgatctaaattaaaaatgtgaactccgtcattacacaaaaagtgtcatctggcgttacactttatgcggatactaaaacaggaggttttatgaacagaacgattcttgtccctatcgatatttccgattcagaattaactcaacgcgtgattagccacgttgaggcagaggcaaagattgatgatgcagaggttcatttcctgacggtaataccttcactgccctactatgcctctctgggtttagcgtattccgcagaattaccggcaatggatgacctgaaagcggaagccaaatcgcaactggaagagatcattaaaaaatttaaactgccaaccgacagagtgcatgtccatgttgaggaaggctcgcccaaagaccgcattctggaattggcgaagaagatccccgctcatatgatcatcattgcttcccatcgaccggatatcaccacttatctgctcggttccaacgccgcagctgtagtgcgtcacgcagagtgctccgtgctggttgtgcgctgacactaacgcccgcacattgctgcgggctttttgattcatttcgcaaatgtgctgacattttcccctctaatccgtaccatacacgccacagtttttatatcagatttcttatgctgggcgttccggcatgacgcatactcttctgatgccatataacgaattgagtcgcttttaaatgtcgcaaaatcaagaaattagcaagaaagaacaatacaacctgaacaagtcagagtaaaaaccgcaactatctgacgaacaataacttttatgtttttcaatatgttaggcaggattaacaactacaataaagcacaataatctacactttttttgccccatttttgccccttttgcggccttttgtcccatttttgccacagtaaaaatctataactaatcaatctggcgcccatgatttctttccaatagaatcagttccggctggaaatcattagatactcgcactatcgaaaagcttaccagccaaccgcggcacgttcttgcatacgaggtgccgcgttttacatgccgtaccgagaattaatttcattttacgaaaagttaacccgccattgctaccttaattttttaaaacgaagttacctctgtcagggtcaaaagcacaattatctcttcctacaatcattgaaactgcgattgattccctgctcaaaggatgagccgcccttgttttaacaagatgtattaatgccattttatcatacaacatacaaacatttgaattcattgaattcctcataaataccccatcttctggttcacataatgtaacagggcatgttcgtaagctctctggcacttgcaattgtgcatgctccacattaaatgcacatacttcaattttatctaacaactcctctaactggtagttagaaagcaaatccatattttcgagcatctcaatttcacgcagtactgtaacttcacggcttgtcaaactaccatgattaagtgtacgttcaatatgttctatatattgaaggccaatctggatattatcattcgataaaccatcctggttaagacttcccataaaatatccatttacctgcataggtcgtattgacaccatcaactcacccagtcttatttgagcttctccacgaatagtctgattacgtatctcagacaaggtttcttgaggaatgtcagacaaaaaactaaccccaggtaaaatataaggcgttaaatctacaggcattcctctccctccattttaataacttaattttgctttagtaaaaaataaaagtacataaaac

SEQ ID NO: 463 - DNA, 3670 bp, Escherichia coli
  Strain O55:H7
  modified_base (917)..(917): a, c, g or t
  modified_base (937)..(937): a, c, g or t
  modified_base (1042)..(1042): a, c, g or t
  modified_base (1375)..(1375): a, c, g or t
  modified_base (1431)..(1431): a, c, g or t
  modified_base (1580)..(1580): a, c, g or t
  modified_base (1615)..(1615): a, c, g or t
  modified_base (1716)..(1716): a, c, g or t
  modified_base (1722)..(1722): a, c, g or t
  modified_base (1743)..(1743): a, c, g or t
  modified_base (1783)..(1783): a, c, g or t
  modified_base (1801)..(1801): a, c, g or t
  modified_base (1855)..(1858): a, c, g or t
  modified_base (1875)..(1875): a, c, g or t
  modified_base (1879)..(1880): a, c, g or t
  modified_base (2090)..(2091): a, c, g or t
  modified_base (2099)..(2100): a, c, g or t
  modified_base (2500)..(2501): a, c, g or t
  modified_base (2894)..(2894): a, c, g or t
  modified_base (3169)..(3169): a, c, g or t
  modified_base (3296)..(3299): a, c, g or t
  modified_base (3416)..(3417): a, c, g or t
  modified_base (3428)..(3428): a, c, g or t
  modified_base (3508)..(3508): a, c, g or t
  modified_base (3604)..(3605): a, c, g or t
  modified_base (3668)..(3669): a, c, g or t
tatcattaattatcacttacaacaaaaagcttctctttttgtatcaaagtgacattcatcttttctcataatcattgattctgttataggttctcgactcagaggatgagctccaccagtttcaacaagttgcactaacgcgtccttatcatatagagagcatatctcagcacctcgtgagtttctcatgaacaccccagtctcaggtgtgtccagcgttatcgggcatgtcaaaaatgactccgggcaagaaaagtgattagaatcaggtctaaataaacaagaatttattttttccattaatattttattacttgttttattttctctgtgttctgccatgacactctgaaaatagctattaacactacttaaaaaatcgacacctccatttaattgcctttccagagccacagcccttctctccattcgatgctcacgccccaatagcctatccagtaagcctcctctcaccggttcaactgaaaatccatccagtagttggacatagtgaacagaatattggccactaccaatggatattcttattccactttcaagtctggcagcatcctgcaaagactgtactcctgcaggagataattgagatatacttgggatacttaaggtggtaacaggcataaaaacctcattcagtaattcatatcagtttgcaggatgtttcattaaataaaataaagggtaatgttcatttcaattaccctttataacgaagtttcctctggtatcgtcataaatgcattcttcatgttttacaattattgatgccgttattggttcccgggtcagtgggtggggtaagccttcaccaaccaaacgagaaaatgcagcggcatcaaataaagtacatacatctgaaccatctgaattcttcacaaaaatacctttttcaggcngctccagtgtaattggacantgaatagcctcaagcgggcactgaagtctctctggacaaacagaaaacttacattgagatattttgttctgaatactctcttgcgattgtgcttcacctgagtcngaaagcatacttagcattctctcaccaagggctcgaggaccactattaaatcccaaaagcaataactcagaaagcaatccgccattaccgccactggatgaaaagcgcccattagtagaatcatacacaatactgacagtttcaccaccgactgtaatatctccgcgcccattggctacaattcgggcacgaacaacctccaccccaagattaaatgaatgtgatctaatatctgaggttaatggcataacaaagctccctattttaatttgaactccagacttaaatagctgtaacaaacatcccctatacgtgacaacaaaaaccagagcnggactccggtttttgtgaacccgtcggctatttcatcccgccaatattttcccacntcccgtcagcacgtaggatttgcagcggtcttaccacgcactgtatctgctttttatccgcatccagtatcaccacctgygtgattaccctgtcctgctccggaataatgccattctcatctgactccaggatgtctgccggccccagncgcagttgtactgtaagcgactgcccgtgttcacngtcatcatgctttccgcaaccacacagacgctccataagctttctcaaaatattcatgtcattctcctgttctgcctgtatcactgcccacttcatccagncccttnacatcctgccacggcccgtcnccaaacctgacctgcaaatgctgaaaaaaaccctgaaccngtgtggcatctttggggncaagaaaggtcagtccggtgatgagtgcgccatctgtatccgggaaccagccannnntgtttgtctcaataatncctnncggccccagacgaaaacggatttgtgtctcccccgggtcgcccttcggtccctgaggtccggttgcccccaccgggccagccgcacctgtttctcctttcggtccctgtgggcctgccgggcctgccgcaccggtatctccctttggaccctgtggacctgcatttcccgtcagaccggtctctccccgctctcccctgtcacctttcgnnccctgcgnncctgccggaccagcatcacctgccggtccccgttcgccggttgccccgacagggccggtgtcaccgcgctctcccttatcacccttcggcccctgaggacccgcgggcccctgttccccctttggcccgggaggtcccaccacggtggggattcggtttacggcctcttccgccgctatcctgctttgttccgctgactgtgcgctttctgctgactcccgggctttttctgttgcggtcgttgcatccctggctgcattaccggctgcactttctgccgtctttcttgacaattcagcttctgctgcactttgtgatgactcactggctttttgagcggccgcagaagccgaggacgaggacgcatcctctgactgctttgctgaggctgcactttctnncgcctgccgggctgactccgatgcctcccctgctgaagtgtcagcatttgcagcgctctcttctgcctgactggctgatatgccggcattcctcgctgacgtctccgcctctccggcattcttcttcgcctcctcagcgtgacgcgccacctcttccaccatcagttcaaaacggcgcagagcctccggacgggcatcatcctccgtcatggcaccgagaaaatcattcagcgtaccgggttgagaatcttcatacacggtgatggtcccggcatgtgacggcgggaatccttccaccaacagaatgacgctgtactgaccgtactcaacgtccatgctgtaacgaccggcttcatccggattttcagaggccaccgtgctcaccaccaccgngctgctggtccgtctggctttcagttgaatggtrcagttctctaccggttttcctgtgccgtctttcagtacacctgaaatctttactgccatattcaccccacaaaaaagcccgcctgaamcggcgggctgtcataacactgtgttacctggctaatcagaacttataaccgacacccacgatgaaaccgtcagtgcgccagtcgccactgccggagccttcataagcrrcatcaacggccackgattcggtcgggttaaactgcacgccagcnccccacgccagagacgtgttgctgtggcgaccgtcatcacttccggtcagcacatcgtgcgttttccccttgttgtcagttacgcgragataatccccggagaaagtcgacacacggctgtaagccnnnnccgccatcgcatacgcgctgaaccattcattcacgcgcacagacggccccgccattacgctgaaccagcggttacgcacggaatcttcatgccagcgggtatcgctgtaacgggtannctggcgattcntgtctcctgcatagctgaatgacgtcaccagccccagygtgtccgtraaytcataacggtatttcacgttaatcccgttnagatcatcgctgccgggaacgttcgtcgagrcatgaagataccccgcgctcagcgtggactgatgttcagaygcccatgcaggcgcaccggatacnnycagacaratggctgcggacaaaatggcggcataaagtttacgcataattacctctcgctttnnt

SEQ ID NO: 464 - DNA, 84 bp, Escherichia coli
  Strain O55:H7
ttataaaattcagctgatactgatrcctgctgtggattttttcatcaccacaaccagcagatcgctgatacttgctgtgggata

SEQ ID NO: 465 - DNA, 74 bp, Escherichia coli
  Strain O55:H7
actccagcgtcatgtgaccgtgaccggcaggcatatcaataacgccactgtaaatcagcgtattatccagcgcg

SEQ ID NO: 466 - DNA, 53 bp, Escherichia coli
  Strain O55:H7
  modified_base (3)..(4): a, c, g or t
  modified_base (28)..(29): a, c, g or t
ccnnactatcagacggcatgaggagtanntatcagtatgctctctctcatgtt

SEQ ID NO: 467 - DNA, 53 bp, Escherichia coli
  Strain O55:H7
  modified_base (5)..(6): a, c, g or t
taacnntttgccggtcaaacggctgatcgtcataaaccctgacggtaatggtc

SEQ ID NO: 468 - DNA, 35 bp, Escherichia coli
  Strain O55:H7
  modified_base (5)..(7): a, c, g or t
  modified_base (24)..(25): a, c, g or t
  modified_base (32)..(33): a, c, g or t
ccggnnnacgggaatcccgggggnnagctttnncc

SEQ ID NO: 469 - DNA, 92 bp, Escherichia coli
  Strain O55:H7
aacgagatcgccttcaatctggttcgcggacagttttcccagaacccgacagttctcgttaatcgtgacgttgttgagcgtcccggaattcg

SEQ ID NO: 470 - DNA, 261 bp, Escherichia coli
  Strain O55:H7
  modified_base (131)..(132): a, c, g or t
  modified_base (259)..(260): a, c, g or t
tatcagcatttcttgcggtcagactgccctccggcgtcagggaaaacgtcgggggattgccggacgaggtgatactcaccgcaaacagccgcttcaggaacacatcgttcatgaacaactgattcccctgnnccacaaataacggcgtggtgttgccgtcctccgggttaatcatcgcaatacggtcagccagcagcagtatgttgctcaggggctggccatcagtatcctcaatccccgctccaataccggcaacatnng

SEQ ID NO: 471 - DNA, 211 bp, Escherichia coli
  Strain O55:H7
cagccaggtcatcatttgtgtccttctgcacgcgctgtatctgctgtatggtggcgctctggtcttccagcgttttactgaccgtctgtgtgatttcattgcgggtttcggtgatggtggtcttcatctccgccatctcatccgcaagctggctgttgtctatcagctcccacagcccctgagccagatgcagttttcctattttttcccg

SEQ ID NO: 472 - DNA, 29 bp, Escherichia coli
  Strain O55:H7
  modified_base (2)..(3): a, c, g or t
  modified_base (15)..(18): a, c, g or t
cnncagatacccttnnnnatcattgctgg

SEQ ID NO: 473 - DNA, 142 bp, Escherichia coli
  Strain O55:H7
  modified_base (4)..(5): a, c, g or t
  modified_base (67)..(68): a, c, g or t
tggnntccacaaacgcagatttccccaccaggttgacgctgcgcacgtaaaaccagaaatccttccnnggcttaatgtgcgggccggatacactccactgactgccggtccccagataacgggcagaggtttccacctgaga

SEQ ID NO: 474 - DNA, 172 bp, Escherichia coli
  Strain O55:H7
  modified_base (3)..(5): a, c, g or t
  modified_base (7)..(7): a, c, g or t
ttnnntntccgaaaaccagaactcaaactgtaccgtcgggtcatacaccgcaagacgcgggaccgctgttatctgaaaatagcccggtgtcagctcaatcgtggcgggtaccgcaggtgcattaatcctgaacgtggtggtggccggttccccctgctggccataactgtta

SEQ ID NO: 475 - DNA, 38 bp, Escherichia coli
  Strain O55:H7
ggcagaccactgaaacgatgctctgtatccgcagtgat

SEQ ID NO: 476 - DNA, 52 bp, Escherichia coli
  Strain O55:H7
gcctgtgccagatactgaccgtcagccgcgctcacctccaccgtcaggtgct

SEQ ID NO: 477 - DNA, 78 bp, Escherichia coli
  Strain O55:H7
  modified_base (21)..(21): a, c, g or t
  modified_base (38)..(41): a, c, g or t
acgctgttcagggtgcctgantgcggctcaaagctggnnnngttatccacgatggcttctttttccggtacgtgctgc

SEQ ID NO: 478 - DNA, 44 bp, Escherichia coli
  Strain O55:H7
  modified_base (5)..(6): a, c, g or t
  modified_base (27)..(27): a, c, g or t
gtgcnntccgtgttttcccggatgganacacagcggaacaggcg

SEQ ID NO: 479 - DNA, 31 bp, Escherichia coli
  Strain O55:H7
  modified_base (24)..(26): a, c, g or t
  modified_base (30)..(30): a, c, g or t
gggtcacctcacggtccagtgtcnnngtgng

SEQ ID NO: 480 - DNA, 42 bp, Escherichia coli
  Strain O55:H7
tcgttatcacagatttcaataatgtcaccgggtgtgtgacgc

SEQ ID NO: 481 - DNA, 37 bp, Escherichia coli
  Strain O55:H7
  modified_base (11)..(12): a, c, g or t
ccaccgtctgnntttccagcagtccggtctttatcac

SEQ ID NO: 482 - DNA, 18 bp, Escherichia coli
  Strain O55:H7
  modified_base (4)..(5): a, c, g or t
tcannaggttgcgcccgt

SEQ ID NO: 483 - DNA, 49 bp, Escherichia coli
  Strain O55:H7
  modified_base (41)..(42): a, c, g or t
  modified_base (46)..(47): a, c, g or t
gggtcttccaccagttccgtggaggtctgccagccgttctnngggnngg

SEQ ID NO: 484 - DNA, 30 bp, Escherichia coli
  Strain O55:H7
  modified_base (8)..(8): a, c, g or t
  modified_base (10)..(11): a, c, g or t
ctccaccncnntgtggcggtccttcagggc

SEQ ID NO: 485 - DNA, 25 bp, Escherichia coli
  Strain O55:H7
cacgccgttatcatccaccaccaca

SEQ ID NO: 486 - DNA, 94 bp, Escherichia coli
  Strain O55:H7
  modified_base (84)..(84): a, c, g or t
cataccggcatacagcgcatcgccgagcagaaatcactgagcacatcccatgccttacgctgttgtgacaggtacgcattaaangtcatccgcg

SEQ ID NO: 487 - DNA, 23 bp, Escherichia coli
  Strain O55:H7
  modified_base (13)..(13): a, c, g or t
  modified_base (22)..(22): a, c, g or t
atacagcgcccanttgtccacnt

SEQ ID NO: 488 - DNA, 36 bp, Escherichia coli
  Strain O55:H7
  modified_base (12)..(12): a, c, g or t
aggcaccaggcngggttattgctgtatgccggtttc

SEQ ID NO: 489 - DNA, 186 bp, Escherichia coli
  Strain O55:H7
  modified_base (29)..(29): a, c, g or t
  modified_base (32)..(32): a, c, g or t
  modified_base (113)..(116): a, c, g or t
  modified_base (161)..(161): a, c, g or t
  modified_base (181)..(182): a, c, g or t
  modified_base (184)..(184): a, c, g or t
ggatatggtagttcaccgtcatctgctgnccnccaaactgctccgcatccacctgcagccccacaatcgccgtgttcgggtagcactgtttcacatcgatgatttcggtgtannnngaccagagcgtcttattctgcagctggtccgaggtgctgtccgcngtctcccggaccatccgganntnaa

SEQ ID NO: 490 - DNA, 121 bp, Escherichia coli
  Strain O55:H7
gcagattatccagaatcaccgacgccagaaactgcgaggtggtcttgccgttaatggtgacatccttttccgtcacccagttaccgttacgctgcaactgaatcagcagtcggacagaaga

SEQ ID NO: 491 - DNA, 86 bp, Escherichia coli
  Strain O55:H7
acggtcgccctttgaggtggtctccaacagtgactgcaccccgaaggtgacccgcaggcggtcaatgttcgcggatgtaatggtgc

SEQ ID NO: 492 - DNA, 155 bp, Escherichia coli
  Strain O55:H7
  modified_base (148)..(148): a, c, g or t
  modified_base (154)..(154): a, c, g or t
gaccgctgtcacaccatgtatcacaggattaccgtccgtgtccgtcagcggggttttgttcaccaggatactctgcaaccccttcaccggaccttcaatcggcccttcaccaatggcatcaatcacgctcatcatctgcgtggacttnagattnt

SEQ ID NO: 493 - DNA, 456 bp, Escherichia coli
  Strain O55:H7
  modified_base (15)..(15): a, c, g or t
  modified_base (452)..(453): a, c, g or t
  modified_base (455)..(455): a, c, g or t
ctgccgccacctttncccataatgttcctctcaattggtattattaatcgcagtgataggatattgcacagctattgcgcgatatcatcagaacgctgtttgttaccctgtaaccagcaagctcagtctgttaacggaattaatgagggttttatgaaatgtaaaatcattgctgccattgccatgctgacagcagcatcatgcggatacgcagcagaacaggaagtcccaatgaaccttgtcagtgctgacggaaaagaagtcagcattggaaaaataaccattcaggagaccccctacggtctgctgttcacaccagcccttcactctctgtctgaaggcattcatggttttcatgtgcacgaaaaaggaaattgcgccccggcactgaaagacggaaaaccggtcgcagcattatcggctggcggtcactttgacccgaaaaacaccgnnana

SEQ ID NO: 494 - DNA, 175 bp, Escherichia coli
  Strain O55:H7
  modified_base (29)..(32): a, c, g or t
tggcccctggtctccggatggacacctgnnnnacctccctgcgctgttcgtgacgcatgacggaaaagcgaactacccggtcctggccccgagactgaactcattaaaagagattaaagggcgttctctcatgcttcatgctggcggtgataaccatcatgaccatccggagccc

SEQ ID NO: 495 - DNA, 240 bp, Escherichia coli
  Strain O55:H7
  modified_base (3)..(4): a, c, g or t
  modified_base (37)..(39): a, c, g or t
  modified_base (232)..(232): a, c, g or t
  modified_base (238)..(238): a, c, g or t
gcnncatcattcaataatcagtcaggtaaggggcggnnnccttacctttattcctcaggacgataaatcctttctccctgaaaagaacggcacatcctccctctctgagttaatgtttttgtcgtgacataagaataattccttacactcaatcttcgtaacgctcccgcagttcctgtccgtgagcactgcgggattttttcgcttttatgcctgccgcccgataaccacnaccttncc

SEQ ID NO: 496 - DNA, 201 bp, Escherichia coli
  Strain O55:H7
  modified_base (28)..(28): a, c, g or t
  modified_base (115)..(115): a, c, g or t
  modified_base (169)..(172): a, c, g or t
  modified_base (199)..(199): a, c, g or t
gccttcatcacgggtactgatgtcctgngagattcgccgggagccaaccagcatttccccgtaaggcaccggcatcgggttcccctgggcaatcatgttatccagcgaggaaaantacgtgttctgtctgccgttatccgttgcgcggtaatccggtgtttttgccttnnnngccagcatctgggccacaccgcccagnat

SEQ ID NO: 497 - DNA, 50 bp, Escherichia coli
  Strain O55:H7
  modified_base (25)..(25): a, c, g or t
  modified_base (42)..(43): a, c, g or t
  modified_base (48)..(49): a, c, g or t
tgatgccccggcagtgaagaacgancccacgatggctgccgnncccanna

SEQ ID NO: 498 - DNA, 312 bp, Escherichia coli
  Strain O55:H7
  modified_base (2)..(2): a, c, g or t
  modified_base (10)..(10): a, c, g or t
  modified_base (31)..(31): a, c, g or t
  modified_base (44)..(44): a, c, g or t
  modified_base (122)..(122): a, c, g or t
  modified_base (221)..(221): a, c, g or t
  modified_base (307)..(307): a, c, g or t
tntggatgancgttccctcacccagctgttngtgaagacgggcntacaccgcctccggtgccgtgtcatcaccggcaatacgtatctggtaccagccttcgttcatctgacggcggaatccnggcatctgcatcgacagggcacggatggcttccgctgccgtgttcacatacaggctgaggcggcggccaaatcgttgtaaatccccgtgaaggcagatncgtgccagtggcggtgacgccaggctgaatgcgttcgtcgttgccatttttcggaatacctctcccgtttactcagttgttcaggnagatg

SEQ ID NO: 499 - DNA, 58 bp, Escherichia coli
  Strain O55:H7
gcggcatgattggccaccgatgcgccaaagcagcacagcaggatatcgcccggctgtg

SEQ ID NO: 500 - DNA, 435 bp, Escherichia coli
  Strain O55:H7
  modified_base (14)..(14): a, c, g or t
  modified_base (26)..(26): a, c, g or t
  modified_base (29)..(29): a, c, g or t
  modified_base (251)..(251): a, c, g or t
  modified_base (277)..(280): a, c, g or t
  modified_base (287)..(287): a, c, g or t
  modified_base (423)..(423): a, c, g or t
tattgtccaggtanaggttctgaccnttncgccaccagtcatcctcacgctcaaaatccggcatatcaattcccgccagatggtatgcatcccggaacagcgtgtaacagtccgtcaccccgtgctcaaagcgccgtcctgtcagatgtggcacacagcggaatttatgaatttccccccggcagaccagccaccaggacagtgcactttttatctgcagccgccggtcggcctcgctcagccagggcagnccaccgggatgactgtggaccagtgnnnnaatctcnccctgcatctctgcccgcagccagtcttccggtgcaatacgaaaatacgcctccggctctgcagagatattcacacaagggatataccgctccccctccggcgttctcaccacgaagccgcacgactccgcaggcncacaccgccggg

SEQ ID NO: 501 - DNA, 104 bp, Escherichia coli
  Strain O55:H7
tttactgcgaaagtttattaatggaaaggaaaccgccaaaattagccaccatgccgcgcatctcacacccgcgcatgcacttgctgcatctgtccttacggata

SEQ ID NO: 502 - DNA, 175 bp, Escherichia coli
  Strain O55:H7
  modified_base (4)..(7): a, c, g or t
aggnnnncatggccgtcagctctgacatctgctccaccacccagcggtcgctcagctcctgctccgggtccgcttccggattgcccgccacaaaattcaccgcatccagaaaacgggcatacacccggcggcggaccaccgtggcccccaccaggctctgcaggtcctccgccat

SEQ ID NO: 503 - DNA, 20 bp, Escherichia coli
  Strain O55:H7
gattcgacaccgtcagcgac

SEQ ID NO: 504 - DNA, 41 bp, Escherichia coli
  Strain O55:H7
  modified_base (8)..(8): a, c, g or t
  modified_base (13)..(13): a, c, g or t
gccaggtnaccgnctcccctttttcattcagctcattgcag

SEQ ID NO: 505 - DNA, 406 bp, Escherichia coli
  Strain O55:H7
  modified_base (80)..(80): a, c, g or t
  modified_base (281)..(281): a, c, g or t
  modified_base (296)..(296): a, c, g or t
  modified_base (299)..(299): a, c, g or t
ggtgactgctctgatttaaccgactcgttcagactttcttcgtgaatatcctgcatcagttcaccacctgcttaaactcngcgctgaattcaacccgcagcatgcgaacccgtgatgaccaggcggcacaggtcacctttatctgccgccaggcataaggcggtgtccacagaaacgccttccagccaccgtgctctgccaggaatgcctccagatgtcgggcctcctcccgggtcacggaaagcgtcacacggtatgttttcaggtcagcattcagcccngccgccatacgctgngantacccgtcaccaaaacgcacttcacgcaccgatggctgcgagttcacctccatatccggcttcactttccagcggaaggttttcatcgtccgctccctgataacata

SEQ ID NO: 506 - DNA, 64 bp, Escherichia coli
  Strain O55:H7
  modified_base (45)..(45): a, c, g or t
  modified_base (62)..(63): a, c, g or t
agccggagctcatcctgggcacccttgcgggccatgtcatacacngccttcatcakctgcgnnc

SEQ ID NO: 507 - DNA, 181 bp, Escherichia coli
  Strain O55:H7
  modified_base (2)..(2): a, c, g or t
  modified_base (47)..(47): a, c, g or t
  modified_base (53)..(53): a, c, g or t
  modified_base (86)..(86): a, c, g or t
  modified_base (140)..(140): a, c, g or t
tnccgtcgttctgaatcaccacgtgattgttctgattaaaattaatnccttcngcccgccgcatctgcgccggacttccggcaccncccacataaccaccttccgcatagccccgcatcaggcggtacaggttgccgacnccaatccggctggttgcytccttcgtgaagacaaaytcccc

SEQ ID NO: 508 - DNA, 182 bp, Escherichia coli
  Strain O55:H7
  modified_base (22)..(22): a, c, g or t
  modified_base (36)..(39): a, c, g or t
  modified_base (76)..(76): a, c, g or t
  modified_base (91)..(91): a, c, g or t
  modified_base (93)..(94): a, c, g or t
  modified_base (166)..(166): a, c, g or t
tcccgtaaatcccccggtcgcnaaatggaagttcgnnnncgcagcctgaatggccgtccccgtggaggcagacgcnccaccaccgaaagcncnnccaatggcgctgccgatactcccgacaatccccaccattgcctgcttcagaaaaatctctgtcagcatgganagcacggaacgggtga

SEQ ID NO: 509 - DNA, 115 bp, Escherichia coli
  Strain O55:H7
  modified_base (53)..(53): a, c, g or t
cggtcagcatccccgccatattctgtgcaataccgtcaaaggtctgcgtggcngcacttttaacctgcgaaaaactgtccgtcgcactttccgcccactcgccccagccggactt

SEQ ID NO: 510 - DNA, 138 bp, Escherichia coli
  Strain O55:H7
cttccacgaagctgctcctccgcagaccaggtgttcttcagtgccgatgtggccttcgccagcgcagccggattatcaccgtacacgtcacgaaggcgctgctcttccgactcccgctgcgcctgacggtcggtgagg

SEQ ID NO: 511 - DNA, 54 bp, Escherichia coli
  Strain O55:H7
  modified_base (8)..(10): a, c, g or t
aaccgcgnnncctgctgtgccagctcattcagccgtttctggtgttcaaccttg

SEQ ID NO: 512 - DNA, 29 bp, Escherichia coli
  Strain O55:H7
  modified_base (26)..(28): a, c, g or t
gctggcgtttgtactccagcgtctcnnnt

SEQ ID NO: 513 - DNA, 798 bp, Escherichia coli
  Strain O55:H7
ccagcagggatttttcctgctcagataactgccgtttcgtggctgcctctttcaggaccgcatactgattttccgctttccataaatcgcgacgctgctggctgattttctcattcgcaccgctgtgtttttccagcgtccggagctcggtttcaagcgccagcagggcagcatgcgcctggtcttcctgacgctcaccggctgacactttgactcctgacgacttcggctttttcagcgtcgattcataatcctttttcgccgccgccatcagcgtgttgtaatccgcctgcaggattttcccgtctttcagggccttattcagttcttcctgacgggcggtatatttctccagcggcgtcagcagacgctcatacgccttctgcgcctctccggtatacttcagctgtgatgcgtcccgttcggcccggtccctggcggccagttcaccggctttttccatatccgactgcagcgtggccgctgccagccccagacgggcattttcccggtcattccatgcgccctgcaggttggcccggaaagaggcggtttttccccggcgctggctccggctctggtaccactgccattttttatccgcctcatcaaatgccttctgtgcactggcgagcatatccgctgaggactcaggacgaccgatatccagaatggcatcccacatcgatttgaatgccttccctgttttatccgcccaggtctccagtgttcccatgttttctttcaggcgacgggtctgctcatcaaagcctttcgtggcgatatcgttcgccgcct

SEQ ID NO: 514 - DNA, 51 bp, Escherichia coli
  Strain O55:H7
cgctgcagctgtgcaacatacgcaatctgctctgccgtcacgttacggaac

SEQ ID NO: 515 - DNA, 209 bp, Escherichia coli
  Strain O55:H7
  modified_base (203)..(203): a, c, g or t
ccacctccacaccggatgcagacgcaaaacgcgcgacactctggttgatggcatcaaactgttcaccaccacgcacaccggcattcaccagggctgccagtgactctctcgcctggttaaacgtcagccctgctgcctgcccggctcttgagagagtcagcatacgatcggcagtcagtccggactgattaccggaaagaacnagggtt

SEQ ID NO: 516 - DNA, 660 bp, Escherichia coli
  Strain O55:H7
taccaggcgtacaccagcgcacctgtcgccaccgccagcgaggtgaccccgaccatcggcagggtgatcgcaccggcaagccccctgaacatggggatcatcccgccgaaggagtccttcacctgaccgccctgttgcagcaggatcagccagggattctgaccaccggcaagctgcgtggcgatatccgtaaactgtgcgggcagggttcgcatggccgctttatactgcccgacggaaatcccggctttttgtgcagccagcgcctggcggctcaggccctgttcaacagcactggcggtttttctgacgtcggtatccagacctgaaaaatgacgccttacccggctcatctgctcatcgaaacggaccgcatccagactcaggtcaataacaagatcaccaaccggctgggacatatctcacacctcccggaatccccgctgaagccatcattaatgcggcatcatccaccatgacatccgccacatccgcagacgataaaatatcgcgccctccgtccccaccgaaccggacgcctccggcaagtcctgccgctttctgcatcagcattttgtcctcatccggcctctccacctgctcttcctcatgccgggggacaagcagactgaaatcagagggatgcatatccggatcgca

SEQ ID NO: 517 - DNA, 23 bp, Escherichia coli
  Strain O55:H7
  modified_base (5)..(6): a, c, g or t
  modified_base (17)..(17): a, c, g or t
aaaanngcatatccagntgggta

SEQ ID NO: 518 - DNA, 86 bp, Escherichia coli
  Strain O55:H7
ccatctcacgcgccagtctgagggcaaaattcagctcgccgtcgaagactttcccgcagaaaaatcatcatcagtcagcgcgttat

SEQ ID NO: 519 - DNA, 24 bp, Escherichia coli
  Strain O55:H7
aatggcatccgcaggccaggtggt

SEQ ID NO: 520 - DNA, 19 bp, Escherichia coli
  Strain O55:H7
ggcctcattcattgacggt

SEQ ID NO: 521 - DNA, 373 bp, Escherichia coli
  Strain O55:H7
  modified_base (130)..(130): a, c, g or t
cggatggttatgccacagggacatcgccaccagaaacgcgccggttctgacgagatcttccacgcttacctgcaggttgccgctggattctgcctgttctgcacgccgtttcaggagggcaagatgctcnatacgctgcagcgcagacaattcggaaagcgtgacagacacaccgttatattcaaattgttctgttttcagaaacatgtatgacctccgtttaccctgcagcgcccgcttcagtaacggtgacttcagccactgcggcgaactgaccatttccgctcaccacagggatctgcaccttacctgtcgccacgccgtttaccgtaattgtcatatctttcacactaatggtggctttcgacggatc

SEQ ID NO: 522 - DNA, 6282 bp, Escherichia coli
  Strain O55:H7
  modified_base (155)..(155): a, c, g or t
  modified_base (164)..(164): a, c, g or t
  modified_base (166)..(167): a, c, g or t
  modified_base (171)..(171): a, c, g or t
  modified_base (518)..(518): a, c, g or t
  modified_base (521)..(521): a, c, g or t
  modified_base (528)..(531): a, c, g or t
  modified_base (634)..(634): a, c, g or t
  modified_base (1098)..(1098): a, c, g or t
  modified_base (1717)..(1718): a, c, g or t
  modified_base (2110)..(2110): a, c, g or t
  modified_base (2500)..(2500): a, c, g or t
  modified_base (2503)..(2503): a, c, g or t
  modified_base (2669)..(2669): a, c, g or t
  modified_base (2695)..(2698): a, c, g or t
  modified_base (2706)..(2706): a, c, g or t
  modified_base (3038)..(3038): a, c, g or t
  modified_base (3175)..(3175): a, c, g or t
  modified_base (3188)..(3188): a, c, g or t
  modified_base (3209)..(3209): a, c, g or t
  modified_base (3213)..(3213): a, c, g or t
  modified_base (3314)..(3314): a, c, g or t
  modified_base (5584)..(5584): a, c, g or t
  modified_base (5710)..(5710): a, c, g or t
  modified_base (5837)..(5837): a, c, g or t
  modified_base (6020)..(6020): a, c, g or t
  modified_base (6065)..(6065): a, c, g or t
  modified_base (6257)..(6257): a, c, g or t
aaaccgctctgaacgtcttgtctgttgcactttccggctcaaaagaaaccgtcagggtggttgttttcccttttgccaccgtaccggatgtcggcgtcaccttaatcgcagtgaccggcgtaattttgctgcgttcttccgctacagaaggtttncccacgttngnnactntcaccgtgcgggtgatcacttctttcgccgtcacggccttaccgatactgctgacccagccacgaaacacatccaccgtgccattcggaaaacggattttataggcccggacatcgccgctttcaaaccagcctataagccctttctggccttcctctcccggtttccaggccagcgtaaaactggtatcacctgcagatttctgcccctgcccggtcgcggtccagtccgcgtcttcatcatccaggtagttatcatcgtaggattctgccgtcatctcgcccggcgtcagatccttcaccttagccagtcgctgccagtcatcgtctgacaacgggtttgcatangcntcacccnnnncgttgtaaacccacagagtggtaccggcaccttttaccggctcaaggggaattcgtgtttcggcttgacgtagcccggacgtaacacgcgggtttcactaccncgatgacgcagcacttttccttcaacaaccggggagacataggccgccaccggcgtttttccggtaattttgtccagcatcacctcttcggtatggaaattcaccgtacggcggaaaaacagctccagaaacagcgcacgaaatttcactttttgttcggtataaccgagtaactggcgggtcgtaaacaatcccataaatcagttcctttcattcagaaatcagtcaggccaccgcggtggcctgataacgtgttacggcagcgccgcgtgactcagggcactgccggcaaaggcatttgcctttttgtgttcatccacactgtcaggccagcggattgcctccgtcgcaaaggtccccgacttgtaatacgtcagtaccgtctctgtgccttcaagcggcagtaccagtatgccaaccgcactaccggctttctgtccgtcccagaccaccagtttcccggnagcttcatccagcatcaggggcgtcagtgccggtgttgccgaggaaatcccgctgctgcctgtggcggtatgagccggatcattaccggcaaaaatacgtacttccgcacgctgttcagtgatggttttcgttaccatattgtaaaaacctcctgttgatgatcagcactgacttcatggcatggccatgagcattttcacgtccgcatcaccgtctgctgacgtctgtggcacgccaccctgtaccgctgccggtgaatggttcgccatgatgcgttcaaacagggcggttgtggatgcagagaccggttctgccttacctgatcccgcagccagcacagcccgggcgctctccacagtcattcccgggcaggcagccagctgttcagcctgcgcctcagccccttttgcctcatccagtgccatgatctgatcacggagtgagggtccggcatccgcctgcggtgaagcagccaggatcgggcgggctttttccaccgtcatctccggcatcgccgccagcgttgccgccagttgttcacgaccgttcgcttcttcacacgccataatgcgatcggcttcactctgcgtggatgccaccggctgctgcggtgccgcnncggccagaatcgcccgggcctgttcaacgctcatgccctgttgtcctgccagcatcgtggcaagctgttcacgtcctttcgcttcctggcatgtcaggatccccatcactcgctggttctcctgcgcggcggcttccgttgcagttaattgcggcatagtgcctcctctgacattactgttcagcgccgtggccatcacactgatggcatccgacgcattgattaattcatccgccagcccggcctcaatgccggactgaccttcaaaaacggcggcctctgttcccgtgacggcatcaacagacagaccggtatacatcgccactttttcggcaaacatccggcgcgccgcatcaatgcgctgctgcatgtcctggcgaacctctgccggnaacgcttcaaactgattgccatccaccttgtgcgcccctgagtaaatcagcgtgatatccacaccggcctgcgccagatgaccggcatagctgacatggctcatcatcacgccaatggagccgatacgggatgtctgggtaaccagccgtcgggagcaggccgacgccagcagcatggctgcagaacaggccgtgtcattgcacagtgcccagaccggcttctgctgacggaggcggtaaatcatgtcagcgcagtcaaacgcgccggaggcctgcccgcccggactgtcaatgtccagcagtacgccccgcacctggctatctgccattgcctgctgaagacaggcgacaatgccgtcatagccagtcattccggaaaatggccgcatnccncccagccggtgcaccagcgtgccggtcaccggcagtacagcaataccgttcaccacccggtaaacacgggccggtcgtttacctccggccatgtactcgtccgtttcagccagcattccgggagcatcaagctgtacctgctgctgtggtaccgaaagacttgctncccccatctcgcgcccgagcgcgcannnnaaaacccncgcataggcgggctccagaagcagcggttcattgaatgctgcggcaataatgtgtgaaagattacgtctcacggggtgttgtctcctcttccggcctgcgactctccgctatctgctgctgatacgcctgcgctatccacaccggacgtgagagtccggctttttcccgctctgcagattccctgacctgctggcggaaaatgtcctgataatcctcgcccatcagcgccagctctttctcatacgtgctcagtccggcctcaatgcgcatcaccgattcctgaacctccttgagcccgtcaatggccattcttccggctccaatccactcngcccgtgaccaggctgatcgcgcctgataaaaatcaaaacgtgcccgtggcggacgaataatcccccgaagaagtgcctcttccagccagcaggaaaacatctgcgtggccagccgggacgcaataaattttcgccnccccataaaatancgccacgactcattggcggangcgngggcacttgaataactgaccttcgagtaatcacgggacaactgttcgtaggaaacgccaagaccggcggcgatataccgcagcagcgcctgttcaagcgcngaaaatccattgtctgaatcctgcgcggtctgaagtttcagatcatcaccggggaaaaggtgcggaattttgacaccgcccagcgtcacgctattcgtgtcataccaggtggagaacttatccagaatattaataagcggattatccttctgcccctgcggcgcaccggcgatatattcaaaggccttttcggtatcaaggtcactttcaatcgtcgctgcatacatcgccttcactatggccgactgaagctgtgttgcctgcagggaatcgagcatcttcagccgttccattacgctgtaaaactgattggccccacgggtctgcccgtcctccaccggctcgaaaatatgcagcatggccggacgcccggtgggaagttcacgcgggatccgttcccatcgtccactcccggagcgaggaaaatcatcctcacagatatggtacgcaacggcacgaccatatcgatcgacctccacaccggcccgcagaaaacggttccccataccgtgtcctggcgtgtccacccgtttcggactcacggctttaaaacgcgtacgaaacagttgcgtgctctccgtatcccagaccggctgcacaaagatttcgccgttaaacgcatgaacgcccacaccttcacgaataaattccgtaaacgtgcgttttccttccacgtcgatctcgccagacatcccttctgcgtattctgaccaggccgcctccacctcatcgacaaaactttttgccgcggtctcccgcatccccagccagcgccagttcggacggtagctgatcagaaacatatgcccgacaatatgatccttatgcagggccaccgcattggccgctatcccgttattgcgcaccagatcatctgcccgggcattccccagacgcaacgcaggcagcagggctgcatcggcactctgcgccggtggcaaccactccgccatttgcccgccaaatcctgcaccgcccccgttgtagctgagactctcacgaagcggaacgccgttcacatcaatcaggacaggcgttcgtttcataacctcactcccagcggacgacggcgacgccgggttgtccccagtaccgactccgcatcattgatcgcccggttaagctcatccagagaagccgccgtatattcaattctgcgaccatctttctggacagacaccacccgtttaccggttaataaatcaaggcgcgcctgacgcagcgcctgcagttcagcgactgtaaccattcactcctccggacagcttcgctgccagttctttcagggttggccgggtcgtctcttcttcccgggattttgccagtacagccagatcaagctgccagcgttgcacggacacacgtaatgccgcgtaggcatacaccaggcagtccagcgcttcgttacgccgctttttgttatcccacagcagacgcatctttcctttttcccacttctccacaagctcttccgctaccagttgctgcgcctctgtctgcgaaaaaatctccggatcatcaggaaaacggatggcatacgacgtggcttcatccgcaggcgtgggatcggctttcatacgggcatagagaatttcttttgcggtgtccgtccccacttcacacagatacacgccccgctgattgcgggttttcggcatggtgatcaccggcttgccatagacagacgcgccctttaccggcagcacccggaaaacaccgtgtttttttgatctctgataaacaatttcaccatcgatccccccggtgtcccagcagacacgggaaatagtcatttcggtgccatccgcatggcggtattttttgttgatcgccgcatccacacgtaacagcgtctcttcctcatcaggacgccccataatgatgattttatccaccagaaaggcttcctctcccggagcccatccccagacatacatctcaaaacggtttcgctgcgagtcaatgcccgccgtcagataaaccacccgggcaggcaccgccgccgtgtaacgcaccaccttatccatcagtacctggtgatcgagtttttcgcccacggcctcttcccaggtctcgcccagcgtggtgttcacaaaggttttcaggccgttgggatctttcagtgcatccagccagtcatagacaatctgtacccaggtggtgaacggactgtacgccgtccagatatggaacgtgatggagcgcggcggcggaatttcatcaccccgggcgctgaaaaacgtcagaccgtcacgggtccacatgcccgngttttcacagatccaccgcccgttactctggtcaagctcagactgatggatcacacagccatgatgctcacaaaggtagaaarcactttckggtctgtccttctcccatttaaggccaaaaggcgnggactcatcgccaaatttcagatactgctcctccccacagtgcggacagggcacataaaaacgcatgaagtgtgccgactcgttagcggctttttcgatctggcaggtgcctttgattttaggcgtngagccgcgaatggattttggccacaccgacccctcaatacgcttatcccccagcagggttggcgagccctctttttcgacatccggctcgaacgaggaaagttcgtcatagcagaccacgtccacggatttttcacggtagtttttggcggcagcgccgcccaggcaccagaaaccgacgccngatgaaaagcgtttcagcgtgagagtattgtcacgatgtttacgncccagccatggggaaaggtctttcaggcatggcacgttccgaatcgtcgcctccacgtgagacttcataaaatcttcagcggcagaatccgtgggctgaaaaagcagactgtttcgggatttatgctcaataaaatacccgaccacccccagcaacatctttgtatagccaacacgggcagatttaatcagnttaacmgtgcggatctgatcattcc

SEQ ID NO: 523 - DNA, 137 bp, Escherichia coli
  Strain O55:H7
  modified_base (98)..(98): a, c, g or t
ttcatratggcgatctggaatggcagcgttttccattctccctcaccatatgaagattctttaggcagataataattttgatcagcccattcaactgncgtcaccggcaatgcccttatcaggggctgtaatgcagt

SEQ ID NO: 524 - DNA, 998 bp, Escherichia coli
  Strain O55:H7
  modified_base (37)..(37): a, c, g or t
  modified_base (232)..(232): a, c, g or t
  modified_base (743)..(743): a, c, g or t
  modified_base (818)..(818): a, c, g or t
  modified_base (863)..(863): a, c, g or t
  modified_base (874)..(874): a, c, g or t
  modified_base (886)..(889): a, c, g or t
atcatattattcagttgttgctctgatatattcatcnagtaaatccggtaatttatcccctgcccgcgcacactgatttgcccccttagcaataagggttttcagatggtcaagatggcgcggtgttaaatcaggaaactgtcgctgcatggataaagggatggaatcaagcgtactggataacgccattgccagcttactgagggcaaaaatacagaacccggtgtcaatnagttttccttttgacacctcattttttaactgctgtgtaacagcctgttctgctgtcagttcccatctggcaataagcaatttctcctcatagtcgtcttcgctatcgccatcaggcacatcgtttttacttctcctcagatacgatatgtaaaaatcgcgccaggcatccagatccagttgccctcgcttattcgatatcggggcacccggcaatttctgcaatctgcgaagctggcgatcggtcagacttaaatgcctggcaacttcagtctgcgtagccactcctcacctcgcaaaaactctcacctcacaatcacaacaaaaccggtcatgtccggtttacatgtctgttttttgttcatgtccggttcacagaagacctgtttttatatttttcatatagttaacttgcagagaaaccggacatggatcccggaaaattttcataaatagcgaaaacccgcgaggtcgccgccccgtaacckgtcggatcgccggaaaggacccrnaaaatgataataattatcatctacatgtcacaacgtgcatctacgccatcaaaccacgtcaaataatcaattatnacgcaggtatcgtattaattgatctgcatcaacttaacgtaaaancaacttcaganaatacaaatcannnncactgaatacggggcaacctcatgtcaacgaagaacagaacccgcagaacaacaacccgcaacatccgatttccaaaccagatgattgaacaaattaacatcgctcttg

SEQ ID NO: 525 - DNA, 637 bp, Escherichia coli
  Strain O55:H7
  modified_base (12)..(12): a, c, g or t
  modified_base (134)..(134): a, c, g or t
  modified_base (179)..(179): a, c, g or t
  modified_base (513)..(513): a, c, g or t
  modified_base (557)..(557): a, c, g or t
  modified_base (576)..(576): a, c, g or t
  modified_base (617)..(617): a, c, g or t
aaaggttcaggnaayttttcagcgtgggttattgaagcctgcagaagaagattaattaatgaaaaatattctcaatttgtacccaacaaagacaaacacgaccagagcacctgttcagacaggtttacttaaangacttatatatgacacaaaaagcgaccactaaagtcgctttttcntatggtaacaggcaataactctctcagatattttttagcatttttttgaccgcgcgtttccggacgtattctgttctcctgtccctttatatcgtcggaatacccgccgctcttcaaatcccattcccaactcagaatgtagtctgttgaccgcttgttttatttctgtcaggttcatcggtgaaaccggagtccggcgcgccttacgcaaacactctgctcgtttctgtgccgccacttttcttttctggtcatcacttagctgtaccatcacttttgcccatcgttcagctgctctccggtacagtccttttttctccagacattctgccangtgatcatgtagcataagtgacctccgattatctacagactgcnatcctgaatttaccttccnttaatgaaataacaataaaaaataaatcacagaaaaacaanaaaacaacacacaaaaaaac

SEQ ID NO: 526 - DNA, 805 bp, Escherichia coli
  Strain O55:H7
  modified_base (18)..(19): a, c, g or t
  modified_base (27)..(28): a, c, g or t
  modified_base (32)..(32): a, c, g or t
  modified_base (97)..(97): a, c, g or t
  modified_base (109)..(109): a, c, g or t
  modified_base (151)..(151): a, c, g or t
  modified_base (164)..(164): a, c, g or t
  modified_base (182)..(182): a, c, g or t
  modified_base (220)..(220): a, c, g or t
  modified_base (307)..(307): a, c, g or t
  modified_base (396)..(396): a, c, g or t
  modified_base (402)..(402): a, c, g or t
  modified_base (467)..(467): a, c, g or t
  modified_base (488)..(489): a, c, g or t
  modified_base (491)..(493): a, c, g or t
  modified_base (554)..(554): a, c, g or t
  modified_base (569)..(569): a, c, g or t
  modified_base (622)..(622): a, c, g or t
  modified_base (712)..(712): a, c, g or t
  modified_base (724)..(724): a, c, g or t
  modified_base (752)..(752): a, c, g or t
atcaccttattttattannttttgagnnagcnattactgaacaaaaaacgctgactatatactcaaaaccaaacaactattctgccaatcaggtatnatggcaacacanggaattaccgtgtttttgccttctctgcccatacaatacggncatatacttcatnctctattgtaatatttcnatccatgcgaacaacttcatttatctgtaaataatatncaaaatatttatcacagaaatcgtttttggccatgaactgagcacactataaagtccggaactgactctttgttaaattaccttaangttaccagtaacaccttcataacaaaacatcacggtatacactgggtacggatatattcctgtgctccttccagttgcttctgcattgncatcanccgttctctgaggatgaaataatcccgttcagcggcttctgccagtcgggggccggttgcattanccacgcyggaggtgatggggnntnnncgcaaggagcctggacagktggcgttgatccgcaggcgcttacgaccagcggcaacatcancacgcagagtttcantttcagctctcgcatcggctaattccctcgagtatctggcatcaagtgcagcnacatcacgctggcgtayctgcatatcagtaattgtcgcgttcgccagctccagctcactggcttttttatcgcgttgcgctttgtaggtnatggcgttatcncggtaatgattcagccccagactaagcncaccacaggcyaccagcaggacaataatcaccacacacagaacacggttcata

SEQ ID NO: 527 - DNA, 27 bp, Escherichia coli
  Strain O55:H7
acacagaggctcttcaccagcgttatg

SEQ ID NO: 528 - DNA, 45 bp, Escherichia coli
  Strain O55:H7
  modified_base (4)..(5): a, c, g or t
  modified_base (9)..(10): a, c, g or t
gacnngttnngccagcccatacagcatcggagacacagcaatacc

SEQ ID NO: 529 - DNA, 21 bp, Escherichia coli
  Strain O55:H7
agcaaaagccagcgctctgct

SEQ ID NO: 530 - DNA, 21 bp, Escherichia coli
  Strain O55:H7
  modified_base (2)..(3): a, c, g or t
tnncttgccttactcaaggtc

SEQ ID NO: 531 - DNA, 84 bp, Escherichia coli
  Strain O55:H7
  modified_base (30)..(30): a, c, g or t
caaaaccccgcttgctgccaacaaacgggnttttacttttattcacttasgtttcgccagttcgcaggatttcgtgttatccac

SEQ ID NO: 532 - DNA, 263 bp, Escherichia coli
  Strain O55:H7
  modified_base (9)..(9): a, c, g or t
  modified_base (56)..(56): a, c, g or t
  modified_base (59)..(59): a, c, g or t
  modified_base (98)..(98): a, c, g or t
  modified_base (140)..(140): a, c, g or t
  modified_base (260)..(260): a, c, g or t
aatattctncttatctgtcgatwccccagcacgccagcgcgctctcctggtcacgncgngatacctgaccgtarcagttgtttgaacgaatacggcantctctgccaccgtccttaatccaccagcgaatcgcctcacangctcccctgcgatcaccagcattaattcgtctgtaaaacgtcgacgggaaacacttaccgggaccaatgttgtacggacagaatgacgcgatccccgctttctggggttcggtcagcggnact

SEQ ID NO: 533 - DNA, 257 bp, Escherichia coli
  Strain O55:H7
  modified_base (8)..(11): a, c, g or t
  modified_base (54)..(54): a, c, g or t
  modified_base (111)..(111): a, c, g or t
  modified_base (114)..(114): a, c, g or t
  modified_base (129)..(129): a, c, g or t
  modified_base (134)..(134): a, c, g or t
  modified_base (162)..(162): a, c, g or t
tccacccnnnncagcgccttatcacgctcaatggcgttaacctggtcgcatttntccttcgacaacttcatgcccgggacgacaggyttaccatccaccagaatggcaccncgncagatggtccagatncccgnaccatcacggtatgcygtggtgtggttnccttccttttcatccagaaactggtcgaggatttcaggcgcagacgcccctgcaccaatcagcgccagaacggcagccgacaggccgtatctgat

SEQ ID NO: 534 - DNA, 48 bp, Escherichia coli
  Strain O55:H7
ttcatggatatttatcaggatttatcgatttctaatcccttgatatgt

SEQ ID NO: 535 - DNA, 24 bp, Escherichia coli
  Strain O55:H7
cgtattttttcttcatcgctttac

SEQ ID NO: 536 - DNA, 210 bp, Escherichia coli
  Strain O55:H7
  modified_base (160)..(160): a, c, g or t
ctctctgattttgaaatacaggttagtcagatacgtcagcaggccaaacagcagactccccagcacaccgatygccacccactgggacggagagactttgtccagcagctgcagtaaccagtatcccgtccccaccgctgacgtggtgtatgacacaccngttgtgattttttccatctgatgtatgtctccgtcaccgccgacagaaaa

SEQ ID NO: 537 - DNA, 208 bp, Escherichia coli
  Strain O55:H7
  modified_base (34)..(34): a, c, g or t
  modified_base (139)..(139): a, c, g or t
  modified_base (206)..(206): a, c, g or t
aaaagccgccagtgtcacccactgacggccaacnccgggagccgtgattatggcattcaggctctgctaaaaatgccagataacattccggctccctcccctgattcaggttataaatgacacaatatcttgacaacanccgtcactgtctgtcagaaaatgtactgccaaatataagtatcatgtgaaatccaactatccttctnag

SEQ ID NO: 538 - DNA, 146 bp, Escherichia coli
  Strain O55:H7
  modified_base (2)..(2): a, c, g or t
tntatctccagcatcagactttctatctcaacgccatacgctgcattttttgtaacatccgtcagcgtcagcgcattcagtcccagtgtcagactgtcttttataacctggaatgccggrccagccactccattcagtttcggagt

SEQ ID NO: 539 - DNA, 125 bp, Escherichia coli
  Strain O55:H7
  modified_base (21)..(24): a, c, g or t
  modified_base (95)..(95): a, c, g or t
  modified_base (116)..(116): a, c, g or t
  modified_base (121)..(124): a, c, g or t
tgaacaccagctccagcgtcnnnnagtcgttaccgtaatcgccgaactcccccagcttcgtgtttccggctttcctgtgatgcatcagattcacnctgccgtcagtggtctgagtnaagtnnnnc

SEQ ID NO: 540 - DNA, 81 bp, Escherichia coli
  Strain O55:H7
gtacccgtyatcgycacaccatcaggaacgggagcatccgtatacagataaatccccagcccgaactgattgttggtcagt

SEQ ID NO: 541 - DNA, 155 bp, Escherichia coli
  Strain O55:H7
  modified_base (3)..(4): a, c, g or t
  modified_base (83)..(83): a, c, g or t
  modified_base (139)..(139): a, c, g or t
  modified_base (144)..(147): a, c, g or t
acnngtcagtctgccgccctgtgtcagcagggtaattgcgtcatccaccggatgcgtcagggaccaggttttattgctctgcntggtgatcttaaatacaccatctgacaactgaattccgccatccttaatgctccanccctnnnnagcagcct

SEQ ID NO: 542 - DNA, 55 bp, Escherichia coli
  Strain O55:H7
  modified_base (46)..(49): a, c, g or t
agattgtgcgaacggacgtatctgcagacggacccgatggcgtgtnnnngccggg

SEQ ID NO: 543 - DNA, 1243 bp, Escherichia coli
  Strain O55:H7
  modified_base (27)..(27): a, c, g or t
  modified_base (41)..(44): a, c, g or t
  modified_base (49)..(52): a, c, g or t
  modified_base (1120)..(1121): a, c, g or t
ggctgcgttcagaatagcggttgccanacgatccggaatannnntcctnnnngcccatgaactgaaatgtgtcgggcggtttgatgatacctggtttccattcgttctcgatgccgcaccgtaatatcctgatgccggaatatccgggtcttcttccggtttgttcgtcgggacatttgctccgttctcatcggtcatgaacggcacaaagtgaatattcttttccgttttgtttttgtaactgccgtacaccgtctggtaagtggattcgctcttctgcttccagaaataagttgtgtctccacatatccagggaacaccgtcagcagaaccaccagcgcactgtcccaccatatctgcaaggtccgtacgatattgttccactacttctgtaaaacgggctgtgtgatttgctggcgttccgtcaaagtcaaattccccctgcatccacaccacggcaagcagcacatttttcgggttctttgccagcgcggcttttgtacgaccgatgagatccttatacagcggcctgcccacaccccagcgggtagaactctctgaggcaccggtcacgtcactgtatgttccatctgccccggtggtgaaagctgaaccaccacggcagcacggaaccagaagaatacccgcattcgccggtataaacggcagcagctttttggcaatatgcagcccctgccccacggttccgtactgacctttcgacaggtcagctttcggatggttaagacggctcatgtcctgtacatcatgcagacagtggtcwgccggaataatgtcgttatatttacagggagcgccatccggcgtcactgtgctgcgacgagccagttgctttatacgcgggtcaggacggtcatatgtctgcggcagaggaagcccctcaccgtaagccatgccgttcgactgcccggccagtggaataacgtagtaataatctggctccgtggtgaccactcccggatagccaccatcccccgtgccgggcacaaccactggcgtggtcacatccccctccgckgcaatcgcctgcatcagggtataaggggttatggccacaggactaccaaacggctgccagccctctttcagtttgtgtgtnngcttttccgcaagatctgacggcgacgccgccctgacaacatcataatgtttaatcgacatcgaatttctcccgtgtacaggaacagagttaaaaagccggaaccggaatcaaatcacagga

SEQ ID NO: 544 - DNA, 42 bp, Escherichia coli
  Strain O55:H7
  modified_base (7)..(8): a, c, g or t
gctggtnntaaaaaaaaggccgcgccatgcgcagccggaaat

SEQ ID NO: 545 - DNA, 253 bp, Escherichia coli
  Strain O55:H7
  modified_base (7)..(8): a, c, g or t
  modified_base (15)..(15): a, c, g or t
  modified_base (20)..(23): a, c, g or t
gatagtnngagaaanacagnnnnaacacttttgtggcaaagcatggtgccgggtgcctcccggtgaattcagtaccagcacctgaatccrcgattatcccatatacctggttgctgattgccccaccgcacagggggattcaccatgcagtagtatttttaataaacagtaaacaaaaaaatcaagcattatgcaggctgtttctttttatcaccggccacagcaataccacaatgccgcagaccagcccccc

SEQ ID NO: 546 - DNA, 21 bp, Escherichia coli
  Strain O55:H7
gacatgattctgctggtgaaa

SEQ ID NO: 547 - DNA, 100 bp, Escherichia coli
  Strain O55:H7
catcaccaccagaaacagcaggagtgcagccacagccaggcgcagttttaccgtcacaggtrattctccagacgaagccccagaacaccggcaatctctt

SEQ ID NO: 548 - DNA, 1621 bp, Escherichia coli
  Strain O55:H7
  modified_base (18)..(19): a, c, g or t
  modified_base (75)..(75): a, c, g or t
  modified_base (1499)..(1500): a, c, g or t
  modified_base (1535)..(1536): a, c, g or t
  modified_base (1541)..(1542): a, c, g or t
  modified_base (1577)..(1577): a, c, g or t
  modified_base (1582)..(1583): a, c, g or t
tggccaccgccacatccnncacatcttccgcttcacgcgtatcgtgtttcacatcctcgatctcacgtaacgccncacgacgaccaattttaaagttcgtatccagctgaccgataatggttgcgctaatcgcattaatttctgacgtaaacgcggacagcgctggctgattacgcagtacctgttcgatcttcgctttctaggaagcctcacattcaccatctgcayaggccaccaggtatgcggcgttaatcaccgcctgtgccagatcgcgtttctcaaactttcctttttccggttaacgtgacacaccaataactcttgtcgaaaaagccagcaagctgaaagaccggtattcacaaccaccagcgcgtttactgtactggcgtgatttcagtcataaaaaaacccgcctggcgacgggtgtaaaaaatcttctaacgtcaggcataaaacgcccatcgttagggcaaatttaccacagattcgggaaaaatcaacaaagctatctggtcacctttttcagttgttgttctgcccatgcttcttcaatatcaaactgcaccaccagcgtatcgtaaaaacgtttaactgtttttttccatgtatcaagagatatggcatcggttacattacatatggcattaaatgcctccgttgaaggtaatctttcatagccacgaccaccacaacgctggcagtctctgataacaggcataccacgttttaccgactcttcacgatgaatggcaacaccgcgcccacgacaatctttacaggcggtggaaacctcccccttccctccacactccggacaggcaacttttaccacctccctgacttttttccattcctcccagtaagacggatacacgccttttgtgcactttgcccacactggcggcttaccatccggatactggatcttgtttgtaaaaacctcgctttcaataaatttttttccgtgacaacaggggcactgttttttgctcgccgcgctacgggcataatcttcaaacgcatacgaagccataatacgcatcactgccggttttatttctgccgggagttttcttaacgccgccacgcgatcacaccgactgagtgcatattctgtcagcaattctgttgcccgctctctgtcattcatactaatgcccattttcccaaggaacgcagaaaaccccatctcagcccaattctgtgtcatgccctgcgcggccatcacatcagtgatactcagcgtatctttcgacgttgaggccgatgcatcagtcaggccgggggattttggggagtagtatttcggtaaatcttccagtttcattttttgacctgcccttcaagcattatggggtaaatcttcacccccagacgtccaccagatactggctgagcacgaacgatattgatttcatcaaactgctcatcgtccattagcaaccccgcatgcgtcagcgcatccagcggcgctttcagaatattgtccaggtcacggnngcgcttatccggtggctcggcaataatctttatcnncagcnntccggacaggcttaatttcagccgctgctggcgancaatnngcgccacagcccggcgataacgctcaccggcttttgat

SEQ ID NO: 549 - DNA, 160 bp, Escherichia coli
  Strain O55:H7
  modified_base (152)..(153): a, c, g or t
gtgctgccacgacgtcgccagtaggtgttcaccgtcggcgggtaaagcaaaacaaactctatacgcatcagtaacctcttttacccgagcacgccggttgcaaaggcgtgatcaagaaaacgaaaaattaaatcaacctgggaaccatgctnntcttcga

SEQ ID NO: 550 - DNA, 195 bp, Escherichia coli
  Strain O55:H7
  modified_base (9)..(10): a, c, g or t
  modified_base (165)..(167): a, c, g or t
tccgcatgnngctcgttgtgatgctcccgacacagcggtagcgtgaaaatatcgtgggattttgttcccattccgccctgaccatgaccaatcagatgatgaggatcgtccgctggcttaccacaacacgcacacggctgtgtctttacccagcgtgtgtatttnnnatttacccagcggcgacgtttaggtcgt

SEQ ID NO: 551 - DNA, 64 bp, Escherichia coli
  Strain O55:H7
  modified_base (7)..(8): a, c, g or t
cggagannccggatcaacggcaatgcttaccaccgtcttttcctgtggcgggttttgctggtgg

SEQ ID NO: 552 - DNA, 72 bp, Escherichia coli
  Strain O55:H7
  modified_base (24)..(24): a, c, g or t
agattttttgtgcgctgtttcagnatgctggtggctgtctgytctcccggtaygatgtcgctttcgcggtac

SEQ ID NO: 553 - DNA, 363 bp, Escherichia coli
  Strain O55:H7
  modified_base (288)..(289): a, c, g or t
  modified_base (360)..(362): a, c, g or t
acgtaaccccagagaacgacgtaatgctgcctctggtagcgcatccgccacctgattgcagaccgcccaccaggataattcacccagagataattcmcgctcctgcgtgccattcattgcatggcgtatgacgtcaatcatccatgctgacaaattttggtgagcaagttgcccgagtgattcggaggtctggtcacgcaactggttgtcgcagtgccagcacaacaccattgcgccggtaccataacggtgaatgacagtttcgctgtggtgataatcgccgtgtgnncactggcaggatttaatatggcgcaacagccagtcagacaatgcaccagcaccaccagcagcacgaatcannng

SEQ ID NO: 554 - DNA, 38 bp, Escherichia coli
  Strain O55:H7
  modified_base (2)..(3): a, c, g or t
cnnaaaaatggcagcaatgttttgtcttccaccagcgg

SEQ ID NO: 555 - DNA, 1005 bp, Escherichia coli
  Strain O55:H7
  modified_base (351)..(351): a, c, g or t
  modified_base (370)..(371): a, c, g or t
aggaacgaccccggacggcagattacgcatgcttttcggttccggctccaccagtacccgggtattgtgaaatacctgcatggattcacgacctggcttaagggccaccagcccgagttccggtaccagaacaggtcgaagtaatacccgcacgttacctccagatccgttgctggaatgtgcgggacggacgcggtgggcgttcggagtaaggaagcctgacggagattatccagtgacggtagtcgaggctgagggctttcttaatctcgtatccgcgcctgcggtaacactgaatcagccattcagcctgttcttcggtgcaggggtcgtgctgataccagtcagatntgaatgcatgagaacgccnnccgtgcctgctggcaggggcggcagagttatccgaattgtaaaatttggtatcgtgcgccatctgttttctctgctggcgcagcaggtgccagttgttcaggctgacggatggattgtaaaccagaacgaccagaaaaaacaaaacccgccgaagcgggttaagtgcgggtgcgttgaggatgcctgacacatcagcggtggcgagggatttctcccccgcctggtctcttactcctcaggttcgtaagctgtgaagacagcgacctccgtctggccggttcggattcgtacctcgcagaggtctttcctcgttaccagtgccgtcactatgacggttaaacagatgacgatcagggcgattaacatcgccttttgctgcttcatagcctgcttctccttgcctttcggcacgtaagaggctaacctacatttgtgagacatagattgggcctcagattaatgttaagcgtcttgcaggacgcgtaatgttaactggggcttttctctatctgccttttggtgttcatgcctgaggcagatagcctcaagcacccgcagcaattctacttaactctcgctttaccgcaaaccgtttttacccgatatgggaattcccatatcgtaatgaattca

SEQ ID NO: 556 - DNA, 20 bp, Escherichia coli
  Strain O55:H7
  modified_base (5)..(6): a, c, g or t
tcganncatcaaaaacacaa

SEQ ID NO: 557 - DNA, 46 bp, Escherichia coli
  Strain O55:H7
  modified_base (16)..(19): a, c, g or t
  modified_base (22)..(22): a, c, g or t
  modified_base (24)..(25): a, c, g or t
  modified_base (37)..(38): a, c, g or t
accttccattgccagnnnnatntnntccgacaaattnngttcccta

SEQ ID NO: 558 - DNA, 280 bp, Escherichia coli
  Strain O55:H7
  modified_base (2)..(3): a, c, g or t
  modified_base (6)..(7): a, c, g or t
  modified_base (11)..(12): a, c, g or t
  modified_base (83)..(84): a, c, g or t
  modified_base (88)..(89): a, c, g or t
  modified_base (144)..(145): a, c, g or t
  modified_base (269)..(270): a, c, g or t
tnnccnntganntatcatccgacatattccctcctttggtgttaatcccggcgaacgtttttacccccaccgacaaataacanntacnnaaaaagcgatagccatagcaacgcctgtaattgcaaatgcttcaggccagttcannggcgcacctcctgcggcggttctggtagaggcatccagtgtgatggtatccacgacgcaccaggtattatccacccatcattagcgtcaggatgccccgggatgtaagtcgcccatttcattcnncagtcacctt

SEQ ID NO: 559 - DNA, 154 bp, Escherichia coli
  Strain O55:H7
aatccctggcaacaagaacggctgttttggtatccggcattcgctcactacagcttatccaactatccggagttaccggatagttgcccgatagtgcattctgctccagtgatgcttttacaaaccacgctgcctgaactataacgccatgaat

SEQ ID NO: 560 - DNA, 90 bp, Escherichia coli
  Strain O55:H7
atcttttcgccacttaaggccttgcttatgtggctgcgtaccaggtcttcatgtaattccttcgcctcctcaatggtgaaaccaccaggc

SEQ ID NO: 561 - DNA, 41 bp, Escherichia coli
  Strain O55:H7
gcatggcttcgcggcaatcgttccagcctgtagcgtatgca

SEQ ID NO: 562 - DNA, 23 bp, Escherichia coli
  Strain O55:H7
cctgccaatacatttcttccggc

SEQ ID NO: 563 - DNA, 51 bp, Escherichia coli
  Strain O55:H7
  modified_base (26)..(27): a, c, g or t
ccctaatgggtaatgagctataatcnntgccaccggctctgcttccagcga

SEQ ID NO: 564 - DNA, 23 bp, Escherichia coli
  Strain O55:H7
aatccgtgccagttccatttgtt

SEQ ID NO: 565 - DNA, 49 bp, Escherichia coli
  Strain O55:H7
  modified_base (22)..(23): a, c, g or t
  modified_base (35)..(35): a, c, g or t
tcaatacgttctttggtaatannggtcatgtgttnctccttaacccgca

SEQ ID NO: 566 - DNA, 48 bp, Escherichia coli
  Strain O55:H7
  modified_base (24)..(25): a, c, g or t
ggggaacaaaatcttttcatcaanncctgcattcatatcatgaacagc

SEQ ID NO: 567 - DNA, 89 bp, Escherichia coli
  Strain O55:H7
  modified_base (2)..(3): a, c, g or t
  modified_base (33)..(36): a, c, g or t
  modified_base (40)..(41): a, c, g or t
  modified_base (80)..(81): a, c, g or t
  modified_base (83)..(84): a, c, g or t
annccatcgacgaacgattatcaagagcctccnnnntttnntccatgcggcgtaggtcatacaggtaaatgcttttatcnncnntggtg

SEQ ID NO: 568 - DNA, 86 bp, Escherichia coli
  Strain O55:H7
  modified_base (45)..(46): a, c, g or t
  modified_base (49)..(50): a, c, g or t
gacagcgatcaagaacttcctgtaattcgttcaaccatgcccgtnnttnntttgtcaaagttgccatatcagttttccttatacgg

SEQ ID NO: 569 - DNA, 52 bp, Escherichia coli
  Strain O55:H7
  modified_base (2)..(3): a, c, g or t
  modified_base (12)..(13): a, c, g or t
  modified_base (49)..(50): a, c, g or t
tnngcagtgtgnngaatgacgcccataccacgtcgttatacaattcaannac

SEQ ID NO: 570 - DNA, 44 bp, Escherichia coli
  Strain O55:H7
atccaggctaggattaacggggatatcggtatcatcaacacgat

SEQ ID NO: 571 - DNA, 58 bp, Escherichia coli
  Strain O55:H7
  modified_base (4)..(5): a, c, g or t
  modified_base (11)..(12): a, c, g or t
ttcnnctcttnngcggatattttttctaaataatgtgaccattcattaccgccctttc

SEQ ID NO: 572 - DNA, 16 bp, Escherichia coli
  Strain O55:H7
gcctcctgacattaat

SEQ ID NO: 573 - DNA, 41 bp, Escherichia coli
  Strain O55:H7
actcatagcttcatttgcagcatcaactggatcaacctccc

SEQ ID NO: 574 - DNA, 22 bp, Escherichia coli
  Strain O55:H7
  modified_base (20)..(21): a, c, g or t
cttcaggcgtccacggttcnna

SEQ ID NO: 575 - DNA, 27 bp, Escherichia coli
  Strain O55:H7
  modified_base (23)..(26): a, c, g or t
tttttgccgcattctcatcgccnnnna

SEQ ID NO: 576 - DNA, 22 bp, Escherichia coli
  Strain O55:H7
taatggctttctgtgtatttaa

SEQ ID NO: 577 - DNA, 19 bp, Escherichia coli
  Strain O55:H7
  modified_base (12)..(12): a, c, g or t
gttaaggattanattttat

SEQ ID NO: 578 - DNA, 19 bp, Escherichia coli
  Strain O55:H7
  modified_base (12)..(13): a, c, g or t
accctgataganngccagt

SEQ ID NO: 579 - DNA, 19 bp, Escherichia coli
  Strain O55:H7
aagtgaattttgtgatgcg

SEQ ID NO: 580 - DNA, 45 bp, Escherichia coli
  Strain O55:H7
taccaacgtcaacggcgaagacatgacggagattgaggagaatat

SEQ ID NO: 581 - DNA, 27 bp, Escherichia coli
  Strain O55:H7
  modified_base (20)..(20): a, c, g or t
aacacggcagcgaaaaaccngtaacgc

SEQ ID NO: 582 - DNA, 12 bp, Escherichia coli
  Strain O55:H7
gttactgccctg

SEQ ID NO: 583 - DNA, 5 bp, Escherichia coli
  Strain O55:H7
ttccc

SEQ ID NO: 584 - DNA, 113 bp, Escherichia coli
  Strain O55:H7
  modified_base (60)..(60): a, c, g or t
  modified_base (84)..(84): a, c, g or t
gacaaagttttccctaatcccggtaattcagacctgggactgataactgcttttttcgangcatacctggacgctgactacacngatcggggtctgctgacaaaagagtggat

SEQ ID NO: 585 - DNA, 22 bp, Escherichia coli
  Strain O55:H7
  modified_base (2)..(2): a, c, g or t
  modified_base (14)..(14): a, c, g or t
angaagaaaaaccncaaccatc

SEQ ID NO: 586 - DNA, 20 bp, Escherichia coli
  Strain O55:H7
cgctggatgctcagtcgcag

SEQ ID NO: 587 - DNA, 68 bp, Escherichia coli
  Strain O55:H7
  modified_base (15)..(15): a, c, g or t
  modified_base (18)..(18): a, c, g or t
  modified_base (30)..(30): a, c, g or t
ggtgaatttgttganggnattagcgacccnaatgatccgaaatgggtcaaggggatccagactcgcga

SEQ ID NO: 588 - DNA, 22 bp, Escherichia coli
  Strain O55:H7
aacaggaaccggaaaaagtctg

SEQ ID NO: 589 - DNA, 1812 bp, Escherichia coli
  Strain O55:H7
  modified_base (1056)..(1057): a, c, g or t
  modified_base (1062)..(1063): a, c, g or t
gggcgacgcaacataccaggaaacattcggtgaagagaatcaggttgaagctaaggaaaaagatccggaggaaatggaaggcgctgaacatccgcacaatgagaatgctggcagcgatccgcatcgcgattgcagtgatgaaactggcgaagtcgcagatcccgtaatcgtagaagacatagagccaggtatttattacggaatttcgaatgagaattaccacgcgggtcccggtgtcagtaagtctcagctcgatgacattgctgatactccggcactgtatttgtggcgtaaaaatgcccccgtggacaccacaaagacaaaaacgctcgatttaggaaccgctttccactgccgggtacttgagccggaagaattcagtaaccgctttatcgtagcacctgaatttaaccgccggacaaactccggaaaagaagaagagaaagcgtttctgagggaatgcgcaagcacaggaaaaacggttatcactgccgaagaaggccggaaaattgaactcatgtatcagagcgttatggctttgccgctggggcaatggcttgttgaaagcgccggacacgctgaatcatcaatttactgggaagatcctgaaacagcaattttgtgtcggtgccgtccggacaaaattatccctgaatttcactggatcatggacgtgaaaactacggcggatattcaacgattcaaaaccgcttattacgactaccgctatcacgttcaggatgcattctacagtgacggttatgaagcacagtttggagtgcagccaactttcgtttttctggttgccagcacaactattgaatgcggacgttatccggttgaaattttcatgatgggcgaagaagcaaaactggcaggtcagctggaatatcaccgcaatctgcgaaccctggctgactgcctcaataccgatgaatggccagctattaagacgttatcactgccccgctgggctaaggaatatgcaaatgactaagcaaccaccaatcgcaaaagccgatctgcaaaaaactcagggaaaccgtgcaccagcannaattnnaaataacgacgtgattagttttattaaccagccatcaatgaaagagcaactggcagcagctcttccacgccatatgacggctgaacgtatgatccgtatcgccaccacagaaattcgtaaagttccggcgttaggaaactgtgacactatgagttttgtcagtgcaatcgtacagtgttcacagctcggacttgagcccggtagcgccctcggtcatgcatatttactgccttttggtaataaaaacgaaaagagcggtaaaaaaaacgttcagctaatcattggctatcgcggcatgattgatctggctcgccgttcaggtcaaatcgccagcctgtcagcccgtgttgtccgtgaaggtgacgagtttaatttcgaatttggccttgatgaaaagttaatacaccgcccaggagaaaacgaagatgcccctgttacccacgtctatgctgtcgcaagactgaaagacggaggtactcagtttgaagttatgacgcgcaaacagattgagctggtgcgcagccagagtaaagctggtaataacgggccgtgggtaactcactgggaagaaatggcaaagaaaacggctattcgtcgcctgttcaaatatctgcccgtatcaattgagatccagcgtgcagtatcaatggatgaaaaggaaccactgacaatcgatcctgcagattcctctgtattaaccggggaatacagtgtaatcgataattcagaggaataattcagcctggcgg

SEQ ID NO: 590 - DNA, 6535 bp, Escherichia coli
  Strain O55:H7
  modified_base (1824)..(1824): a, c, g or t
  modified_base (1924)..(1924): a, c, g or t
  modified_base (4332)..(4333): a, c, g or t
tatgagaaaaattatgagatatgacaatgttaaaccatgtccattttgtggttgtccatcagtaacggtgaaagccatttcaggatattaccgagcgaagtgtaacggatgcgaatcccgaaccggttatggtggaagtgaaaaagaagcactcgaacgatgaaataaacgaaccactggaaataataatggaggtgttcatgtataaaattaccgccactattgaaaaggaaggtggcactcctactaactggacaagatattcaaaatctaaactaacgaaatcagaatgcgaaaaaatgctctcaggtaaaaaagaagcaggcgtttccagagagcagaaagtaaaactgataaattttaattgcgagaaacttcagtcctcgtgaattgcattgtattcaaattaaaacttcatagctgattattaataatcaacatcgggcgtcaatttaagtctaacattggcgcctgccagaggtgatgcgatggcacaagtaatctttaatgaagagtggatggttgaatacggcctgatgcttcgcactggtctgggggccagacaaattgaagcataccgccagaactgttgggtggaaggcttccacttcaaacgagtatctcctttagggaagccagacagtaagcgagggattatctggtataactatccaaagataaatcagtttatcaaagactcatgatatgtctaaattaccaacaggtgtcgagattcgaggtaaatacattcgcatctggttcatgtttcgaggaaaacgatgtcgggaaacattgaaaggctgggaggttactaacagtaacattaaaaaagccgggaatttaagagcgttgatagttcatgaaatcaattccggtgagtttgagtatttaagacgttttccccagtccagcactggggcaaaaatggtgacaacgagggtcataaaaacgttcggggagctttgtgatatctggacaaaaattaaagaaacagagttaacaacaaacacaatgaagaaaacgaaatcacaattaaaaacactcaggataataatttgtgagagtactccgatatcgcatattcgttatagcgatatcttaaactaccggaatgaactgctgcatggagaaacgctttacctggataatccaagatccaacaaaaaaggaagaaccgtgcgcacagttgataactatatcgccctgctctgttcgttgttacgttttgcgtatcagtcgggatttatatcaaccaaaccatttgaaggagtaaagaaattacagagaaacagaataaagcctgacccgttatctaaaacagaattcaatgcattaatggaaagtgaaaaaggacagagccagaacttgtggaaatttgccgtatactccgggcttcgtcacggggaactggctgctctggcgtgggaggatgtggatttcgagaagggagttgtgaatgtcagaagaaacctgacgatactggatatgttcggtcccccaaaaacaaatgcggggatccggacggtaacactactgcagcctgctcttgaagcactgaaggagcaatacaaactgaccgggcatcatcgcaaaagcgaaatcactttttatcatcgggagtacggcagaaccgaaaagcaaaaactgcattttgttttcatgcccagagtgtgtaacggaaaacagaaaccttattactcggtaagcagtttgggtgcgagatggaatgcagcagtaaaacgtgctggtattcgccgccgtaatccgtaccatacgcggcatacttttgcctgctggctgttgacggcaggagcgaacccggcntttatagccagccagatggggcatgaaactgcgcagatggtgtatgaaatttacggtatgtggattgatgacatgaacgacgaacaggtagccatgttgnatgcgcggttatcgtagttgcaaagtttgcccccaatttgccccatttagtaccagagaactgaaataatgaaagaaaatcaacaaattacaaagaaagaacaatacaacctgaacaaattacaaaaacgcctgcgtcgtaacgtgggcgaagccattgctgacttcaatatgattgaagaaggcgatcgcatcatggtttgcctctccgggggtaaagacagctataccatgctggagattctgcgcaatttgcagcaaagcgcgccaatcaatttttcgctggtggctgttaacctcgatcaaaagcaaccgggcttcccggaacacgttctgcccgagtatcttgaaaagctgggcgttgagtacaagattgttgaagagaacacttacggtatcgtgaaagagaagattccagagggcaaaaccacttgctcactgtgttctcggctacgtcgcggtatcctttatcgcaccgcaacggaactgggggcgacgaagatcgcgttgggccaccatcgtgacgatatcctgcaaacgttgttcttaaatatgttctacggcggcaagatgaaaggtatgcctccgaaactgatgagcgatgatggcaaacatatcgttattcgtccgctggcctactgccgcgagaaagatattcagcgatttgccgatgcaaaagcgttcccgattattccgtgcaacctgtgcggttcacagcctaacctgcaacgtcaggtgattgctgacatgttgcgtgactgggataaacgttatccagggcgtatcgagacgatgttcagcgcgatgcagaatgtggtgccgtcgcatctgtgcgataccaacctgttcgatttcaaaggcatcacccacggttctgaagtggttaacgggggtgatctggcgtttgatcgcgaagagatcccactacaaccggcgggctggcagccagaagaagatgaaaatcagttggatgagttacggctgaatgtggttgaagtgaaataactcggatagcgcccgatgcgcaaacgtatcgggctactctaatggaggctgaataagacgcggtcagcgtcgcatccgacaatcccgacgaagatgtttacttttgcatcaggcaattcaacattttattattttaataaccgcacccggcacgtttttcctttaatcttcccgccctgtaactgtttccatgctttatgagcaacagcctgacggaccgcgacatagacatgcgccggatgcacggcgattttgccaatatctgcgccatcaagcccgatatctcctgtcagtgcacctaatacatcacccgggcgcattttggcttttttcccgccatcgatacacaacgttgccatttctgcttccagcgtcacaatggaactattagctggtggcgtttgccagttaagttttatctgcaacatgtcagaaatgatattggcccgctgtgcttcttccggagcacagaaactgatcgccagaccgctatttcctgcacgagctgtacgaccgatgcgatgtacatgaacttcagggtcccacgccagctcaaagttcaccaccagctcaagcgatttaatatccagaccacgcgcagcaacatcagtcgcgaccagtacacgggcgctaccgttagcaaaacgtaccagggtctgatcacgatcgcgttgctccagatcgccgtgtaatgacaatgcactttgccctacttcattcagcgcgtcgcagacagcctggcaatcttttttggtattgcaaaacaccacgcaagaggatggctgatgcaagcttaataaccgttgcaacagaggaattttgcctttgctggatgtctcataaaattgttgttcaatgggtggcaaagcatctgttgagtcaatttcaatcgccaaaggatcgcgttgcactcgtccgctgattgcggcgatggcttccggccaggttgccgaaaacagaagcgtctgtcgagatgcaggcgcaaaacggatgacatcatcaatggcatcgctaaatcccatatccagcatgcggtcggcctcatccatcaccaaagtattcagcgcatccagtgataccgtgcctttttgcaggtgatccagcaaacggcccggcgttgccacgataatatgcggcgcatgttgcaacgaatcacgctgcataccgaacggttgaccaccgcacaacgtcaaaattttggtatttggcagaaaacgcgccagccgacgcaattcacctgccacctgatccgccagttcacgcgtaggacacagcactaaagcctgggtttgaaatagcgacgcatcaatttgctgtaacaagccgaggccaaaagccgccgttttgccgctgccagttttcgcctgcacgcgaacatcttttccggcaaggatcgccggaagnncggcggcctgcaccggcgtcatggttaaataacccaactcattaaggttcgtgagttgggcgggaggcaaaacattcagggtagaaaaagcggtcacaatctattctcgtggtcatcgacgcaaagtcatcaggcgcgtatcctcgcagatctacgctcacgatgcgacaatttaatcggttcttcatcgggtggtgggtcaggcatgggttgcgggcgagggatcggatcgggcactggaacaggatcgccaggaatcggttcagggacaggaatttgcaaataaataagtgtcgtcatatttccctccggtcattgggtggactcttaaagggtagacgctgataaataacaggcaaaaaaaagccgactcatcaaagtcggcgtcgtacgaatcaattgtgctatgcagtaattcaaaaaaggaagtaagacaatatggagcgcaacgcccatcgcttgacgttgcattcacctgcaagagagatattgccctgaatgggtagagagtttattgacttcgctcaaactttgcggcgtttttgtatacagacagccggaaaaattgcttttgttacaaccatttactacgatgcaaccataaagcaacaccaccaataagaacaactaacagaatacaaaaaattgaaaatccgaattgccacccgccgccagggatcccaccaaggttgacgccaaataaccctgtcagaaaggtactgggtaaaaagaccattgccatcaatgacattgtataggtacgacgagctaaattttcctgcatcacctgagcgatttcatccgccatcacaccagtccgtgctatacaggcgtcgatttcgtcaaggccgcgcccaaggcgatcggcaatatcctgcatccgacggcgttggtcatcgctcatccacggcaaacgttcactggcaagacgagcataaacatcacgttgcggtgccatatagcgacgcatcacaattaattgtttgcgcagcagagccaggaatccacgcggcggaatttgctgatcaaggagattatcttcaaggtcgataattttatcgtgcagctgctcgataaattcgctggaatgatcggtcaacgcatcgcacacatccaccagccatcccccgcaatcggtcggacccgtgccctcttccagatcactcaccacatcgtccagcgccagcactttgcgttgtcgggtcgaaacaattaaccgcccgtccatatatacacgcatggcgaccagttgatcggggcgttcatcggtgctgccgtttatacagcgcaatgtaatcagcgtgccttcaccgagacggctgactcggggccgtgtgctctcgcccgccagcgcatcacgtacgttattgggaagcagcggtgttgtcgccagccattgggcgctatcatggtgtacataattaaggtggagccagcagggatgcgcttcatcaatcacatctgtattttccagcggtttaacgccgcctctaccatccagcatccaggcaaatactgcatccgggacattaacgtccgatcccttaatcgcttccacagtgcctccatcatcaacgcattattttgtagtctagccttctggccctgttacgcaacatctcatcaccccattaccctgaaatgattaataaaattctgtctaaattgaatacaaaaagcaaaatgcttttccgtatacaaaccgtgtgaagtgttaaatagcgtctatcattatcagaattatctgatcatatgacgtggcttttttgcgatcggatagcaacaaaaattgataaaaataatgggatctcaatgattacgcacaacttcaatactctggacttactcaccagtcctgtctggatcgtttcgccctttgaggaacagttaatttatgccaacagcgcggcgcgactgttgatgcaagacctcacgtttagtcagctacgaaccggtccctattccgtctcctcacaaaaagaactgccgaaatacctctccgatctgcaaaaccaacacgatattatcgaaatcctcactgttcagcgtaaagaagaggaaacagcattaagctgtcggcttgttttgcgagagctgacagaaacagaaccggtgattattttcgaaggtatcgaagcgccggcaacgctgggtttaaaagccagtcgctcggcaaattatcagcgcaaaaaacaaggtttt

SEQ ID NO: 591 - DNA, 1519 bp, Escherichia coli
  Strain O55:H7
cgcttttttctgactaactctgcaccaatgttgttgattgacccgtcacgagatggacaaatcgtcgatgctaacctcgccgcgctcaatttctatggttataaccatgaaacgatgtgccagaaacatacctgggaaataaatatgctcgggcgtcgcgtcatgcctatcatgcatgaaatctcgcatttacccggtggtcataaacctctgaattttattcataagctggcggatggttcgactcgtcatgtgcagacctatgccggaccgattgaaatttatggcgacaagctcatgttatgtattgtgcatgatattactgagcaaaaacggctggaggagcagctggaacatgctgctcaccatgacgcgatgaccggattactgaatcggcgacagttttatcacattacggaaccaggccaaatgcagcacctcgccatcgctcaggattacagcttattgctcatcgacaccgatcgttttaaacacattaacgatctctatgggcattctaaaggtgatgaggtgttatgcgccctcgcccgcactctcgaaagttgcgctcgcaaaggcgatttggtgtttcgttggggaggcgaagagtttgtcttattactaccaagaaccccactggataccgcgctttcgctggctgaaactatccgcgtaagcgtggcaaaagtgagtatttcgggcttaccacgctttaccgtcagcattggtgtggcgcatcacgaaggaaatgaaagcatcgatgaactgtttaaacgcgttgatgatgctttgtatcgggcgaaaaatgatggacgcaaccgcgtgctggcggcataagccacggatgcgtctcgagatcaacgactgcgcttagcgtggcgctcccagttttcttgctttgcctgtgccgttttacgtagtgcgacgtaacacgccccgctgccgccatgatgcggtagcgcggtacaatatgcctggacatcatcaaattcggtcaaccagcgcgccacatagctgcggacaatattggcatgcgatttatcatcccgccctttaccatgaataatcagcacgttacgcaaaccatccgccatggcttgttgaatgaaactgaacatcattttgcggcactcttccaccggctggcgcaaaagattcaggctcgcctgttgcggatatttaccactgcgcagcttatccagcaccccatgttgcaacccttcccgccgaaactccagcggctgacttagcgggatgatgtcgagaaatccggtggtgaggaaattatcaagttgcagcgtgtcgatacgctgcggcgcacgttggttacgcgttggatgccagtggacatcggtagcacgtttcagcggctggacatcttccatggcgtcaagaaacagcgatttgtcgtcaaggttcatgttacatcctcccgcaattaagagcgcgatatgataaccagaccgggtcggtccaacaacgtattacccaaaattccagtaataagttccaaatattg

SEQ ID NO: 592 - DNA, 31812 bp, Escherichia coli
  Strain O55:H7
  modified_base (1472)..(1472): a, c, g or t
  modified_base (1533)..(1536): a, c, g or t
  modified_base (2444)..(2447): a, c, g or t
  modified_base (2525)..(2525): a, c, g or t
  modified_base (2577)..(2577): a, c, g or t
  modified_base (10549)..(10549): a, c, g or t
  modified_base (11535)..(11538): a, c, g or t
  modified_base (12713)..(12713): a, c, g or t
  modified_base (15694)..(15694): a, c, g or t
  modified_base (17240)..(17240): a, c, g or t
  modified_base (18477)..(18477): a, c, g or t
  modified_base (18503)..(18503): a, c, g or t
  modified_base (18737)..(18737): a, c, g or t
  modified_base (20599)..(20600): a, c, g or t
  modified_base (25697)..(25697): a, c, g or t
  modified_base (27178)..(27178): a, c, g or t
  modified_base (27182)..(27185): a, c, g or t
  modified_base (28890)..(28890): a, c, g or t
  modified_base (30349)..(30349): a, c, g or t
gcaaaatgcttatgcatgattattcattcacgatattaataatgtaacttatattttcgtgaaatctgtcactgaagaaaattggcaactaaaggttaaaaccgttataacacagtcaccggcgcagaggagacaatgccggatttaagacgcggatgcactgctgtgtgtactgtagagtctggcggatgtcgacagactctatttttttatgcagttttaactttgcagatagccgcattctcgccggaattgcgtgattaatgacgcggtcagtggtgtctggcgactatcacgccgctgaatcaaataataggccgctttcggtaaaatttcgctaaccggcaacatcaccagcccctgtccgtgcaagggatcgcagcccatttcttcaggcagtatgctgagaaaatcgctttttgccaccagactgatacaggctgagaacgtctcgcagactacaccgacctgtggcgtttgcgcctgatcgtcaagcaattcactcaactgtttgtagtagctgccgtgtggcgtcggcattgtccagctgtaatccagtaactgtttgatcgaacgggcaccaatggcggggtgtcccgggcggcaaaagatcgcgaattgcttttccagtaatttctcaaaagtaaattcgtggtcgtacggtccctgataataggtattgatggtgaaatccaattctccctgacgcaattcattaatcatcgacaccagttgcccttccataatgcgtacttttacctgcggatgctgctgatgaaaacgagatatgacagctggcatcagactgcgggaaatactggcccccatgccgatattaatctgccctgccagttgcccttgtcgttggcgaatatcctcttgggctgcgcgcagttcttcaagaataagactggcgtgctgataaaaactttcaccggcatcagttaacgtcacgcctttactacggcgaaaaaagagttgcgccgctaacccttcttccagctcctgaatagatttactcagtgccggttgcgacatattcaacattcggctcgctccgcgaatgctgccctgacgagccacttcaacaaaagcccgaatttgatgaatttttacctgaaaagccatgacgccaccgataaccgttatttatcagaccaaagaaactggcatctactttaatgcagatgattgtgtcagggtaatttatgaacggttaaaactgtgaaaaatcagttagtgataagtaaaaactatcgctacgtgaaccgggtcacactttttactgatgacgggaaaggttatggagtctttgaatcaatttgttaattcgcttgccccaaaattatcgcactggcgacgtgattttcatcactatgcagagtctggctgggtggaattccgcactgccacccttgttgcggaagaattgcagcagctcggctactcactggcgctgggccgcgaagtanttaatgaaaatagccggatgggactacctgatgaactcactctacaacgcgaattcgagcnnnntcgtcaacagggtgcgctagcacaatggattgcggcttttgaaggtggtttcacgggtatcgtcgccaccctggataccggtcgccccggtccggtgatggctttccgtgtcgatatggacgcgctggatctcagtgaagagcaggatgtcagccatcgcccctaccgcgacggttttgcgtcatgtaacgccggaatgatgcatgcctgtggtcatgatgggcataccaccattgggcttgggctggcgcatacccttaaacaattcgagtccggactacatggcgtcatcaaactgatttttcagcctgcagaggaaggtacgcgtggcgcgcgggcgatggtcgatgcaggtgtcgtagatgatgttgattattttactgccgtgcacattggcactggcgtacctgcgggcaccgtggtgtgcggcagtgataattttatggcaaccaccaaatttgacgcgcacttcaccggtaccgccgctcacgcaggcgcaaaaccagaagacggttacaatgccttgttggcggcagcacaagccactcttgcactgcatgcaatcgccccgcacagcgaaggagcttccagagtaaacgtgggcgttatgcaggcaggaagcggtcgtaacgttgttcctgcctcggcgttgctgaaagtggaaacacgcggggccagcgacgtcattaatcaatatgtttttgaccgtgctcagcaagcgattcagggcgcagcaaccatgtatggtgtcggcgttgaaactcgtctgatgggtgcagctaccgccagttctccttcgccgcaatgggtcgcatggttgcaaagtcaggcggctcaggtcgcgggggtcaatcaggccattgaacgtgttgaagcgcctgcgggttccgaagatgccacattaatgnnnncccgcgtgcagcaacatcaagggcaagcctcctacgtggtgtttggcacacagctggcggcaggtcatcacaacgaanaattcgattttgacgagcaggttctcgctattgccgtcgaaacgctggcgcncaccgcgctcaattttccctggacgcgaggtatctgatgcaggaaatctatcgttttatcgacgatgcgattgaagccgatcgccaacgttataccgatattgccgatcaaatctgggatcatccagaaacacgttttgaagagttctggtcagcggagcatctggcttcggcgctggaatctgcaggcttcaccgttacccgcaacgtaggcaatatcccaaatgcctttattgcttcgtttggtcaaggcaaaccggttatcgccctgctgggagaatatgacgccctggcaggtttaagtcagcaagcaggttgcgcgcaacctacatccgtgacgcccggtgaaaatggtcacggttgcggacacaatttgctgggaaccgccgcctttgccgctgcaatagccatcaagaaatggctggaacaatatgggcaaggcggcacagtgcgcttttatggttgtcctggcgaagaaggcggctcgggtaaaacgttcatggtccgcgagggggtatttgatgatgtggatgcggcactcacctggcacccggaagcctttgccggtatgttcaatacccgtacgctggcaaacattcaggcatcatggcgctttaaagggatcgcagcacatgccgcgaattcccctcatttgggacgcagcgcccttgatgccgtaacgttgatgaccactggcaccaacttcctcaacgaacatattattgaaaaagcgcgcgtacactatgccatcacaaatagtggcgggatctcgcccaacgtggtccaggcgcaggcagaagtgctttatcttatccgcgcccccgaaatgaccgacgtgcagcatatttatgatcgggtcgccaaaatcgccgaaggtgcggcattgatgaccgaaaccacggttgaatgccgcttcgacaaagcctgttccagttatctcccgaatcgcaccttagaaaatgccatgtaccaggccctatcccattttggtaccccggaatggaactccgaagaactggcttttgcgaaacaaattcaggctacgcttacctccaacgatcggcaaaacagtctgaataatatcgccgcaaccggtggcgaaaacggcaaggtttttgcactacgtcatcgtgaaacggtactggcgaatgaagtcgctccatatgccgccaccgataacgtgcttgcggcatcgactgatgtcggcgacgtcagttggaaactgcctgttgcccagtgtttcagcccctgttttgccgtcggtacacccctacatacgtggcaactggttagccaggggcgaacatctattgctcataaaggaatgctgctggcggcgaaaactatggcagcaaccacactcaatctcttcattgattcagggctattgcaagaatgccaacaagagcatcagcaagttacggacacgcaaccgtatcactgccctatcccgaaaaacgtgacaccgtcacctttaaaataacaacaacaacgcaaacacaacaaccgaggaatgcccatgagtatgtcatccataccgtcgtcctcccaatccgggaagctctatggctgggtcgaaagaattggtaacaaggttccccatccttttttgctctttatctatttgattatcgtactcatggtgacgacggcaattttgtcggcctttggcgtcagtgcgaaaaacccgaccgatggtacgccggtggtggtgaaaaacctgctcagtgtggaaggattacactggtttttacccaatgttattaaaaactttagcggttttgctccacttggtgcgatcctggcgctggttttaggtgccggtctggcggagcgcgtcggcttactgccagcactaatggttaaaatggcatcgcatgttaatgcccgctacgccagttatatggtgctgtttattgcttttttcagccacatttcttccgatgcggcgttagtgatcatgccaccgatgggtgcgctgatttttctggcggtgggcaggcatccagttgcaggtttactggctgccattgcaggcgtaggttgcggctttacggctaatttactgattgtcacaaccgacgtgttgctgtcggggatcagcacggaagcggcagctgcgttcaatccgcaaatgcacgtcagtgtaattgataactggtattttatggccagctccgtagtcgtactgacgattgttggcggcctgataaccgacaaaatcatcgagccacggttaggtcaatggcagggaaacagcgatgagaaactgcagacattgaccgaaagtcagcgttttggtttacgcatagcaggtgtcgtatcgctactttttattgctgcgattgcgctgatggtgatcccggaaaacgggatattgcacgatccgattaatcacaccgtgatgccatcaccctttattaaaggtatcgtgccactgatcattctttttttctttgttgtctcgctggcttatggcatcgctacccgcacaattcgacgtcaggcggatttaccgcatttaatgattgaaccgatgaaagagatggcgggatttatcgtgatggtttttcccctcgcccagtttgtcgccatgtttaactggagcaacatggggaaattcatcgccgtggggctgaccgatatcctggaaagttcagggcttagcggcatcccggcgtttgtcggtctggcgttgctttcctctttcttatgcatgtttatcgccagcggttccgcaatctggtcgattctggcccccattttcgtaccaatgtttatgctacttggctttcacccggcatttgcgcaaatcctctttcgtattgccgactcatccgtattgcctttagcgccagtatctccttttgttccactgtttcttggattcctgcaacgctacaaaccagacgcgaaactgggtacttactattcgttagtcttgccctatccgcttatctttttggtggtatggctgctgatgttgctggcgtggtatcttgtgggcctgccgataggtccgggtatttacccacgtttgtcttaagagagaacggatgctgagattacttgaagaaaaaattgccacaccactgggtccactgtgggtgatttgcgatgagcaatttcgcctgcgggcggttgaatgggaagagtacagcgaacgcatggtgcagctgctggacatccattatcgcaaagaaggctatgagcgcatttctgccaccaatccaggcggtttaagcgacaagcttcgtgaatattttgccggtaatcttagcattattgatacgcttcccactgctacgggggggacgccatttcagcgcgaagtctggaaaacactacgcactatcccctgcgggcaggtaatgcattacggcgaactggctgagcaattgggccgtcctggcgcggcgcgtgccgttggtgcggcaaacggatcgaatcccatcagcatcgtcgtaccttgccatcgggttattggccgaaacggcaccatgaccggatatgcaggcggagttcagcgaaaagagtggttattgcgccacgaaggttatcttttgctgtaaacattaaacaatttgtgccagcttgttcacacttttatgtaaagttacccttaacaacttaagggttttcaaatagatagacatatatttacatctaatatcggaattctctgctgttaaggtttgcttagacttacttgctccctaaaaagatgttaaaattgacaaatatcaattacggcttgagcagacctatgatcccggaaaagcgaattatacggcgcattcagtctggcggttgtgctatccattgccaggattgcagcatcagccagctttgcatcccgttcacactcaacgaacatgagcttgatcagcttgataatatcattgagcggaagaagcctattcagaaaggccagacgctgtttaaggctggtgatgaacttaaatcgctttatgccatccgctccggtacgattaaaagttataccatcactgagcaaggcgacgagcaaatcactggtttccatttagcaggcgacctggtgggatttgacgccatcggcagcggccatcacccgagcttcgcgcaggcgctggaaacctcgatggtatgtgaaatcccgttcgaaacgctggacgatttgtccggtaaaatgccgaatctgcgtcagcagatgatgcgtctgatgagcggtgaaatcaaaggcgatcaggacatgatcctgctgttgtcaaagaaaaatgccgaggaacgtctggctgcattcatctacaacctgtcccgtcgttttgcccaacgcggcttctcccctcgtgaattccgcctgacgatgactcgtggcgatatcggtaactatctgggcctgacggtagaaaccatcagccgtctgctgggtcgcttccagaaaagcggtatgctggcagtcaaaggtaaatacatcaccatcgaaaataacgatgcgctggcccagcttgctggtcatacgcgtaacgttgcctgatttttccgcataactcactatccttctgtcatatcattaaatttttctgatttattgatctggcagaaggttcatcactgtttcattcaccagatatgggttaatcttttaattacaaactgcgttgacagttgttgtaaggagaccctgtatggctatgtatcagaacatgctcgttgttatcgatcctaaccaggacgaccaaccagcattgcggcgagctgtttatttacatcaacggattggtggcaaaattaaagcctttttgccgatctatgacttctcatacgaaatgaccaccctgctctccccggacgaacgtaccgctatgcgtcagggcgtcatcagccagcgtacagcctggatccacgagcaggcaaaatattatctcaatgctggcgttcccattgaaattaaagtggtctggcataaccgtcctttcgaagccatcattcaggaagtgatcagcggcgggcacgatttggtgctaaaaatggcgcaccaacatgaccgtctggaagcggtgatttttacgccaacggactggcacctgttacgcaaatgcccaagcccggtgtggatggtgaaagaccagccgtggccggaaggaggtaaggcgctggtggcggtgaatctcgccagtgaagagccgtatcataatgcgctcaatgaaaaactggtcaaagagacgatcgaactggcagaacaagtcaaccataccgaagttcatctggttggcgcttatccggtaacgccaattaatatcgcgattgaactgccggaatttgatccgagcgtttataacgatgccattcgtgggcaacatttgctggcaatgaaagccctgcggcagaaattcggcattaatgaaaacatgacgcacgtagaaaaaggtctgccagaagaggtgattcctgatttggcggagcacttacaggcggggattgtggttctgggcacggtaggacgcaccggtatttcagcagcattcctcggcaacacggcggaacaggtgattgatcatcttcgctgcgatctgttggtcattaaacctgaccagtatcagacacccgttgaactggatgacgaagaagacgattaacgactcctcaataactgacaaggcccgagttatcgggcctattttttacttactgctcttcgccgccaaggaaataaattcccaacgggattgccagcaacacagtaaagaccaggctataaacaaaaatcatcgatgactgaatcacatacattgatgtcgtccactccgacagcggaatattgtactgttctataacgccgccgatagtcgcgcgagtcacaaccgacgccgcaataatgaaaaccgccaacaaaccaaagagaaatttcttccctttcgctgacttcagtttcgccataatcatgatgtaatccttgtgcagacaaatttcttgttacctaaacgtaacaataccatgacatttcaccattgtctgctctgaaaacctcacctcttagctggatttacaatcaacgcattgattagttagctaatgttgctacttccttccctgactattgatgatctgaatgaattgtcgcggtaaaatagccccgccaggggtttccggcatgacgacaattatctggaggagcctgataaaacaatgatcgctgaactgtttacaaataatgcgcttaatctggtcattattttcggtagctgcgcagcattgattctgatgagcttttggtttcgccgcggaaatcgtaaaagaaaaggctttttattccatgcggtgcaatttttaatctacaccataattatcagtgctgttggtagcattattaattatgttatagaaaactataaactcaaatttatcactccaggcgttatcgattttatctgtacgtccctgattgcggttattctgacgattaagctatttttgctgattaatcagtttgaaaaacagcagattaaaaagggtcgcgatatcaccagtgcgcggattatgtcgcgcattatcaaaatcaccattattgtggtgcttgttctgctttatggcgaacatttcggcatgagcctttctggcttgctgacctttggtggtattggtggtctggctgtcggtatggctggcaaagatattctgagtaatttcttttccgggatcatgctctatttcgaccgtcctttcagtattggcgactggatccgttcaccggacagaaatatcgaaggtacagtagcggaaattggctggcgaattaccaaaattacgacctttgataatcgtccattgtacgtaccgaactcgctgttttcatcgatcagcgtagaaaacccaggacgaatgaccaaccgccgcattaccacgaccattggtttacgttatgaggatgcggcaaaagtgggcgttatcgtcgaagccgtacgtgagatgctgaaaaatcacccggccatcgaccagcgacaaaccttactggtttatttcaaccagtttgctgactcgtcattgaatattatggtttattgctttaccaaaaccacggtatgggctgagtggcttgctgcacagcaagacgtttatttgaagattatcgatattgtacagtcacacggcgcggactttgccttccccagccagacgctgtatatggataacattacaccgccggaacagggtcgctaaatcagacatcactggcgttatccacaagggtaacgccagttcccatcacatcaatgcttcacaatatacatagtccgactgtacgccacatcctcagggttattaataggataacctttcagccacggtttgattaatcgtccattggtatattgataaattggtgcaatcggtgcttgctccatgaggattttttctgccgcgttgtaatcggcattacgcgctttaacggtattttccgtcgatgcctgggccagaactttgtcgtatgccggattgttaaagcgtgaaatatttcctgaatgcgttgacgttaataatgtcaggaaagtggagggttcattataatcccccacccatgaggcgcggataacatcaaaattgccggtgttacggctatcgatataggttttccattcctgattttgcaatttaacatctacgccaaggttctttttccacatcgatgctacagcaatcgcaattttttgatggttttctgaagtgttatacaaaagcgtcagcttcagcggtttttgcggaccataaccagctgcgctcaacaaagtttttgcctgcgcattcagttcttcctgactcatttgttcaaacggcgaaggttccggcgtaaatccggcggtaacatctggtgtaaaatgccacgctggcttttcgcccgtccctaatactttttcggtcatcaggcggcgatctatcgtcatacttaatgccagacgaacgcgctgatctgccgtcggccctttttgcgngttaaacgcataataataggtcccgagctgcggcggcgtataaacctgccccggaatatccttcaacagcttctgatacatatttttcgggaaggattcggtgatatcaatatcccccgcgaggtaacgcttagtggctgcggattcctgattaattggcaggaaggtcactttttgcagtaccgttttggcgttatcccaataatgggtattcggtaccacgaccagtttttcattgactacgcgctctttaagaacataagcgccattgccgatcagatttccgggtttcgtccactctttaccgctttctacgttggctttttgcaccgggaagaaggcaaagttagcggttaaattcacaaaccacggcaacggtttatcaagctgaattttcaaagtatggacatcaactgcggtgacgccaagctggtcaggtgtagctttaccatcaataatcgcctgtgcgttgttgattcccgccagcgcggcaaaccatgcaaatggcgatagcgttttcgggtccaccagacgctgccagctgtagacaaaatcttgcgccgttaccggtgtgccatccgcccattttgcgttatcgcgcagggtaaaagtccagatacggttgtcattacttttccactgagtcgcaacgccggggacaatctcccctttctcgttctgattcaccagtccttcaaacagatcgcgaatgacctgaatctctggcaggcccacggctttagcgggatccagcgacgcaggctcatctttaatgtggcgcaccagctcctgcttctctgccagtactgtgccgctcggaacttctgcagcatacgaaagagaaatgctgctgaccaacagcgcacaacacgtgactgaaacagagtgcttcataagtttccctctaaccgacattaaaattgatgcgtaattatttgtttcgccttaaagaaatgcaaacaacttccatcagaaagtgacacagnnnngcataaaatgttttatgtatcaatatattaaatcagatttagtgtaaataatagacgccaaaatgcggcaaagcacatagaacaccgaacactacgttcgggcttcacacgttcaaaccagttttcggtatcataatcagcatctgtcgccattgtacgaagaataaaaaataaccaaaacgttgaaaggaactgagaatacgttaagagaagaattaaattaatgtatcagcaagtagtgctaaacagcacctttatacttcagcctatctataaataatgagaatgccgagccagcatgtcgacggtgtggatagtacaggtgataaccgggtaaatctggtgtgaatttatccaaaacacgtatcagttttttttctttaatcgcccgctcaacctgatcataaggtagatacgccaatccatgcccatcaattgcagcatcaatgatcaggtctatcgtattcagtaaaagctgaccttccatgcgaacacgaacttcacgtccaccgcgtattaatctccagcgatttgctgtacccgatgtgggaagatacaaattaattgcctgatgatctattaattgtgacactgacgttggaacacttcggcgagaaaaataatccggtgagccaacaatagccattggtatatctggcccgattcgaatggcgatcatatctttatccatctccccacccagacggacgcctgcatcaaaacgttcagaaacgacatcagtcaaaccataatcaatgataagctgaatatcaatttcagggtgtgatttcaggaatgtgcgcatggctggtaacaatatcgtttttgctgcatgttctacagtagtaatacgtattgtcccggatgggcggttctgcagatcgctcagggatgccagggcagaatctatgtcatgcagcatagggccaagaacagacaaaagatgctcgcccgcttcagtgggtacaacactgcgcgtggttcgcgtcagaagccgcaatcccaatcgttcttctatacggcgcactatctggcttaaagctgactgcgccatgctcaggcgggctgctgcgcgagtgaagctacgctcctctgcaacgacgacaaacgccatcagatcagcgatctcttcacgcttcattcagtatctccatacaatctattaatcatttaantgataggtctaatcatgatttagggtctaatcaacttaatgatcaatatctatagtgatatcaccaaccgttaaaacgaaccaacaactccatgaggaacggaatgatgaataataaagtcagcttcactaacagcaataatccaaccatctctttgtctgcagtgatctattttcctccaaaatttgatgaaacccgtcaatatccggcaattgtggtatctcacccaggtgggggcgttaaagaacaaacggccgggacctatgccgaaaaactggcggaaaagggatttgtcactattgcttatgacgcatcttatcagggtgaaagtggcggcgagccgcgtcagttagaaaacccatacattcgtactgaagacgtcagtgccgtgattgattacctgacaacgctttcttatgtcgacaatacccgaattggtgcgatgggaatttgtgccggtgcaggatatacagccaatgctgcaattcaggatcgccgcatcaaggccatcggtaccgttagtgcggtcaatattggttcgatgttccgtaatggttgggaaaacaatgtgaaatctattgatgccctgccatacgttgaagcgggttcaaacgccagaaccagcgatattagcagcggagaatacgccattatgccactggcaccaatgaaggagtccgatgcgccgaacgaagaactgcgtcaggcctgggagtattaccacacccctcgcgcgcagtatccaacagcaccgggttacgctactttgcgcagccttaaccagattattacctatgatgcttaccatatggcggaagtgtacctgactcagccgacgcagattgtggcgggcagccaggcagggagcaaatggatgagtgacgacctgtacgatcgggcatcaagccaggataaacgctatcacattgttgaaggcgcaaaccatatggatctttatgacggcaaagcctatgtggctgaagcaatttcagtattagctccgttctttgaggaaactctgtaatgaaacatattcaaatccgcaatagtgatatggcctggcatattgctgccaatattcagtttccaccaaattttgatgagtcaaaacagtatccggcgattatcagcgtccatccttttggcagttgtaaggagcagacgtctggcaatatctatggcaaggcattggctgaaaaaggctatgtcgttctcgcttatgacgccagtttccagggagaatctggtggggagcctcgttggatagaagatccgacacagcgcgtagaggatattagccgtgttatcgattatgcagtaactctgccatatgttgatgctgaacgcattggcgtgctgggtgtgtgtggggggggggtggctatgccattaatgccgcgctgacagaaaaacgaattaaagctgtagtgagtattacgggtgttaatatcgggcgtctttttcgggaaggtttcagcaattacgatccgattggcgcattgaatgcaatggcgtcgcaacgaaccaaagaggctcgtggtggagaattacagatcaacgaattacttcccgccagcctggatgcagcaaaagcccatggactgaccgaacgcgatgtttatgaagcaactgactactataaaacaccacgcgggcaacaaccgggaggtgcgacaaaaatgttgttctcacatgcacagaaaacgctggcctgggatgccttcgcatttactgaagtgttactgactcagccggtgatggtagtagttggtgaaaaagtcggtgccttcggtgcttatcgtgatggactggaagtctatggccgggcgatggtttcgcaggatcgtcagttagtttcattacccgatttctcacattatgaactgtatgacaaaccggaagcagttcaggaggcgctggaaaaagttattccttttttcaacacccatctgtgataagtttcatgagaaatattatgaaaaatgtactcattcttggtgctggcggtcagatagcccgccatgtgattaatcaactggcagataaacaaaccattaaacaaactttatttgctcgtcagccagcaaaaatacacaaaccctatccaactaatagccagattattatgggggatgtactgaatcatgcagcactgaagcaggccatgcagggacaggatattgtgtatgccaaccttacgggggaagatttagatattcaggcaaattcagtgatcgctgcgatgaaagcctgtgatgttaaacgtctgatctttgttctttccctcggcatttatgatgaagttccaggaaaatttggcgaatggaataatgcagttattggtgagcccctaaaaccattccgcagggctgcggatgcaattgaggcttctggactggaatatacaattcttcgccctgcctggctgacggatgaagatattattgattatgagcttacctcacgcaatgaaccattcaaaggtacgatcgtatcacctaagagtgtcgcagcattaattacagatatcatcgataaacctgagaaacacattggtgagaatataggcatcaatcaacccgggactgatggcgacaagccattcttcatgtaaatcaattatataaccaccatcgtactgtactatgtgcagtacgatttattaaacttattaaggtgaactgatcaatcagatgcgattaacatgtgtagaaccagtaagaataaaatacgccatgtatataacattacgacaattctaatatctgcacatcaatgaaaatacaaacaacttccggcaaaaaagtgatacaagatcgatgacatagcgttgaagaaaaggatttgataatccgcaaaatttgcacaacactgcctgtaatacttcctgaaccagagacgatcatgaccgtaacccgcccacgcgccgaacgcggcgcatttccgcccggaacagaacattacggacgttcattattggncgcgccgttaatctggtttccggcccctgcagccagtcgcgaaagtggtttgattctggctggcactcacggtgatgaaaactcttcggtcgtcacgctctcctgtgctctgcggactttgacaccttctttgcgccgccatcatgtggtgctgtgtgtgaatcctgacggctgccagctggggttacgggccaatgctaatggtgtggatttaaacagaaactttccggcggcgaactggaaggaaggtgaaacggtttatcgctggaacagcgccgctgaagaacgtgatgtcgtattactgacaggtgacaaacctggctccgaacctgaaacccaggcgctgtgccagcttatacaccgcattcaacctgcctgggtggtctcattccacgatccactggcctgtattgaagatcccagacacagcgaattaggcgaatggctggctcaggcgtttgaattgcctctggtaaccagcgtcggttatgaaacgcctggctctttcggcagttggtgtgcagatctgaacttgcattgcatcaccgcagagtttccgcccatctcctccgacgaagccagcgaaaaatatctctttgcgatggcaaacttgctgcgctggcatcctaaagatgcaattcgcccgtcgtgaactgaagcgccggttccacatctaccgccagccaggtcggtccgtcaagatcggcgaaactgacctgcggcaccagcggtaaagcggcgctaatggcccgagaggtacacaacatgcagcccagcatcagactgaaaccttgtgcacgcgcttcagtcgccagcgccagcgcttccgtcagacccccggttttatcgagcttaatattaaccatctcatagcgccctttcagcgccttcaaattgctacgagtatgacaactttcatcagcacaaatcggcaacggatgaataaaattctccagcgccgcatcgtcctgcgcaggaagcggttgttcaagcatcgcaacgcctaaatccgccaatagctggcaacgtgccgccaacccttctgcacgccaggattcatttgcatcaacgatcagcgtggtatcgggcacagctgtgcgaattgccaccatccgctcactgataagatggttatccatcttcactttcagtaatttcgcgccggcctgccagagtgttgatgcactattggccatctgatcaggcgtaccgatgactaccgtctgtgcagtgataactgtctcgggaagcgttatgccgatcaaatcagccagcgattgctgctgttttcgcgcggccagatcccacaatgcacaatccagcgcattacgtgctgcgccggcagggagaattttttgcaactcctcccgtgtcagccctttctctaattgcggcacgacgctcataatttgcgccattaccgaggcatcactttctccataacgcggatacggcgtgcattcgccggtgcctttaataccctcttcttccagttcaaccaccaccacgcgcgcttcactgcgacttccccgggcaatcacaaacngggtatgtaagggccaggcttcctcaaataccttaacggttctcatctttactccttggtgtcgcggtggtctgcggattaagcgcaaatagcgtttgctgtgttattgacagttagcataaactaggtgtgacgttaactatatgtaaacaggaaagataatcatgtcacaaaccgttcatttccagggcaacccggttacagtcgccaattccatcccgcaggcgggtagcaaagcgcagacttttactctcgtggcaaaagatctgtctgacgtcaccctcggtcagtttgcgggtaaacgcaaagtgctgaacattttcccgagtattgataccggtgtttgcgccgcatcagtacgtaagtttaaccaactggcaaccgagatcgacaacaccgttgtgctgtgtatctctgccgatctgccgttcgcccagtctcgtttctgcggcgcagaaggtctgaacaacgttatcaccctctccactttccgtaacgctgaatttctgcaagcctacggtgtggcaattgctgatggcccactgaaaggtctggcagcgcgtgccgttgtggttattgatgaaaatgacaatgtgattttcagccagctggtggatgaaatcaccaccgagccggattacgaagcagctctggctgtactgaaagcataagttaatatgcctgatggtgttgcaccatcaggcatattcgcgcttactcttcgttcttcttctggcttaagccatattcccgcaacttattggcaatcgcggtatgtgaaacgccgagacgttttgccagtttgcgcgtgctgggataattgcgataaagctgggttaataccgagcgttcaaaacggctggtgatttcgtccagcgaaccttccatcgcatcttcgcccacggctaccgttgcggcgtcataatccggcaacaaaatatcctgtggacgcagctcataaccgtccagttgtgtcagtgcgcgatagatagcgttctttaactgccgcacatttcccggccacgcataacgcgtaagtacagtattcaggtcagcggccagtttcggacgcggcacgccctgctcgtcggcaaagcgggcgacgaacagctcagttaacggcatgatgtcctgcggacagtcacgtagcggcggcaggttgagcgtcaacacgttcagacgataatagagatcttcacggaacatgcctttttgcaccagttcgaccagattcttntgcgtagcgcaaatcacccgcacatngacatgcacctcatggtcttcgccaacccgacggaaagtgccatcattaaggaaacgcagtaatttcgcctgcatccgtggtgacatctcacctatttcatccaacagcaccgaaccaccgttcgcctgctcaaagaatcctttcttcccttccggagcatgaccaaacagctcactctcgaccgcatcttccggtatagacgcacagttcagcgccaggtaaggtttgctcgntcttgggcttgcctgatggcaggcgtaggcaaaaagatctttacctgtacctgtgtcacccgtaatcagcagcggcgcgcttagcatcgccagtttctgcgcctgttcgacaacatgcttcattttcgggctgacagcgacaatttgactgaaggcgctgacgtcctgggcggcgacattttgcaactgacggcccatacgaatcgttgatcgcaacatcaccaccgcacctgtcaggacgtgttgatcattttcatcctgaagataaacaggcgtaatctccatcaggaagttctgtccattaataacaacatgctcgttatgggaatcttgcggttcgctttccagccaacgtaaaaaattaaagccgttaatcaattgtgcggcggtatggttgcgcagtcgatccaatttttgcccaaaaagctgacagctcgccgggttcgccatatccactttgcttttcatatcgacagagagcacaggttcaggcaacgcctccagtaacgcgctcaacgccagatgctcacgttcggaaggcatccacgggacagtacgcacatcggtaacacctgcaatacggcgtatttcggccatcagactgctgaaactctcaaactccagttcagcaaaattgaggtagattcgcccaatgggatcaatctcaataccgcgtaaatcaatgcctcttagcacgagtagatcgagtaattcgcgggtcagaccgagtcggtcttcacaaaagacttccagacgcatgggaaccttcacctgaaaaaagaacaattaatatgatgatatgacactatttgaatagcaggaaggtttctgtcaacaatcattgacacaaagacggaaaaacgggcacttcggcgtaaagatatccggtcagcacccgatattgcattatttttcgctgggcgttttgcctttttgcagcgtttctttcacctgaccgataagctgacgacggaaatccccgaggcgaggtttgtcatcgtcaatccacggcagcgggcggcaaagctccatagctttaatccccagtcgtgccgtcagaagtcctgcaccaatcccctgagctgcgcgggtagacaaacgagcagcgagatcttgcgacatccagtccattcccacttcgcgcaccaattcgctggctccggcgaaagcgatattcagcaataccagcttgaacaggcgcaaacggctgtaatatcccagttcaatgccatacagcgtggcgatgcgattaatcaaacgcagattgcgccaggcgataaatgccatatccaccagcgccagcgggctgaccgcaatcatcaacgttgattcagctgctgagcggctgatttcgcgccgcgcctgggcatctaaaaccggctggaccagatgagcatacaggctgaccacttcacgatcgttctgcgtttcatggattgaggcataccagcgttgcagcgctggatgagactgatcaatacccgcctgctgcgccagtttttcgcaaaatgcgcggcctttgcccgtgccgtggctgtgcaacaaatcgcgcgcttcgtcgcgttcatgggcgcgctgtcgcaagcgccataagcgccgccactctgttaccacagaacctacgccagcgccgataatcaatgccccagcagcacatccacccagcgccacccagtcctgagtttgccaggcattcattgtccactgtacaccctgcccgacaacgcttgcgccaaacagagccagcccgcccatcaccattttgcgccacaggctgcgtttcggacgtaacgctgcgtccattaccgcttcgacttgcccctcttcttcctgcgcttcgtcgagcgtggccggggcaaaannttgcgcctgattttcgtcaaaggtctgctgcgccctgaattttggattctgttcgacctccagcggaccgtcgaaatcaatacgtggttttaacggttcggtcatcgcaatttatctcctattaaaaattccagcgcggcatcaagacgaatatgcggcagcggtttgtcgacatccatcacctgcgggcgaaacgcttcaaactggaacccttgcttatcccagaacgcctgaccaggcaaacgtgcgggaacttcgccaggataaacagtgagcggtgcgccatcgctaagtcgattaccgcgcagcgccgggattttctcaccgttaacatcaataatgccactggtggtcgcctgaactgacgccagccccaggcaatccatgctgatcccttcgaacgccgcattttgccaggcatcctgaattagttgttgcagcaatgaaaccatattggcgtgctgatcgatggtcacatggtccgctttagtggcagcaaacaatagcttatcgataaccggcgaaaacaaacgcctgaacagggtacgctgcccatagtggaaactttgcatcagctgcgtcagcgccagacgcatatcattaaatgcctgtggcccactgttgagaggttgcaggcaatccaccagcacaatctggcggtcaaagcgcagaaaatgattcttatagaaccccttcaccaccttctcgcagtaataattaaaccgctcgcgcagcattccggcattggtgtgcttatcggcctgcgccagtttggactcgccccaggcatcgacatccggccacgggaagaattgcagcgcgggcgcacctgccatatcccccggcaagacaaagcgcccaggctgaataaagtgcagcccctgctgtttacagtggtggagataatcggtccacgcggcggcaatgtctgccagccggttttcgtcggcaggcgctagcgggtccagcccttcgcacatcattcgccatttcgccgaccattcgccgcgctggccattgagtaagcccgtcatctggcgcgaccagcttaaatagtcctgcgccagcatcggcaggtcgagcaaccattcgccagggtaatccacaatctccagatacagcgtggaggtatccttaaagtggcgcagcagcgaatcgttcgatttatagcgtagtgccaggcgaatttcgctgacgccgcgcgttggcgtcggccaggcgggaggatcgccatacagctgcgccaacccttcgtcgtaggtaaaacgcggaatgccaaagtcacgctgaggaatgcgttttacgcccagcagacgctcttcacgcaccgcacttaatagcggcaaacgtgctccggcatgaatattgagcaactgattgaccatcgcagtgataaacgccgttttgccgctgcggctaagtccggttacggcgaggcgcagatgtctgtcgacaccccgattcaccagcgcattaagttcatttttaagtcgcttcattgctgtcctgtgctgctctgaagaccagaaaaaaatcattcataaggatatgaatgtgggggccaggccattgattatcaactacccgtgttgtcatcgacgggcgaactccataagatgtgcagcattcacgttcggacggagttcctgacctatgtcccctactatttatgatattgccagggttgcaggcgtatcaaaatccaccgtatcacgcgtgctgaataagcaaaccaatatctccccggaagcgcgcgaaaaagtgttacgggccattgaagaattacagtatcaaccaaacaagctggcccgcgcgctgacctcttcgggttttgatgccattatggtgatttctacccgttcgaccaaaactacggcgggtaatccgtttttctctgaagttttgcatgccatcaccgccaaagctgaagaagaaggtttcgacgtgatattgcagacgtcgcacaccccggcagaagacttacaaaaatgtgaaagcaaaattaagcagaaaatgattaaaggcattattatgctaagttcgccagcggatgagtcattttttgcccaacttgataaatacgatattcctgtggtggtgattggcaaagttgaaggtcaatatgcccatgtttattctgtcgataccgataattttggtgacagcattgcgttgaccgatgcgttaattgaaagtggacatcaaaatattgcctgtctgcatgcaccgcttgatgtccatgtttcagtggatcgggtaaatggttataagcagagtctggaagatcataatattgcagtgcgtgatgaatggattgttgatggcggttatacccatgaaacagcactgcaagcagcacggcaattattaagtcagtcaccgttgcctggggcagtgtttgccactgacagcctgaaattaatgagcatttatcgtgcggcggcagagaaaaacattgctattccgcagcagttagcggtggtgggttatagcaatgaaacgctgtcatttattttaacgcctgcaccgggcggcatcgatgttccgacgcaggagttaggtcgacaaagctgtgagttattattccgcttaattgccggaaaaccgtcaccacaaaatattaccgttgccacgcatatgacgctgaaataaataccagcgaccttgcctgaatgccggatgcgatgctggcgcatcttatccggcctacatttatagatcggataaagtactcgcgccgcatccggcaatttagcccattatcagaacgagtaatttacgccgacacctgcataatggaatttatcgctgtcgccttcgtcgtgatcctgccactcaaacgcgtattccagcgaaatggaaagaccattctggaaatcataaccgtaaaataaaccaacacggttaaaatcatggccttcacgttcaatatcatcctgccagtcccagttactccagcgatccagcccaatgcgcgtatacggcgtcaccgagtggttgccgagcgtcagcggcaaataggcgcgaatttcttgcgtggaaaactcaccgttattacggctgtcgtccatattgaagccgcgctcgagataatagttcactcgcaaggcaaccgtttcgttgaaggtatattgcagacctgtttccgtttcgacacgggtatcagcgtaaccggtcgtgttcaaatcgttggcaaatttatacatcgacaaccaaccgttgaaacgtaaatcgtcagtcagtttcacatcccagtctggcgcgattttccagcgctgcatattcgccgtgtctttacccggttcatcaacgtagtgataaccataattacggaaaccgccggtcaggccgaaactgaaatcatcgctttcgaggaactgataatgtacctccagctccgggcgatcaaaccacgttccacgtttacccgcgctataatctaccggcccttcctgataataggccagagaaattctccacggcccgttggcggcattaaaatagacagaaggctccgccagcccatccatatcttcgccataacactcgacgttttctatttcgtacatcgcgccgatattaaagtgccagtcgttcttttcctcggcctgtgcgcaggccattcccgcacacatcaccagtgcggtacagggtaataactttttcattattgttccttgtattatcctgggggaatgccttccccctgtatttagcgaattgctatttccgtttctgcatcaaagaaatgacatttagtcatatcaaaatgaatagtgatattttctcctgcatgataatcatttaacgcaccagcacggaccactaactcgtgccccccaaccgtggtgtagagcataaattccgcaccggttaattctaccacgctaattttggcggaaatattattttcctcttgcgcgtccggatgaatatcttccgggcgcattcccatcacgatgggcttatgcaaactttcctgtgttttcagaaccgctaatttctcttcgggaatggttaatttaagcgtttccgtaacgaatttatcgccatcgatcgtgccgcgaataaaattcatcgctggtgatccaataaatccggcaacaaacatattcgcgggttggttataaacggttttcggcgcacccacttgctgaacaatcccgtctttcataatcacaatccgcgtcgccatggtcatcgcttcggtctgatcgtgggtcacgtagatcatggtggtgttcagtttctgatgcagcttgctgatctctgcgcgcatttgtacgcgcagcttggcatcaaggttagagagcggttcatccattaaaaacacgcccgcttcgcgcacaatcgcccgcccgagcgccacacgctggcgttgcccgccggaaagcgcgcccggcttgcgcttcaggtactcacgcaggccgagaatttgcgccgcccagttcacccgctcatcaatcacctctttggcgattttttgcatcttcaggccaaacgccatgttgtcgtaaaccgtcatatgcggatacaacgcgtagttctggaacaccattgcgatattgcgtgctttggctggaacgtcattcattcgtttgccgtcgatcaacagatcgccgccgctgatctcctcaagcccggcaatcatgcgcagggtggtcgatttaccgcagcccgacgggccgacaaatacgatgaactctttatcggcaatttccaggttgaagtccttcaccacatgcacctggttatcgtagattttttgaatatgttgtaacgaaagctgagccatgttgattcctttgctatacgttttgccagaaggccgataaccgcggccaggtcagggagtccgttgagggcaacaataattgcgccccggttaagcctgcgccgatccccaccgagcgcataccgctggcgttaatggcgtcaatgcccgcctgcgcatcttcaatgccgatacatgcctgcggcggcacgcccagcccggcacaggcagcgagaaagatttccggatccggtttcgagtttttaagttgggaagcatccgcgcagaaggtgaaaaactcgcgcagctccagcgccgctaanatcgtcggcgcattcagggagacagaagccagccctaccgggatctgctgtgcgcggagctctgccagcaaattgcgaataccgggcagcacagcattaaccgtcagctcgcgcagtgagtggacgtaaagcagatttttgcgatacgccagttgcgtccgctcctgcgggttaaagtcgccctctttgcccccgtgttgcagaatgcgccgcagagactcatcgcggctgatcccttttagggattcgttaaactgcgcatcaatgctgatgccaatttcagcggcaatctgctgccacgcctggaaatgcagatgcgcggtatcggtgattacaccatccagatcgaaaattaccccttgcagtttcattcatcctcctgatgcgtggtagcggtcccattgaagggcaaaataaaatcacccaaacagaaaacagattcttcagccacggatataagctgcccgttcaaacgcagtgaaacgggcgcagaagttcgaatcgcaatacgctgcgcgtcgagcgtgacctgtaattcgcagccctgccagaacagagggaaagacaactgttgccactgctccggtaacgccggattgagatgtaattcaccgtcacgcacgctcaccccggcaaaaccctgaatcgcccccagccagatagcgccagttgcggcagcgtggataccatcatcacaactatgcggatcagcaccaagatcgatttcagtcccctcgcgccagaactgataactttgggtcagcaggccacagcgtgcggcaacaatgccgtggattgctttacttaatgacgagtcgtgaatagtgcgcggttcataaaattgcagattggcaagacacgataccgctgagaactgctccggcagcatgtaattgagcatcaccacatcagcttgtttgaggatctgcatctcgttcacttctgcgcgtgaataatccagcagaatggtttgcttccccgccgccgctttgtatttagccagattaatcgccggcttagccataaacgaatcatcctgcggcaaaacgccatcgggctgcgtttctggcatccatagctctttgaggaacatttcggcgcgatggataaacgcatcgtcgctacagccgaactggcgggcaatattcagcgcctgttgaacgttgtagcgggccatatagctggtgaaggcgttattattgacatgttcggtatattcgtctggcccaataacatcatgaatttccagacggtcgttaaccctcaccgcgcggctaatccagaactttgcagtttccagaagtagcgccatgccttcatgagcaatgaaactttcatcccccgtggtctgccagtattgaataaccgcccaggcgatatcggccaccagatgatgttccgcctgcgccgaggccactttttgccgcagcccggtacgaatgttaatggcggcaaattctggcgtctcttcttcgccgctncgcnnnntttcccacggaaatagcgcgccctgccagccgctgcgccgtgctttctcctgcgcgcctggcaagttgtgccagcgataacgcagtaaacttcgggcaaccgtcggatcgctaaacagatggaacggcagcaaaaatacttctgtatcccagaaaacgtggcctttgtagccttcgccggttaagccttttgccgcaatactgctgcgctcgtcgtgagccggcgtcatgatgcgcagatgataaagcgcataatctaacgcttgctgatcgtgcgcatcgccgccatttaccgtgatacgacgtttctgccaccattgacgccagttttctgttgatgctgcaagaagttggtcgtaactctgctgcgcgcatatttcaagctggcgaagcgacgcgctgccccactcgtctaaaacggcttgcctgtcatcccgccagtcgatccacaccagtttttgcaacgtcactgtctcgcctgcatgaagctgcgcactggtatgttgcagcaaacggcgctctttggcggtatagcattgctgcacatcaccgctcaccttacagcaacagctgatggccacatcactgcgtccatcctgggtggtgtagatcccctgcatcagatgctgaccaaacacccgcacctgggtttcgtcgagatgttggcgaccgtggttggtttgcgtggcgtcgatacctgttgaaatcagcactgacgcgtcggcgtccagtggcgtaatagtgatttccagcgcaatgagcggcagttggtctgccgaaacaaagcgacggctggcgatggtgtaacctgcgccgttgctggtacgccagacaacgttgcggcgtaattcgccactggcaaagtcaagctcacgctgccaggcttcgtgggataacgagaaaacctcaccatttatggcaatctccatccccaagatatcaggcaggttcaccagttcgttgatttcaccttttcccgcccgatgatacagccccgccagatacatccctcgcgtctggcgcgtgtaatcttcttcatggctggcgcgaagcccaagatagccgttcccctgcgccatcagcgatgcatacttgttcagggtatgctggctgaaatggggttctgataacgttactggcctggtcataattccacacgcgtccctgtttctgcggattgatataacgccgccaccagttgctggatgatgtacccctgctcggcgtcggctatcatcacgggcttgccctgtacgtgattgataaaggcttccatgctgcccaaatggcggttgtcgtctgccatttcccgttgcatcagcgtcattaattcaccgttgttatcggtgtagatatgtgctggaaacagcgtcgcaccggctttatcaccacaaaagctgacgttcataatcgactgttcgcggatgttgagcgcaaatgacgtttccagccacagaatgccgccgttatgaaattcaatggtgccaaacagcgaatcttcgacgctgtaagttgccggatcccactcgccaaattgaccacagctcttttgcgtgccgatcttttgaaagctatgcgcattcacgcttttcaccgcaggatagcccagcacatacatcgcagcatccagcatatgaatgccgatgtcgatcagcgggccaccaccctgcagttctttattggtaaagacaccccagccgggaacnccgcagcgacgcagggcgcgggcggtggtaacgtaaatctctcccaaaacgccgttggtcacctgttcacgcagctgttgcgtatcgagcgcaaaacgatggtgaaagtcgtaggccagcaccttgccctgtttgcgcgcggtatcgcacatttcccgcgcctgttctggcgtcatggcgggcggtttttcgcacatcacatggcagcccgcttccagcgccatcagggtatgttcgtaatgaaaacggttaggtgagcagacgctaaccacatcaggtttcaccgccagcagcatggcctgcggatcgtcccacacggatgcattcccgtatttttctgccagcgcctgcgcctgggaaaggcggctgtcacagacagccaccagttccagatcgttgcgggtgcagtagtacgaagcatgaaccttatccgccacctggcctgcgcctattatcgcgacccgcagtggagagcttgtcattgcacttttcacaaagacctcttagcaggtacgcaaccaggtcaacgaatcacggtacgcctgggcaggatcttctgcccggatacgcccttcatacaccacataaccctgatagttatcggcgcgcagctgttcaaacagcgcgtggaaatcgagggtgccgctgcccggctggtaacgatggttatcggcaatatgcacatgaccgagcaagtcgcggttgtcatgcagcgcctgcgccaggttatcttcttcgatgttcatgtgatagaaatcgccgataatctgcacatgtttaagattgttttcgacgatgtaacgacgagcatcggcgagggtgttgatcatatgatcctgatagcggtttaacggttcgagatacaccacggttccggtacgcgcggcgacctgttccagtacgcgcagggaatcactcaccattttgcggtcgccgtccaggctacgcggcgaggtcatcggcggtaagcggaaggtaaacatgccccacgctgccggaacgacgatacctttaccccccacttctgccagcgcttcgagaatgcgttcgatctgctttaagccattaagacgacgctcttcgataaagtcaccaatccagccgtcatagccgccgcaggcggtggtcaccggtaaaccggtttctttgatcgccgctttgacttcttcgatgttgttgaccagcagtttgccgtcaatctcaaaaccatcgaagcccatctctttgatataacgaaatttctccagaatattttccgggaagaacgcctgattctgtgtgcctattttcattttttcattcctttgaattaaaacgtgacgcccattttgatgctctgttccggatgctgatcgacatactgcatgtagctttccgggctgttggcaaaggtcactaccgggtcgattaaatcttcgcaattgagataaccgttcatcagcagtttccagcaggtttnttcaatacgcttacggctccagcgcggataatccgggttcggttcactgcacgcgcgagagaagacaattttggcgttattgaaatgcgcttcgcgtccgaggttaaaaccttcagcaaacggtttagcaaacgcgacataggagatggtgccaccgtaagccaggccgcgcagcgccgactgcagcgcgtcggcgtaaccgctggtttcgataatcacatcggcaccctgcttgccggtcagcgttttgatctctttgcctacgtcagtgccaatgggattaaggcagaaatccgcaccgtgacgacgagcaatatcacaacgatgggcaataggatcgacgccaattaccaccgacgcgccagcgcgtttagccagttggatggcaatttgaccgatcgcgccaagccctaccaccactacaaaatcccctacgcgtacgttggcatcgcgaacgccactcatggcaaactgcgccgggtcgtagcagacagcgtttttccaggagctgccttccggcattttgcgcagcttgtagttattcactgcgttaatgatgatcgtctcggagagcgggccgtagccgcatacgctgtcgcccaccgcgtagtcggtaacgtcgctgccgcactcgataatgtcgccaaccaccatgttgccaagctggaatttgccaaactcaatgccgcgcggcgcatctgccggacgcggggtgaacatctgccattcgccgttaaagtcttcatcgataaacgggctggcggcgcggaagtcgaccacttccgttccgtgtttcggtgcgccgaaacgcacgcggatcttcacttcattggctaaaatcgcccgatcttcatactcaaccagcgcagcaacgcgcggtgctgtggctactaactttttcatgtaaaactccttgtaaagaaactggccgctttagcccttcacgccaccggcggtcaaaccactcttaataaaacgttccgaaagcgcatacataatcaccaccggcaatgcggtcaccagcgaggccgccatcatccgtccccagatgtaatctggcgtactgaacagcgcgttcaggccgactggtaaggtgaaattgctggcgctggagaggaaaatcgacgcaaacagatagtcgttccatgccaccataaagcagtagacgaatacggatatcagcccggacatcgccaggggcacggtgatacggaagataatttgcagacggttgaggccatccatcatcgccgcttcttcgatctcatcagggatggtgtcgaagtaacttttcagcataaacacggcggtgggcagagtttgcgtcaccatggtaatgatcagcgccatctcggtgtcgtaaatgccaagtgcggtgataattttgaacagcggcaccaccagcaaaatgccggagaacatatacaccgtgtaaaagctggcgttgatggtcatccggcctt

SEQ ID NO: 593 - DNA, 4289 bp, Escherichia coli
  Strain O55:H7
  modified_base (1477)..(1477): a, c, g or t
  modified_base (3517)..(3517): a, c, g or t
cgcaggcgagaaagcgcgtaagctccgagaatgccgagaaataccgccaccacggatgaaaccaccgacaccaccatgctgttacggaagtagtcgacaaacgggaaaatcaccgggttaaaaatgtcgacataatgctccagcgtccactgttgcggcagcagcgtaggatgcagcgagatcgcctcttttgcgctcttgaacgaggtcatcagcatcacaaaaaacggaaacagcgtgatgatgagaaacagcgccagcccgcagtaaaaaccgatacgactgagtgtgcgtttatttgttgccattgaggttcacccgtttcctggtcagcagaatgacagcgaaaataatgatgaagagcaccaccgagatcgccgccgctttccctaagtcattaaaggcaaaggcggttttgtagagatagacaccaagaatatcgaccttggttgtcagcagataaacatccgcgaacatgtagaacatccagatggtgcgaagggtcaccaccgtcgccaggaccggcataatcgcgggcagcgtgacgatacgaaaccgttgccaggcattagcgccatccatctctgccgcttcgtacagcgatttgtcgatggtctgcaaaatcgccagaaacgagataaaggcatacgggaagtagcgccagatggcgaagatcaccaccagcacaaaactactgcccggattatcgaaccacagcggtgcctgctcataaagatgcagaagatcgacgccgaggtagttcacaatgccgtagccgttgttgaacatgtatttccaggcgaacaccagcgaaatagacggcgttacgtaggagaggatcaccagcgaaagcgcggttttgcgcaggcggaactcgcggttgaaaaacatcgccactgccagcccgagcacggtgctgcccgccaccaccaacgcggtataccagaccgtcatccacagcgagtgccagaagccgggatcggagagaatacgcacatagttgcttaccccaacaaacgttgactcgatgttgggattgagcggcagacgtaaaaaactaatttcgatattcgacaccattggccacgcaaccagaccgcccagcagtaataagctgggtgcgagaagcaacagcgcaaagggcatatcggaacgacctgaaaaaagcctgttcattgcggattcctgtcctgggtttagtgctgttcgatcagttcatccagctttttctggctcgtttgcagcgtgccagggagatcggctttacctacggtgacgttatgcaccatggagctcaccaccccagaccccgtcacatcgcccatgcgggtaaagtttttatcccctactgcgccaaagacctgaatattcggcagttcaccgattaactgatttggcagttcacccagcgccttaataacgtcgttgtctttccaggtggaagtagtgacaaccgctttgttcaccggcagcgccncgcctggcgacatcatcacccagtcggcaatgttgtctgcctgctccataaaggtgacaaatttttcagccgcttccgtttcttcagtcttttgtccggcggtaatggtcagcgaggtcaacatgccgtagacggcagagtttttctcggttggcaccacgaaaccgacgtttttcggatcgccttctttaatcacagccggaaggatataggtggagtaaatcgccatcggcgcggtgccgttcataaaggcgtctttcacttccatgatgtcgttagaacccggcatggtgttggcagcaaggtcgcggtaataggtcagcgcctgcatcatctctggtgaatcaagggtgattttgccttcggcgttaaagacgttggcctggttggataacgcaaactgggagaaggattgttccgtcagcacgctttctgccgtaggcagcgcaataccgtattttttattcgccgggtcattcagtttctgtgcaacgtccagcagctgttgccagtttttcggctcctccagccccgcttttgccagcacatctttgcgataccagatgccgccaatccaggcgctgacaggaacaccggtccatgcgctaccatcttcggtacgcacaatacgcagtacgccatcgtaaaacgcgccttcaccaacgttgctgatgaccgtggcaaccgccttgcgatcgataagctgctctttgtccataactttggcgtagtcatgactggtttcaatcacttccggcagcgagccgctacgtgaaagagtgatgactttggtgttataagcgtcctcttcgacgggcacttgtttaacggtgatacctgggttttctttttcaaaacgggcaatcaatttgctgataactgcctgacgctcctgctccaccgaagaatgcataaattcgatggatacatgggttttattttcttctttacagcctgaaatcagggcgcaggaaaccagtgctgataacagcacgatttttgatttaatcatgagatgttcctttttatttaatccacataacctgccaggggcgcagcgttattttattacccaatatatcaacttcactaatcagatcccgaccgtgcaggccagtaatatttacatgctgaatatttttactgacattaaacaatccggtcagacaattaccctctgcgttacttctttgaatacgcattacggatgaattaaccgtatcgatggtaaaattattatccggatgaaactcgttatggctgcgacgaagtgtaattaaacgcgacaactcatgatataccgcatgccttaatgtagcttcatcgttcagttctcgggttatctcttcactgtgatattttttacggttaatcgcacggttatatccgagtttttcgacacctgcgtaatcattacgcgagcccagaatactttgaatatatatcgctggcacaccggggaaacttaacaaaatcgcatgggcaaggataaacctggcgcaacgttcttcatcgctactctcgcggcggcttaacgcatccatataggtgacatttatttcatagggactgcgcgtaccgtcgggattatttttccagtttactaatgcaccttcctgctgtaatgcctcgaccagcgctaatatttcgctttctggtaacaagccccgcagtgggttcagcccgatgccatcgtgagaggcgaggaagttaaaccaggtcgttttaccggagggcaagctcagactttgcgcccactggcacagcgcctcgacgttctgtttttgcaccgcatgtaacaccagcggcggcagcgagaactggtacaccatatgcgcttcgtcatcgccttcgccaaagtaagcaatgttatctttatgcggaacattcgtctcagtaataatcaccgtacctggcgcgatgtcatcaataatcgaccgtaacagtttgataatcagatgtgttttttccagatggatgcagcttgttcccggctctttccacataaagccaacggcatccagacggacatattctgcncccttttccaggtaacaaagcaaaacatccaccatcgccagcaacacgtcagggctacggtaattcaggtcaatttgatcgtcgctaaaggtggtccataaatggcgcgtggaattatcatccatttgaaacggcgttaatagcggtaatgcacgcggacgggtgacagcgctgagatcggtttgcggatcaaccgcaataaaaaaatcttcaaaacctggctgctgttgtaaatagtttttaaaccattcactttttgccgacatatggttgcagacaaaatcaaacattaaatgactgcattcaccgagctgctgaatatcctgccactacccgcttcactggcgacctgatgataatcaattaccgaaaatccatcatcagatgaccatggataaaaaggtaataaatgaacatgtgaaaaaatgctttgcagccattgatggtaaaactgattaaatgtgggtagtggttttaaatcattactgtgaaattgatcggcataggtaattaacacgacatcactttcatcccagtgttttttacgtcgctgtgtaattaatcgtttcgcactctcaagacgcgttacaagtttctgtaaatgagttgcggtaaatgttccaccgtagatttcgtccaggtaatccgtaattttctgtttcatgttgcctttcctggtagcggtcccatgaaatgagagactactccgcagaaaataaactgtcaattgagcacaagggttttagtcacgcaggaaatcattttttaccag

SEQ ID NO: 594 - DNA, 5301 bp, Escherichia coli
  Strain O55:H7
  modified_base (1056)..(1056): a, c, g or t
  modified_base (2097)..(2097): a, c, g or t
  modified_base (3482)..(3482): a, c, g or t
  modified_base (4581)..(4581): a, c, g or t
  modified_base (4979)..(4982): a, c, g or t
aaagcgtatttgtgagctgacgcaaataatctatagggatgtaaataaggtgtgacagaaaaaaacggcgcataagcgccgctcatggtgaattcttttaacctttgaccttcggcattgcgatgtctttcaggccaccggcgttctcaacgtgggtatatcccatctcgctaaggatctcttttgcctgccctgattggcgtccggcattgcaatacactttcacggtgtcgtttttatccggaacgacggtggcaatgcgctctttcacttccttcaggggaatattgatggccccctgaacgtgctcttgctgatactgctctggaacacgaacatcgatccagtgttcagcggcgaaaacgggcagtgaaaacaccagtgccagagcaagtaagccttttttaaacatgtaagcgtccttctatggatgaatattgctatccattatacgcctgagatttaacaatttttgcgaaactcccctcaccttttataacgctgcgccagtttattggcagcccgacttaacagcggttccagcgccacagccagcaacattttcagcggtcggcgagcaactgattttatcgcccagcccgccacacccgctgggccatagcgcagtgcggtaagaagtaccagcttgcctgctaatttgaaaccaagctttaccttttgcccggcctgttgccagcgagtattcataactttcctcacagttgacggaaacggctacgtaacgtgaatgtatcggaagtgacataacgttccatctcgcgtaaacgcgtttcacttgccgccagttcacggtcgacttcatccagcaattcactgctggaaggtagctgctcaccaaaggccatgttgtccggcattggatcaagcgcaaatgacaaaatgatgtaagcaaccagggtaaacagcgccagaccgaagaaaatcgacaacaccaccaggatacgcaccagttttaccggtacatcaaaatagttggcaatcccggcgcagacgccacggaccatgccctgctgtggaatacgccataattttttnttgagattaatgcccgccattagcgatccctccagttcggatgttctgcatcaagaatagattccagcgcctgaatacgttcgcgcatccgttttgcttcatcagccagttgcgctaatcgctgctgctcactttgcgacaattcactgcgaccagaacgattgctgtaatgcagccataaccagatcggtaaaacaaacagcacaaaaatggttaatggaatagccagaaatagcgcgctcataagtactccttagacgatgagcggcggcgcgttcggacgccgcctggatgttattattgattgtcttgcttcattttggcttttaattgtgccagttgctcgctgattgcatcatcggctttcagttcggcaaactgatcgtccagcgatttttgtttaccgaagctgtggctttctgcttccgcttccatctggtcaatacgacgttcgaaagattcgaaacgagccattgcttcatccagtttgccactgtccagctgacgacgcacatcgcgcgacgagtttgccgcctgatggcgtaacatcaatgcctgctggcgagcgcgtgtttcgctcaatttgttttccagctcgccaatctctttcttcatgcgtgccagcgtatcgtccaccagcgtcacttcatgttccagggacttaatcagatcggtcagtttctgtttttcaattaacgccgcacgcgccaaatcctctctctctttcagcagcgccagttcggctttttcctgccattcaacttcacgcgccgacgcttgttcaatacggcgagtcagctgtttcttttctgccagcgcacgcgccgaagtagaacgtacttcaaccaatgtatcttccatctcctggatcatcagacgcaccagtttctgtggatcttccgctttctctaacagagcgttgatgttggcattcacgatgtcggcaaagcgagaaaaaatacccataatgttgtcctcttgatttctgcattcaggattgtcctgctgaactgttaatacaatttgcgtgccaattttttntctttttgatttataaagatctgattgaagaatcaacagcaacatgccaggatgaattagctaattacactaacaagtggcgaatttcatcatggcagaatacaaagataatttactcggtgaggcgaacagctttctcgaagtgctggaacaggtttcgcatctcgcaccgctggacaaaccggtgctcatcatcggcgaacgcggcaccggtaaagagctgatcgccagccgcctgcattatctctcctcccgttggcaagggccgtttatttcccttaactgcgcggcgttaaatgaaaatctgctggattccgaactgtttggtcacgaagcgggggcgtttaccggtgcgcaaaaacgtcatccagggagatttgaacgtgccgatggcggtacgctatttcttgatgaactcgctacggcaccgatgatggtgcaggagaaattattgcgcgtgattgagtacggtgaactggagcgcgttggcggcagccagccgttgcaggtgaatgtgcggttggtatgcgcgacgaatgccgatctcccggcgatggtcaatgaaggtacttttcgcgctgacctgctcgaccggctggctttcgatgtagtgcaactgccgccactacgcgaacgtgaaagcgacattatgttaatggcggaacactttgccatccagatgtgtcgggaaatcaagctgcctctgttcccggggtttacggagcgcgccagagaaacattgctgaattatcgttggccaggaaatattcgtgaattgaaaaacgtggtggaacgttcagtgtatcgccacggcaccagcgattatccgcttgatgacatcattattgatccctttaaacggcgtccgcctgaagacgctatcgccgtttcagaaaccacctcgcttccaacactgccgctggatttacgtgagtttcagatgcagcaggaaaaagagttgctgcaactcagtttgcaacaagggaaatataaccagaagcgcgcagctgaattgctgggcttaacctatcatcagttccgcgcgttgttgaaaaagcaccagatttagcgaagttgggcaatacaacttgccggatgcggcgtgaacgccttatccggcatacataatcaatacgtcgtttgcaggtctgataagcgcagcatatcaggcattattgcgttgcccctgcttctgcgtattaatctctcagcgcatcctgcaaaattttcattgccgcatcgaattgcgcatccgggatggtcagcggatacaggaaacgaatcacgttgccgtatgcgccacaggtcagtagaagcagtccctgcgccagcgcgcgttgctgaattttttgcgcaatggcggctgacggctcgcccgtttgcgngtcgttaaattctgccgcaatcatcgagcccagaccacgtaccgccgcgatggccggaacgttttctttggcatcaatcagggttttcgtcagacgctgccccaactgcatggcgcgctcacagagtgactctttgtcgataatgttgagcaccgcgtgcgcggcagccaccgccagcggattcccggcgtaggtgccgccaagcccgcccggcgcgggcgcgtccataatattcgcgttaccgaccacacccgaaagcggcatcccgcccgcgaggcttttcgccatcgtcattaagtccggcttatcggcgtaatgatccatcgcaaacagtttgccggtacgcgcaaagccgctttgcacttcatcggcaatcatcacaataccgtgctcgtcgcacaggcggcgaatggcggcaaccagctcttttggcgcaacgttgaaaccgccctcgccctgcaccggttcgaaaataatggccgcgacctgcttcgcttcgatgtctgatttaaacaagcgttcgatggcgtcgagggagtcctgtgttgaaatgccgtgtaaatctgacggataaggtacgtgatacaccgaaccagggaacgggccgaagccgattttgtacggcgcgacctttccagttaacgccatagtcatatacgtacgaccgtggaagccgccgctaaacgcaatcacgccagggcgtccggtatgggcgcgggcgattttcaccgcgttttccaccgcttccgcaccggtggtgaagaacgcggttttggcctgcccgctcaccggggcaagggcgttgattttctccgccagggtgacgtagctttcatatggcacaatctgatacgcggtgtgggtaaactgttgcagctgctgctccaccgccgcgaccagatcagggtggcgatgtccggtattcagcaccgcaatgcctgcggcgaaatcgatgtactcgttgccctcaacatccttcagcgtggcgttttcagccgactgggcgaagaagttacacatcacgccaaccccgcgcggggtggcagaaagacgacgctgatggaattcattgttgctcatgtttcacaccttttgactnttcactgttaatcggaaattaaacgcccagacgatcgcgcaggctgtaatacgccgcgcccatcgcggtaaacggtacgcgcagcgtgcgcccgccggggaacgggtaatgcggcagattggcgaaggcatcgaaacgttcggcgtcgccgcgcagcagttcggcaatcaaacgtccggcgagatgagtacaggtgacgccgtggccgctgtaaccctgcatgtaatagatgttggtatcgaggcgaccgaactgcggcatacgcgacagggtcagcaggaagttgcccgtccagcgatagtcgattttcacgcccttcaactgcgggaaggttttcagcagtttcggcaccacaagacgctcaacgtcatccgggtcgcgcgcgccgtacaccacgnnnncgccgtacagcaaacggttgtcggcggtaagacggtagtaatcaagcagataattacagtcttccacgcagtagtttttcgggatcagcgaacgggctaaatcatcggaaagccgctcggtggtgatcacctgcgtaccgcacggcatgctgcgtttcgccagttccggctccactttatcgcccaggtacgcattcccggcgacaatcacatacttcgccgtcacctgacctgtggctgtacgcactacggcgggcgtggtgtgctggatctgcgtcactgcggaaagctcatacacgcgcccgccgttcaggcggat

SEQ ID NO: 595 - DNA, 7454 bp, Escherichia coli
  Strain O55:H7
  modified_base (1092)..(1092): a, c, g or t
  modified_base (1688)..(1688): a, c, g or t
  modified_base (1910)..(1910): a, c, g or t
  modified_base (2115)..(2115): a, c, g or t
  modified_base (2847)..(2847): a, c, g or t
  modified_base (2874)..(2874): a, c, g or t
  modified_base (3560)..(3560): a, c, g or t
  modified_base (5223)..(5223): a, c, g or t
  modified_base (5409)..(5412): a, c, g or t
  modified_base (6922)..(6923): a, c, g or t
  modified_base (7260)..(7260): a, c, g or t
  modified_base (7304)..(7304): a, c, g or t
cgcttcgccaatggcgaggttcagcgggtgaatatgcccgccgctgtgatccagcagcgcaccagtgtagcgatcgctggcgacctcgcggcgaatggcgttggcgtccagcatctccagctgtttattgccgtagcgttcccagttctctttctgctcttcaagtgtggcgagctgtttatcattcatcgccacaaacagaccgccggggcggtagtcgcagtcaatctgataacgtttgatacgttcgcggatgatctcaccaccttcgaacatcatgctgccgagcatacgggcggtgtccatgccgtagcttttttcgataacgtcgatgtcgcggctgtaggagttcacaagctgcccgccgttgcgcccgctggcgccaaagccgatgcgtgaggcttccagaaccaccacgtcaaagcccgcttccgccagatgcagtgcggaagacagcccggtatagccgccgccaaccacgcaaacgtcgcaggaaattgactcattcagcgtgtcgaatggcgcgtatttattcgcactggcggcgtagtaactgctggtatgttctgtcatttcaggcctccaggcttatccagatggttttcagttcggtgaatttttcaagggcatgcagggatttgtcgcgaccgttgccgctctgcttatagccgccaaacggcacggtcatatcgccgtcgttgtagttattgacgaagacggaaccggctttcaggcgtcggctcatgcggtgcgcgcgggagaggtcgcgcgtccataccgccgcgccaaggccgtactggctgtcgttggcaagctgtagcgcctgttcttctgatgtgaaacgcgtgaccaccagcaccggaccgaaaatctcttcgcggcttaaggacgcattcgggtctacatccacaatgatggtcgggccgatggcgacagccagcccggcgttacggccatccaacaacagttgccctttgctttcgccttcctgaataaagctatggaccgagtcggcgtgggcgcagtcgattaaggtgcccatggtggttgcgggatcaagtggatggcccggctgccagttttgcgcctgcngttttaacagggctaagaattcatcggctatgctctcttccagcaacaggcgcgttccggcgatgcacacctgcccctggttgtagaagatgcctgctgcggtggcgcttgccgcctgttgcaaatccgggcagtcagcgaaaacgatgttggcgcttttgccgcccgcttccagccagacgcgtttcatgttgctgtcgcctgcatctttcagcagctgtttcccggtacgggtcgaaccggtaaaggcaatggcgtcgatatcgttatgacgcgacagcgcctgccccgcttcatgaccaaaacccgtcaccacgttcaacacaccatccggcaagcctgcttctttcgccagccccgcgagacgaatcgcactgagcggtgatttttcagacggtttcaggacaacgctgttccctgctgccagcgccgggccaagcttccagcaagtcagcagcagcgggaagttccacggcacgatggcggcaatcacgccgaccggttcacgcacgatcatcgccagctcatggctactggtggtcgccacttcgccatacactttgtcgatcgcttcggcgtaccagcgaatggcgcgngccgcgccgggtatatcatcacgcagactgtgacgaatcggtttgccggtgtcgagagtttccagcagtgccagctcttcggcgttggcttctattaaatcggcgagtttattcagcaccgctttacgttttgccggagaagagagtgaccagtcgccgcgttcaaatacgccgcgtgctgcgctcaccgcacggtcgatatcgacgctcttgccgcgcgcnatattcgccagcggtgcctgggtaaccggatcaacggtttcaaaggtttcattttccgccgcagcagtatattcaccgttaataaataagcggttttcaatggcgagacttaacgctttatcctgccagtaagccagatgatgaaaattcattatgactcctgtttcacgtctatcagatatatgcagtttgtgaacgtcagggngcagagatccccgggccgtatgcccgtttatttctggcgacattctttatggattgccgggcgcattgcgcttacccggcttacagaacaaaaagattaaaacgtggtgggcgtatgggcgctgataattcggcaaatacctgccgacgtattactgaaactgtgcgggatgccggtattaatggcataactttgccccgcgacgaggtggtaatcctgaccattaatcgtcagaataatttcaccttccagtacagtgcctatttcctcaccctgatgcttaattctttccccagtggttgtgcccggctggtacgtttcaaagatcatcgccagcgtgcgattcgggttaccgttatgaaccagcttcattgacacaccctgactgcccatctcaattaaatcgtcctgattaatgacgacctgcggctcatcaggtttttccggctcggaaaagaattccgagagtgacagaccatacaccttcagcagcttttgcagcgtactgatggcagggctgactttatcttgttctatcgtactgatagcactgtgagtcagcccggagagttcggcggcacgacgttgtgaaagcccctgctgctggcggatttccgacaagcgttttcctggcgccagtccctcatcactcatatttgcatttccttaaactgtagtggtcagagtcgctgtttttcagcgatatggtgctgacaagcggtgataaagccntcgaacaatatacgcgaaagcgcgtantcgctactgttccattccgggtgccactgtacgcccagcgcaaaaggatgattgatgacgctaaccgcctcaactaagccatccggcgagcgagcttcaacacgcaaccgtgggctaacgaccttcgccccttgtccatgcagagagtttacccaaaagttgctacattcaggtaacaatgcagacagcaatcccccctcttcaacctgaacttcatgcgacggtgcatattgctgttccaccggcagttcgggatcttcccgatgttccagcaattcaggctgttcgcacagcttgcgatgcaacgaaccaccggttgccaccaccagttcctgtaaaccccggcagatggcgaaaatggggatgcgcctttcgagtgcggcattaattaacgccatgctcagaagatcacgcccgggatcggcgtcaggctcatcgccgttttcaccatataggtgcggctgcacattgctgggactaccaggaaggtaaatgccatcgagtttcggcaaaagttgttcaagtaacgacggttccgccagcgcatgtggcagcgcaattggcaagccgcctgcgtggatgatggcattcaggtacttttcttgcagagtctgggtcgcatgccccttaagcctgttcctgcacattacgacaccgataaccggattgttcattatattttccangctcaatctcacaaagtggactaaattatcgccattactgcggtttaaatgacctttatgttcaatattttttcaatctagcagtgggttttcatttttgcaaactcaatttaacatttgacaaacatttagtttgcatacagattcgaatggtggtcattatattttacgctttgataacgagcggaaaacaaaccaaaggcgaagaatcatggaaaccaatatcgttgaagtagagaactttgttcagcagtcagaagagaggcggggtagcgcctttacgcaggaagtgaaacgctacctggagcgctacccgaatacgcaatatgttgatgttttacttaccgatttgaatggttgcttccgtggaaaacgtattcctgtttcaagcctgaagaagctcgagaaagggtgttatttcccggcctcggtatttgcaatggatattctgggcaacgtagtagaagaagcaggtctgggtcaggaaatgggcgagccggatcgtacctgtgttcctgttctcggttccttaaccccttctgccgccgatccagagtttatcggtcagatgctcctgaccatggtcgatgaagatggcgctccctttgacgttgagccgcggaacgttcttaaccgcctgtggcagcagctgcgccagcgcggattgttcccggtcgtagcggtagagctggagttctatttactggatcgccagcgcgacgctgaagggtatctgcaaccgccctgcgcgcccggcactgatgaccgcaatacacaaagccaggtttactccgttgataacctcaaccacttcgccgacgtgctcaatgatattgatgaactggcgcagttacagctgattccggcagatggcgcggtcgctgaggcctcgccgggtcagtttgaaatcaacctttaccatactgataacgtgctggaagcctgcgatgatgcgctggcactaaaacgcctggtgcgtctgatggcagaaaagcataagatgcacgccacttttatggcgaagccgtatgaagagcacgcgggcagcggaatgcatatccatatcagtatgcaaaataatcgtggcgagaacgtgctttctgacacagaaggcgaagattcgccgctgctgaaaaagatgctcgccgggatgattgacctgatgccgtcatcaatggcgttgctggcaccaaacgtgaactcgtatcgccgcttccagccggggatgtatgtaccgacgcaggcgtcgtggggccataataaccgtaccgtcgccctgcgtattccatgcggcgatcgtcataatcaccgcgtggaatatcgcgtggcgggtgccgatgccaacccatatctggtgatggcagcgatttttgccggtattttgcatggccttgataacgagctgccgttgcaggaagaagtcgaaggtaacgggctggaacaggaaggcttacccttcccgattcgccagagcgatgccctgggtgagtttatcgagaatgatcacctgcgccgctatttaggcgaacggttttgccatgtgtatcacgcctgtaaaaatgatgagctgttgcagtttgagcgcctcatcacagaaacagaaattgagtggatgttgaaaaacgcatagtaccccttgcggggttgtttcatcggcctgagnggagccaggcctgacatttgctggtaatccagacatttcccggatgtcgcgttatggagcgcaggcggcaacgggcttccgttaacgattaagactgtgacgaggaaatgagatgatgccgatgattaaatccccgcatggcgcgggaggctgcgtatgcgcccctcctgcgactgactggactcnnnnccctttgcttcccttgctaaacaggtttgatttcaggtcgacacgaccgcaaaccttattacgcaggggaggcagcaattatggctattaattcaccactgaatattgctgcgcaacccggcaaaacccgtctgcgaaaatcactgaaattgtggcaggttgtgatgatgggtctggcctatctcacgccgatgactgtgttcgatacctttggcattgtatctggcattagcgacggtcacgtccctgcgtcctatttgctggcgctggcgggcgtgctgtttaccgctatcagctacggcaaactggttcgccagtttccggaggccggttcggcctatacctacgcgcaaaagtcgattaacccgcacgtcggatttatggtcggctggtcatcactgctggattatctctttttgccgatgatcaacgttttgttggcgaaaatctatctctccgccctcttcccggaagtgccgccgtgggtgtgggtggtaaccttcgtcgccattttaaccaccgcgaatctgaagagcgtcaacctggtcgctaacttcaataccctgtttgtactggtgcaaatctccatcatggtggtgtttatcttcctggtggttcagggactgcataaaggagaaggcgttggcaccgtctggtcacttcagccgtttatcagcgagaacgcgcacctgatcccgattattaccggggcgacgattgtctgtttctcgttcctcggtttcgatgcggtgaccacactttcggaagagacaccagacgccgcacgcgtgatcccgaaagccatcttcctgacggcggtctatggtggcgttatctttatcgcggcgtcgttctttatgcagctgttcttccccgatatcagccgctttaaagacccggacgccgcactgcctgaaattgcactctacgtcggcggtaagctgttccagtcgattttcctctgcaccacgtttgtgaacacgttagcgtctggcctggcctcacatgccagcgtgtcacgtctgctgtatgtgatggggcgcgacaatgtgtttccggagcgcgtgtttggctatgtgcacccaaaatggcggactccggcactgaacgtcattatggtcggaattgtcgcgatgtcggcattgttctttgatttagtcaccgcgacagcattgattaacttcggtgctctggtggcgtttaccttcgtgaatctgtcggtgtttaatcatttctggcggcgtaaaggaatgaataaaagctggaaggatcacttccactatttgctgatgccgctggttggcgcgctgacggtgggtgtgctgtgggttaacctcgagtcaacgtcactgacactcggtctggtatgggcttcgttaggcggcgcatatttgtggtatttgatccgccgctatcgcaaagtgccgctgtacgaaggtgacagaacgccagtgagcgaaacgtaatagtcggatgcgcgccgcattatcctgcctgagggtaatgcgcnncgccattaactataaaaagatgtatgacccggatcacgagtgctatcatccgcccttatgcttagcgcattaaccccaggggcaaataatgaaccacgatatcccgctaaaatattttgatattgccgatgagtacgcgaccgaatgcgcagagcctgtcgcagacgctgaacgcacaccgctggcccactacttccagttactgctcacccgtttgatgaacaatgaagagatcagcgaagaagcccagcatgaaatggctgctgaagcggggattaatcccgtacgcattgatgagatcgcagagtttttgaatcaatggggtaatgagtaattntttaattgcagacgatcggtcagtatcgttgtccggataaagcnttcacgccgcatccggctaacaatgacacgcactgcagcgtgctttaatgggtttctcacgatcgtaccgctctgctcctcgctaagttgttctgtgagttatagttatagagaaatcacgggtacgaatgttgaacagatggcgacgcc

SEQ ID NO: 596 - DNA, 2756 bp, Escherichia coli
  Strain O55:H7
  modified_base (2296)..(2296): a, c, g or t
accaaccacacggccctcattacgacccctgaacacaaacggtaatggcaaatgtcattaaatattagtaagatagcctctttacataaaatcccttaatattatgcgccaggtattatcgtctcttttggtgattgctggacttgtgagtggtcaggcaatcgccgcgcctgaatcccccccgcatgctgatatccgcgacagcggttttgtctattgcgtcagcgggcaagtcaacacctttaacccatccaaagcgagcagtgggttaattgtcgatacccttgccgcccagttttatgatcgactgctggatgtcgatccctatacctatcgcctgatgccagaacttgccgaaagctgggaagtactcgacaacggcgcgacctatcgcttccacctgcgtcgcgatgtcccgtttcaaaaaaccgcctggtttactcccactcgcaaaatgaatgccgacgatgtggtgtttaccttccagcgaatttttgaccgcaacaacccgtggcataacgtcaacggcagcaacttcccctacttcgacagcctgcaatttgccgataacgtgaaaagcgtccgtaaactggataatcataccgttgagttcagtctggctcagccggatgcttcttttttgtggcacctcgcaacccattatgcttcggtcatgtcggcagaatatgcccggaagttagagaaagaagatcgccaggagcaactcgaccgtcaaccggtcggcactggaccgtatcagttgtcggaataccgcgccgggcaatttattcgcctacaacgtcatgatgacttctggcgcggtaaaccgttaatgccgcaggtggtggtggatttaggctccggcggcaccggacgtctgtcgaaactcctgaccggggaatgcgacgttctggcctggcctgctgccagccagctatccattttgcgtgacgacccgcgcttgcgtttaacgctgcgtcctgggatgaacgtcgcctatctggcatttaacaccgccaaaccgccgctaaataatcccgctgtccgccatgcgctggcactggcgattaataaccagcgcctgatgcaatccatctattatggtacggctgaaacggcggcctctattttaccgcgcgcctcgtgggcctatgacaacgaggctaaaattactgaatacaatccggcgaaatcgcgcgaacagttgaagtcgttggggctggaaaatttaacgctgaaactgtgggtgcccacacgttcgcaggcgtggaaccccagtccactgaaaactgccgaactgattcaggcggatatggcgcaggttggcgtaaaagtggtgattgtgccggtagaaggtcgctttcaggaggcgcggttgatggatatgagccatgatctgacgttatccggttgggcgacggacagtaacgacccggacagtttcttccgtccgttactgagctgcgcggcaattcattcacagaccaacctcgcccactggtgcgatccgaaattcgacagcgtgttgcgtaagacgctctcctcgcagcagctggcggcgcgtattgaagcctatgacgaagcgcagagtattctggcgcaggaattgcccattttgccgctggcgtcgtcattgcgtttgcaggcctatcggtacgatatcaaaggtctggtacttagcccgtttggtaacgcctcctttgctggggtgtatcgcgagaaacaggatgaggtgaaaaaaccatgattatcttcaccttacgccgcattttgttattgattgtcaccttgttcctgctgaccttcgttggcttcagcttgagctatttcactccacacgcgccgttacaaggcgcgtcactgtggaatgcctgggtgttctggtttaacggcctgatccactgggattttggtgtttccagcattaacggtcaaccaattgccgaacagttaaaagaggtcttcccggcgacgatggaactgtgcatcctcgccttcggttttgcgctgattgttggcatccccgtggggatgattgccgggattacgcgccataagtggcaggataacttgatcaacgccatcgccttactgggcttttcaatcccggtgttctggctggcgcttctgttgacactgttttgttcactcacgctaggttggttgcccgtttcagggcgtttcgatctgctctacgaagtgaaaccgattaccggttttgcgttgattgatgcctggctttcggactcaccatggcgggatgaaatgatcatgagcgcaatccgccatatgatantgcccgtgatcaccctgtcggttgcgccaacaactgaagtgatccgcctgatgcgtatcagcactatcgaagtgtatgaccagaactatgtaaaagcggcggcgacccgcggtttgtcgcgctttactattttgcgtcgccacgttctgcataacgcgttaccgccggttattcctcgcctgggcttacagttttccaccatgctgacgctggcgatgatcaccgaaatggtttttagctggccgggtttagggcgctggttaattaacgccatccgccagcaggattacgcagccatttccgccggagtgatggtgtgtggctcactggtcattattgttaacgtgatttctgatattttgggtgccatggctaaccctctgaaacataaggaatggtatgccttacgatagcgtatacagcgaaaagcgcccgccgggcacgctgcgtaccgcctggc

SEQ ID NO: 597 - DNA, 13789 bp, Escherichia coli
  Strain O55:H7
  modified_base (1755)..(1755): a, c, g or t
  modified_base (3178)..(3178): a, c, g or t
  modified_base (4197)..(4200): a, c, g or t
  modified_base (6807)..(6808): a, c, g or t
  modified_base (8003)..(8003): a, c, g or t
  modified_base (8558)..(8558): a, c, g or t
  modified_base (11446)..(11449): a, c, g or t
  modified_base (11528)..(11528): a, c, g or t
  modified_base (12826)..(12826): a, c, g or t
  modified_base (12888)..(12888): a, c, g or t
  modified_base (13499)..(13499): a, c, g or t
acgcctctgcgatggtcggcctgtacggctgcgcggggctggctgtactgtgtatgtttggcggctggtttgcgccttacggcatcgaccagcaatttctcggttaccaattattgccgccatcatggtcgcgctatggcgaagtttctttcttcctggggactgacgacctcggacgcgatgttttaagccgtttactgagcggagctgcgccaaccgtgggtggcgcatttgtggtgacacttgccgcgacgatctgtggcctggtactgggcaccttcgccggggcgacgcacggcctccgctcagcggtgcttaaccatattctggataccttactggcgatcccttccctgctgttggcaattatcgttgtagcgtttgccggaccgagtttgtcccacgctatgtttgctgtctggctggcgctgctgccgcgtatggtacgttcgatttacagcatggtgcatgacgaactggaaaaagagtacgttatcgccgcccgtctggatggcgcatcaacgctgaatattctctggtttgctgtgatgcctaacatcaccgccgggctggtcaccgagatcacccgcgcactgtcgatggcaattctcgatatcgccgcgctgggctttctcgatcttggcgcacaactcccctcgcctgaatggggatcgatgctcggtgatgcgctggaactgatttatgtcgccccgtggactgtcatgctgccaggtgcggcaattatgattagcgtgctgttggttaacctccttggcgacggtgtccgtcgtgcaattattgcgggggtggaataatgccattactcgatattcgtaacctgactattgaatttaaaaccggtgatgagtgggttaaagccgttgaccgggtaagtatgaccttaaccgaaggtgaaatccgcggtcttgttggtgaatccggttccggcaaaagtttgattgcgaaagcgatttgtggggtgaataaagataactggcgtgttactgcagaccgtatgcgttttgatgatatcgatttgctgcgtctctccgcacgcgaacggcgcaaactggttggccacaacgtgtcgatgattttccaggaaccgcagtcgtgtctagatccttcagaacgtgtgggtcgccagttgatgcaaaacatcccagcctggacctataaaggccgttggtggcagcgttttggctggcgcaaacgccgtgccattgaactgctgcaccgcgtgggaattaaagatcataaagatgcgatgcgcagttttccctatgagttgaccgaaggtgaatgtcagaaagtgatgatagccattgcactggcgaatcaaccgcgtctgctgattgctgacgaaccgacaaactcaatggagccaacaacccaggcgcaaatctttcgcctgctgacgcgtctaaaccaaaacagcaataccactattttgcttatcagccatgacttacaaatgcttagccaatgggcggataaaattaacgtgctttactgcggtcaaacggtggaaaccgcgccgagtaaggagttagtgacgatgccacatcatccttatacccaggcgctgatccgcgcgataccagacttcggaagcgcgatgccgcataaaagtcgcctcaatacgctacccggcgctatcccactgcttgaacagttaccgattggttgtcgtctggggccacgttgcccgtatgcacaacgagaatgcattgtgacgccacgtttgacgggggngaaaaatcatctctatgcctgtcatttcccgctgaacatggagaaagagtgagatgatcgaaacgctgcttgaagtgcgtaatttaagtaaaacgttccgctaccggaccggttggtttcgtcgtcagaccgtagaagcggtaaaacccttgagctttacgctacgtgaaggccagacactggcgattattggcgagaatggttcgggtaaatccacgctggcaaaaatgctggcgggaatgatagaacctaccagcggcgagttattgattgacgatcatccactgcattttggcgattattccttccgcagtcagcgtattcgcatgatttttcaggatccttcgacctcgttgaatccccgtcaacgtatctcgcaaattctggattttccactgcgcctgaacaccaacctggaaccggaacagcgtcgcaaacagattattgaaacgatgcgtatggttgggctgctaccggatcacgtcagttactatccgcatatgttggcccccgggcaaaaacagcgtctgggtctggcgcgcgcgctgatattgcgcccaaaagtcattattgccgatgaagccctcgcttcactggatatgtcgatgcgttcgcagttgattaatctgatgctggaattacaggaaaaacagggcatttcgtatatttatgttacccagcatatcggaatgatgaagcacattagcgaccaggtgctggtgatgcatcagggcgaggttgtcgagcgaggcagcaccgcggatgtgctggcatcgccgctgcatgaactcaccaaacggctgattgccgggcactttggcgaagcattgacggcggatgcgtggcgtaaggaccgttagtgttctgcacctcatcctgacaggggaaaccccctcaggatgaggtattcattacttttgattgtcgattctggtgagagcaaccaggaatgccagtgtataacacaccgtaattgccagactcatttttaacagtgtttctccgccaaatcccgacaatggcgcggctataccgccgaagacaaacatgctcatccccatcaacgcagacgccgttccagattcctgcgtccctactgcactcatagcctctgccccgccaacagtgccgatgccgctacaaaatgcaatagtgaaaaataatgccaccagtgccggaatgggcaattgtgtccatgcgcataagaccgtgagcaatgcacacaaaattgccgctatcaggccacctcgcaacaatgtcatcgcattaatccgtcgcgccagacgcgaaaagatccatgaagcaatgataagtccgatgccgttaaggccaaacaccaggctaaattgcattggactaaagccaaattccttctgcaacacgaacgacgaagagccgatatacgcaaacaagcctgccagcnataaaactttgaatcaggcaaaagcgcataaaacggcggttctgcaccacgcttcgtccggttaatagcaatgatgagccccttttattttctggcaaggtctcattaataaataacacgcagcccagcaacaatacggtgctaatttcagccattacccagaataaagtgcgccagtcaaaagtgctaacaatgtacccgcccagcactggcgacaacaccggtgccaggccattcaccgtcattaacagcgcaaaaaactgggtcaacgttactccctgatatttgtcacgagcaatagaacgagagagcaccgaaccacccgcccccgcgatcccttgaataaaacgccagaccaccagccagtaaatattgttcgttgtcgcgcacaaaatggaagaaacaataaacaatagcaacgacaagattaacggacgtttacgccctattttgtcgctcagagggccaaataacagttgtccgacgccaagaccgatcagtgatgcagtcagcgttaattgcgttatggtcgtggttgccgccagttgctcagacatctccggcaaagccggcaaataaagatcggtacacatcgggccgataccggctaaaagaccaagaatcaatgcccatgaaagagagactctagccatattattccttacttgagtgatgacatgccgccgcccagcgactgccagagcgtgattcggtttgtaaaatcagtcagttgcagtgccagcagctcctgctgtgcgctccacaagctgcgctgcgccgtcaacacggtcaggtaatcaccaacacccgtctgatagcgacgcaagccaacatcgaccgtttgttgctcagctttaacatactggcgctgtgcatccagttgctcttcaagcgtggtccgccgcgccagtgcgttagcgacatctttaaatgctctctgaacggttttttcataggtggcaatgagtccacgcttttgtgcttctgcgtaacgaagctgcgccagattacttccgccnnnngaacagcggtaatgtgaccgatggcgtaaatgaccagatctgcattccgtggctgaacaacgacgacaatgcgtcactgccaacaccagcgctggcagtcagcgaaatcgtcgggaaaaagttagcccgcgccgcgccaatatcggcattggcgctcttcaaattatgttccgcttcctggatatccgggcgacgcagcagaacgtcagatgacactcccgcaggaaccagacttatcatctgttccggcaggctttccagtgttcccggtagcaaattttcctcaagcgttgtacctgccagtaagttcagcgcatttttatcctgcatcacttgtgtctgatagctggcaacgctggcgcgcgcttgctgataaacactcatcgcctcactgacatctgtcgctgccgccgtgccaacctgttgctggcgctggataattttcaatgagttttctgcactggtcatcgtttcttttgccagggccaggttgctgttatcggccgccagtgtcagccaggcggtgctgatttcagcaatcagcgttaaacgggtgttctgggctgtaaattcactggcaagccaggtttctcgcgccgcccgagataaactctgattacgaccaaacagatctaacgtaaaactggacaccgtgccgtcagcctcggcagtggtttccgtaccattagccagcgaacgactgcgggttgaacttaaggccgcattcaccgtcgggaataacgacgcattagtttgcccatagagcgcccgtgctgagtcaatatcagcaatcgctttttgcacatcgcggttactgttcagtgcaatagtcaccacctgctgcaatcggggatcgtggatcacctgctgccagtcatggctgattgcctttccctggccctgtgctcccggcaaggtcgccgggattggggattcaggcgtgctgtagtggggatcgagcgagacacatcccgcactcaacagcaccagaaaaataagagaacgacgcaacataacttactcctgacggcgcgatttaccggcaaacaaacgtttcaccagtacaaaaaacagaggaacaaagaaaatagccagcaacgtagcggtcagcgtaccgccaataatgcccgtaccaatggcgatgcggctgttcgcccctgcgccggttgctatcgccagcggcattaccccccgcaataaacgccagcgaggtcatgatgattgggcgtaaacgagtctgcgccgcgcgtaatgccgcacgactcaaggaataaccctctgcaaccgccgcttcagcaaattccacaatcagaatggcgtttttcgacgacaagccgatagtggttaatagcgccacctggaagtaaacatcgttgtttaaatcacgcatccaggccgccagcgccgcgccaagaagccccagagggatcaccagaatgaccgagaacgggactgaccagctttcgtacagtgctgcaaggcagaggaaaaccaccagaatagaaactgcatacagactcaatgcctgaccgctggccagtttctcctgcaatgacaaaccactccaggcccaggttgttcccgcaggaagactgtttgccagttcctccatttttgtcattgcatcgccggaactaaagccagtcgcattttccccctgaatttcataggctgcagaaccgttgtagcgcaccagtctttccggtccatacagccagcgggtggtcgcaaaagcagagaatggtgtcatggcgttatcactaccgcgcacaaaccatttacctaagtctgacggcgcggaacgaaattcactgtcgccctgaatgtagacttttttcacacgaccacggtcaataaagtcattcacataagtaccgccccacgcactggacagggtgtcggtgacatcattcaaactcaaccctaatgacaccgctttattactatcaatatctacctgcaattgcggcatttgtggcaaatcattggcacgaaaagaatgtaactccggactttgattcgctttttctatcaactgattacgcatttgcagtagtgtttcgcgatcggttccaccgttagctaacaattcaaacgtaaaaccattgctttgccccagcccatcaacggctggcggcgtcatcgcaaataccgtggcatcacgaattgtgcccagctctttggttgcccgtagggcgatagcctgggcggtgttttctgcccctttacgttgagaccagtttttcaacgaaacaaacgccatcccggtgttctgtccgctgccgctaaaactgaaaccatcaacggtaaaaatgacatcggtatttgctttctcgttaatcaggaaccagtcaacaatctggcgattcacttctgctgtacgggcagcggtcgccccggccggcagcgtgtactgcaccatgatttcgccctggtcttcagtgggtaagaaactgcccggcagtttccacatcatcagggccattccaccacccagtacgagataaagccccatcgttcgagcagcacggcgcaggacataaattacgcctcgctgatatttatcttcagtacggcggtaaaagcggtcaaatgcgccgaaaaagnnttttttatgtggcggaacatgctggaggacggaaccgcacagggcgggagtcaaggtcaatgccaccaccacggaaagcagcattgcggagataatggttatcgaaaactgacgataaattacccccgtagatcccccaaagaaggccataggcaggaatacggctgacaacaccagcgcaatggcaaccagtgcaccagaaatctcgcccattgatttttccgtggcttcacgcgcgggcaaccctttgtcacgcataatgcgttcgacgttctccactaccacaatggcatcgtccaccagcaagccgatcgccagcaccattgcaaacaacgtcagggtattaatcgaatagccaaacaacgcaagaacgccgaatgtgcccagcaaaacgacggggacagctaacgccggaatcagtgtggcacgcaggttttgcaggaataaatacatcacgcaaaccaccaatacgatggcttcaaacagcgtctgaattacgtcctctacagagattttaataaattcagtgctgtctttcgggtaagcgatgtcgtatccctgcggcatgttccgctggaattcggcaatcttatccttgaccagcgtcgccgtattcagcgcattcgcaccgggcgaaagcattacagcaaccccggcagacgggtgaccgttaagtttgccgatagcggtataatcttcactgcccatctcaacgcgagccacatcttttatacgaacaactgcgctgtctgactggcttttcacgataatatttttgaactgatccaccgtctgcaagcgagactgcgcacgaaccgttgcggtcagttgctgagtattcggtgaaggcaatgcccctattttcccggcagtaacctgcacgttttgcgcttcaatagcactttgcacgtctgaaggcattagcgagtaagacgccagtttggccgggtcaagccagatgcgcatagcgtattccgcgccaaagacttgcagactccccacaccttcaacacgcgccagcgggtcctgaacgttactaaccaaccagtcggcgatatccgaactggaggctttgtcagtggtgtcatacacggcagcaatcagcaaaaagttgctttgtgatttctccaccgtaacacccgtttgctgcacttcgctgggtaggcgcgactccgcctgctgaattttattctgnacctgtgcagtatctggatcggtaccttgttcaaaggtcacattaatactgaccgaaccatcagagctgctggttgagctgaaatagagtaaattatcaagcccagtgagttgttgctcgatgacctgagtcacgctgttctccagcgtttcggcagaagcaccagtataagtggctgaaattttaatggtcggtggcgcaacgtcaggatattgcgcgacgggcaatgtgcgaatagccagaatccccgccaacataatcaaaatggcgataacccaggcaaagaccgggcggcgaacaaaaaagcgcgaaaacatcaggcgttgcctccattagcctgaacttcaacagccttgaccgtctgccctgaagtgactttggcagaaccttcaacaatcagtcggtcgccgctgtgcaggccgtttagcaccagccatttatcaccatatgtttctcccgtttcgagcgttcgctgctctactttattgtctttattcaccaccagcgcagttgcattgcctttagcatcgcgcgtgacgccctgttgcggcgcgngaatagcgtcttccatcacgccttcatcgacacgagcgcgaacaaacattcccggtaataattgctgttgtggattggggaaaatcgcccgtaatgtcaccgaaccggtagactcatctacagcgacttcggtgagttccagacgccctttttcgctgtaggttgtgccatcttccagaataagtgagacgctcatggtgtcactgttggtcgccagtgactgtttacgcagacgtaataaatcgacactggagcgagtgaggtcgacatacattgtatccagaccacgaatagtcgttaacgctgtatcttgcgacgcggtcaccagtgcgccaggggttaccgacgaaatgccaatgcgccctgaaatcggtgcggttaccgtggtccagtcaagattaatgcgcgcagtttccagtgcggcttttttcgccgctacactggctttatcttgtgcacaggtagactgagcatcatcagcatcctgttgtgaaacaccgttctctttcaccagtcgggcataacgctgcgctttctggcaatcggcttttaccagtgcctgtgcttgttgtaatgctgcccgagcttcattccatgcagcctgataactggccgcatcaatctggtagagcggctgtccagccttgaccagatcaccttccttaaataagcgtttctggataattcccccaacctgcggacgtacttcggcactgagcgcagcactggtgcgtccggttaattcactgactaccgagaccggttgagatttgactgtaacaacgccgacttctgtttctgacggggatgaattgttactttgcgtattatcacaaccagataagagcagcattgccactacagatgttgctatatacttcattattttctccagggtgagaaataccctcctcattaaaattaatgaggatatgtcagggatattcagttataacgaacccgcatcgcgaaatgaatttcgcaatgaaataagggggattaatatcccccgctattggttaattctgttcttatttatttatcaacatactaacaatatcctgatatatttcctgcagatgttgtggatcgcttttttgcggtgttaaacgacgataaaccgtaccttccatcatggtagcaaacacttcaacgcagcaacgaatgtgctcctcgctaagatggggatgcattcttttcatatgtgcacaaccgttagcgaacattctggcgtcagcttcttcaagcattgccataacccgcgggttgcgtgtggcttctgcagccacttccagcatcagcgcgtcgtcgtcctcatttaaggatttacgcaaggcaaggacttccgggaagtgatcggtacgcgcgtcaatgtccatttgggcaatacgaaagtcgatgatacggcgaaccatctcttcaataatggcgtctttgttggcgaagtaacgatatatctgacccacgctaagctgagcttcgctggcaatttgcgacatactggcggcatgaaacccgcagcgacgaaaacaccgacgggcggcgttaatgatttcatcctgacgctgtttgtggcgtatttccagcttgctggtcatttctgtctcctggcctatcacttggtgagaatgatcgttctcatttttgctgattatacgtttctccaaagtaatggaaagtatttttatcttattcatggtgcatattctgataatgaagagattgtggagattctgtgaagatagttgacaatattaagttggggtcaattcatcagaaaggctgctacttgttgtcgccagttctgttttcatcatcaaacttatcggagctaatacgaatagtttcatagtcagattctataagatatttccccaacctaccccttgcaggcgtcaagagtagataacgcaaaatgctctgtaccgcagcttctctccggtacagaaagcgcaactatagccacccacagccaggttgattataataaccgtttatctgttcgtactgtttactaaaacgacgaatcgcctgattttcaggcacaacaagcatcaacaataaggattaaagctatgggttttctttccggtaagcgcattctggtaaccggtgttgccagcaaactgtccatcgcctacggtatcgctcaggcgatgcaccgcgaaggagctgaactggcattcacctaccagaacgacaaactgaaaggccgcgtagaagaatttgccgctcaattgggttctgacatcgttctgcaatgcgatgttgccgaagatgccagcatcgacaccatgttcgctgaactggggaaagtttggccgaaatttgacggtttcgtacactctattggttttgcacctggcgatcagctggatggtgactatgttaacgccgttactcgtgaaggcttcaaaattgcccacgacatcagctcctacagcttcgttgcaatggcaaaagcttgccgctccatgctgaatccgggttctgccctgctgaccctttcctaccttggcgctgagcgcgctatcccgaactacaacgttatgggtctggcaaaagcgtctctggaagcgaacgtgcgctatatggcgaacgcgatgggtccggaaggtgtgcgtgttaacgccatctctgctggtccgatccgtactctggcggcctccggtatcaaagacttccgcaaaatgctggctcattgcgaagccgttaccccgattcgccgtaccgttactattgaagatgtgggtaactctgcggcattcctgtgctccgatctctctgccggtatctccggtgaagtggtccacgttgacggcggtttcagcattgctgcaatgaacgaactcgaactgaaataatcgttctgttggtaaagatgggcnnnngttctgccgcccgttatctctgttatacctttctgatatttgttatcgccgatccgtctttctccccttcccgccttgngtcaggataacgatttcctttacgaccaaggagcgcccatggaacaacgccacatcaccggcaaaagccactggtatcatgaaacgcaatccagtactacggagtatgacgttctgcctctggtcccggaagccgcaaaggtcagcgatccctttctactcgacgtgatccttgaaaaagaaacgctggcccccttcctttcatggctggaccctgcgcgtgttcttgcagtggagttgttccctgaccagcttaccgtgacccgttcacagaccttcaccgcttatgaacgcttgtcgacggccctgacggttgctcaggtttgcggcgtccagcggttatgtaactactattcggcgcgacttacgccgctccccgggcctgattccaccagggaaagtaatcatcggttggcacaaatcacgcaatatgcccgccaactggctagctcgccttctattatcgacaaccgatcgcgccagcatctgaatgacgtcggtcttactgcctgggactgtgtgatcattaaccaaatcattggttttattggctttcaggcgcggacaattgcgacatttcaggcttatctcgggcatccggtacgctggttacccgggctggagatacaaaactacgccgacgcgtcactgtttgctgatgaatcattacgctggcgaagcagctatgaggtggaaaaactacctgaagaacacacaaaaagttcaactgcagaactttgccaactggccgaaatactctctctccaccctatttcactttcccttctcgaaaggttgttaaacagcacacgggttaatacacagccggataatcagcttgcggcgttgttatgcgcgcggataaatggcagtcctgcttgttttgccgcctgtatggattcatcaaatgaatataaaaaaatcagcacccttctgcgcaagggcgaaaatgaaattaaccaatgggctgaccgtcattctgttgagcgcgctaccgttcaggcgatacaatggctgacccgagcacccgatcgctttagcgccgcccagttcagccctttactcgaacacgaaaaatcatcaacgcagattattaatctgctggtatggagcgggctgtgtggctggataaatcgcttaaaaatcgcgttgggtgagacatattaaccttgccgcgtcagacagattcgcgtaaaactgtcagccgctctaatggccaccaaaatagacaattatgtttcaggacaacccgctgctagcgcagcttaaacagcaactgcattcccagacgccacgcgntgaaggggtggtaaaagccacagaaaaaggttttggcttcctggaagtcgacgcgcaaaaangttatttcattccgccgccgcagatgaaaaaagtcatgcatggcgaccgaattatcgcggtgatccacagtgaaaaagaacgtgaatccgcagagccagaagaactggttgaaccgtttctgactcgtttcgtgggtaaagttcagggcaaaaatgaccgtctggccatcgttcctgatcatccactcttaaaagacgccattccttgccgcgcagcccgtggtctgaaccacgagtttaaagaaggcgactgggcagttgccgaaatgcgccgtcatccgctgaaaggcgatcgttctttctatgctgaactgacacaatacatcacttttggtgacgaccactttgtaccgtggtgggttacccttgcgcgccataatctggaaaaagaagcaccagacggcgtcgctaccgaaatgctcgatgaaggtctggttcgtaaagatctgaccgcgctggattttgtcaccatcgacagtgccagcacagaagatatggatgacgcccttttcgctaaggcgttgccggatgacaaacttcagctgattgtggcgattgccgatccaaccgcgtggattgctgaaggcagcaagctggacaaagccgcgaanattcgcgcattcaccaactatctgcctggcttcaacatccctatgctgcctcgcgagctttctgacgatctctgctcactgcgcgccaatgaagtccgcccggtactggcatgccgcatgacgctctccgctgatggcaccattgaagataatatcgaattctttgccgccaccatcgaatccaaagcgaagctggtgtatgaccaggtttctgactggctggagaataccggtgactggcagcctgaaagtgaagcaattgccgaacaagtccgtttgctagcgcaaat

SEQ ID NO: 598 - DNA, 24119 bp, Escherichia coli
  Strain O55:H7
  modified_base (885)..(885): a, c, g or t
  modified_base (2117)..(2117): a, c, g or t
  modified_base (3507)..(3510): a, c, g or t
  modified_base (6145)..(6148): a, c, g or t
  modified_base (6696)..(6698): a, c, g or t
  modified_base (7412)..(7412): a, c, g or t
  modified_base (8429)..(8429): a, c, g or t
  modified_base (8609)..(8611): a, c, g or t
  modified_base (8638)..(8641): a, c, g or t
  modified_base (10059)..(10060): a, c, g or t
  modified_base (17388)..(17388): a, c, g or t
  modified_base (24010)..(24010): a, c, g or t
cgcggcgagtggcgtcataaccacgcactggtgtttaaagatcgcccggattaccgctttattctcggtgaaaaaggtgaagtgctggatatcgtcgccgagcctcgtcgcattgccaaccgtatcgtcgaagaagcgatgattgccgctaacatttgtgcagctcgcgtactgcgcgataagctcggttttggtatctataacgtgcatatgggctttgatccggcgaatgccgacgcgctggcagcgttgctgaaaacgcacggtctgcatgtcgatgccgaagaagtgctcacgctggacggtttctgcaaactgcgtcgtgaactggatgcgcaaccaactggtttcctcgacagccgcattcgtcgcttccagtcatttgctgaaattagcactgaacccggtcctcactttggcctcggtctggaagcatacgccacctggacttcgccgatccgtaaatatggcgacatgatcaaccaccgtctgctgaaagcggttatcaaaggcgaaactgcgacgcgtccacaggatgaaatcactgtccaaatggccgagcgtcgccgtctcaatcggatggcagaacgtgatgttggtgactggttatacgcacgcttcctgaaagacaaagccgggaccgacatccgtttcgcagcggaaattgtcgatatcagccgtggcggcatgcgtgttcgtttggttgataacggcgctatcgcctttattcctgcatctttcttacacgctgtgcgcgatgaactggtttgcagccaggaaaacggcaccgtacaaattaaaggtgaaacggtttataaagtaactgacgttattgacgtcaccattgccgaagtccgcatggaaacccgcagcattattgcgcgnccggtcgcgtaatctcctttcacggcccattccttatgaatgggccgtttatttccccgctctaccttcatcatatcccggcagttttttaactgactttcgtttgaaaactggcgtttttccaaaactagattacaaataaatatataaaaaaaacaatgtgtttagccgccgttaatttcatgtaagtcatgttgttccttttatttaaccgcggactccgctgttaaccggaggatatgcatcatgaaaaccgttagggagtccacaacgttgtacaactttctcggatcgcacaatccatactggcggttgacggaaagcagcgatgttttgcgcttttctaccaccgaaaccacagaacctgaacgtacgttgcagttatctgccgaacaggctgctcgcatcagggaaatgacggtcatcacctccagcctgatgatgagtctgaccgtcgatgagagcgatctttctgtgcatctggtaggacgaaaaatcaataaacgggaatgggctggcaacgcgtctgcatggcatgacacaccagcagttgctcgtgatttatcacacggactttcctttgctgagcaggtagtttctgaagcacattccgcaatagtgattctcgacagccgggggaatatccaacgcttcaatcggttatgtgaagattacacagggttgaacgaacacgacgtcattggccaaagcgtgtttaaactgtttatgagccgtcgtgaagctgcggcatccaggcgcaataaccgtgtattttttcgaagcggcaatgcatatgaagtcgaactgtggataccaacacgtaaaggccagcggctgtttctgtttcgcaataaatttgtccacagcggcagtggcaaaaacgagatttttttaatctgttccggcaccgacattaccgaagagcgccgcgctcaggaacgactgcgtattctggcaaataccgacagtatcaccggactgccgaatcgtaacgcaatgcaggagttaatcgatcacgctattaatcaggcagataacaataaagttggggtcgtgtatcttgatttggataattttaaaaaggtcaacgacgcctatgggcatttgtttggtgaccagttattacgcgacgtgtcattggctattttaagctgtctcgaacatgaccaggtgttggcgcgtccaggtggcgatgagtttctggtactggcatccaacacctcacaaagcgngctggaagcaatggcatcacgaattttgacccgcttacggctcccctttcgcattggtttaattgaagtttataccagctgttcagtaggtattgcactctctcccgaacatggttcggacagcgcggctattattcgtcacgccgacacagcaatgtacacagcaaaggaaggcggacgaggacaattttgcgtttttaccccagaaatgaatcaacgggtatttgaatatctctggctggataccaacttgcgtaaagcactggaaaacgatcagttggttattcactatcaaccaaaaatcacctggcgtggcgaagtgcgcagtctggaagcactagtacgttggcagtcacctgaacgtgggttgattccaccgttggacttcatttcctacgcagaagagtcagggctaattgtgcctttaggccgttgggtgattctcgatgtcgtacgccaggtggcgaagtggcgggataaaggcattaacctgcgagtggcggtaaacatttctgcacgtcagctcgccgatcaaaccattttcaccgccctgaaacaggttctccaggaactcaattttgaatactgccctattgatgttgaattgacagagagttgtctgattgagaatgatgaactggcactgtctgttattcaacaatttagccaactaggtgcgcaagtgcatctggatgattttggtaccgcctactcttcactttcgcaactggcgcgctttccgatcgatgccatcaaacttgaccaggtttttgttcgagatattcacaaacaacctgtctcgcagtcactggttcgggcaatcgtcgctgtggcccaggcattgaatcttcaggtgatcgccgaaggtgtagagagtgcaaaggaagatgcttttttaaccaagaatgggatcaatgagcggcaaggatttttgtttgccaaaccgatgcccgccgtcgccttcgaacgctggtataaacgctatctgaagcgcgcataagtagatgaatatatatacttagcgctatattccgtcattatatatcgtattcccggatgataattagccgttgctgttaaacacttctcttttagcggcaatttttgcattattcattttcccccttttgctataaggatgtccttgatgtctgaatttgatgcccagcgcgttgccgaacgtattgatattgtgttagatatccttgtggcaggcgattaccactctgcgatccataatctcgagatacttaaagcagaactcttgcgccaggttgctgaatctacgccagacatcccgaaggcaccgtgggagatttaacaatcgtgccttcaggttttccctatttgaggatgcccggcgcgtcagtatttttttatttagtattannnngttataagaattacagcgatgaattcccgacaacaaactattctacagatggtcattgaccagggtcaggttagcgtaaccgatctggcaaaagccactggagtttctgaagttaccattcgccaggatctcaacaccctcgaaaaactgagttacctccgccgtgcacatggctttgcagtttcgcttgatagtgatgacgtcgaaacccgtatgatgagcaactatacgctgaagcgtgaactcgccgagtttgccgcgtcactggttcaaccgggcgaaaccatctttatcgaaaatggcagcagcaatgccctgctcgcccggactctgggggagcagaagaaaaatgtcactatcatcacggtcagcagctacatcgcgcatttgctgaaagacgcgccttgtgaagttattttgctcggtggcgtgtaccagaaaaaaagcgaaagtatggttggcccgttgacacgccagtgcatccaacaggtacatttcagcaaagcatttattggtattgatggctggcaacctgaaactggattcaccggtcgcgatatgatgcgtaccgatgtggtgaatgccgtgctggaaaaagagtgcgaagcgatagtcctgactgacagctcgaaatttggtgctgtacattcatactccatcggtcccgttgagcgattcaatcgcgtgattaccgattcgaaaatacgcgccagcgatctgatgcatcttgagcacagtaaactcaccgttcacgtcgttgacatttaaccatttcccttctctacggatgatttgcagtttgacaaatcatccgctctaagatgattcctggttgataattaagactatttacctgttattaacactctcaagatataaaattattatcagcgatataacaggaagtcattatcacctgcgtgatataaccctgcgcgcgagcggatttcacggaataatttcaccaggcttattcttagctattatagttatagagagcttacttccgtgaatcataaattcaggagagagtattatgtttgtaacgagcaaaaaaatgaccgcggctgttctggcaattaccctggcaatgtctctgagtgcctgttctaactggtctaaacgggaccgcaacaccgcaatcggcgcgggtgcaggggcattaggcggtgcagtactgaccgatggcagtacgttgggtacattaggtggcgcagctgtcggtggtgttattggtcaccaggtcggtaaataatcgtaaataaatgtcgattatcgactcgtaattataatacgcttgattctgttcagtacgaaataactgaataatacacacagtaaaatattcgaaagccacggatatatccgtggctttttatgttaaccgcctgcgagttttaccttcatccctttcgcttcaagtagtgattttaataaatcacgcttatcgccctggatttcaataactccatctttaactgctccgccgcagccgcattttttcttcagttccgctgcaagttttgtcagttcggcatcatcgagatcgataccggtaatcaggcaaacgcccttacctttacgtccactggtctgacgctgaatacgcaccacaccatcgcctttagagcgtactggggccgctttgggctcatcaatacgcccggtttctgttgagtagaccagacggctgttggaatcactcatcatgcactccgctgtaaagaggcgttgatcgctttcagcgtctgcgctggatctaccgattgcgttaccgggcgaccaatcaccatataatcaacaccagccgccaacgcctgttctggcgtcataatgcggcgctggtcaccagcttcactcccctgcggacgaatgcccggcgtaaccagtttgaactcctgaccgaatacctgtttaaagcgcacagcttcctgagcagaacacaccacaccaacaaggccacatttttgcgtcagtgctgccagacgttctgcataatctgcaggtgacagtgtcacgccaagatcggccaggtcgctggcttccatgctggtcaacactgtcacagcaatcaaaagcggtgcatctttgccaaacggaaccagtgcctcacgcgctgcggtcatcatacgcgccccaccagaggcatgaacattcaccatccacacgcctaagtcagctgcagcagcgacagcgtgcgctgcagtgttggggatatcgtggaatttcaggtcaagaaagatatcaaaaccacgctgttgaagttcgcgcacaaactgtggcccaaacaatgtaaacatctctttgccgaccttcagacgacaatcgcgtgggtcgatcttgtcgacaaaggccagcgcggcatcacgattatgataatcaagggcaacaaccacaggagaattcgtaacagcgcgggaagaagatgaagcagttaacgtcatgaccagaccttcttgatgatgggcaccggaagtggcgcgaaacaggtaaacggcgagcattctacccgtggaaataaaaaattaacagttgcgatttctcccctggcaggctttttctgcgccgccgttgccggagcacaatgggacataaataactagtatgttgtaactaaagtcggtttttttaaaannnnacaggccatcaagaccgcgaatcggtttaatagttgaccaggcacgacaagacggacaatgccagtagagggtgtatgcggtgaaaccacatttctggcagcgataacgaggcttactacgtaccttctcgccaaccatgtcacgcagcaccatcaggctctctttggcacgcccttcttccgcttcatttaagtggtaatccattaacttatggaacacacgcatggtcggatgacgctgaagctggcgcgtaatatagacctgtgcggcctcactaccgtcgcgcgcttcgatgatatcagcaagcatcaattcagcatcggcaccggtgttctcttccaccgcgcgctgcaggaattctgcccattcggcagttttacccaactgctgatagcaggtttgcagcatttccagcgtttcgctgaccagttctctgtcctgggatatcacgcgttgcaaactttcgacggctttggcgtattctcctttcgccataaacacgcgtcccatcatgatggatacgcgggcgctgtttttatctgccgcnnnccctttttttagcaaggtcatggcacgatcgagatcgtcgctggccatatgctgcagggctaactcacagtagaaatgggcaatttcgacgcgctgtttatctttacccagcttcaccaggcgttcggcaacatcaattgctttctgccactcactggtagcctggtagatttgtagcaactgttgcagcgcgccaatgcggaagtcagtttcatcggtcagctgattgaacatgtcttccgcgcggtcatataacccggcggccatgtaatcacgccccagttgttgaatcgccaacagacgctgttcataggtcagcgaggcgctttccattagggtctgatggatgcgaatagcgcgatcaacttcgccacgcgaacggaacaggtttccgagcgtaaggtgggcttcaacggtgcctgtatcctctttaagcatatcgagaaacaggtctaccgctttatcctgttgattactaagcaggaagttaacccccgctacgtaatcacgcgacaagcggttggcttcatcttgcttgttttgttgcgcacttctgcggcccatataccagccataggcagcggctacaggcaaaagcagaaacaacaactccagcatagaaagttattccttcgccgctgacgagtgctgcactacagccacgtcagtcgcgggtgaaagctggttttccagtcgctttattttacgttcagngcgcaccagggaaacacgaactcgcagccagaacaggccacaaatcaaccaaccgatagcaaaacccgcagcaaacaataccgccagcaatgtggaaatacggtactccccttgcgctaacagataattaaacgtcacctgttgatcgttctgcgcacccaacgtgaccgaaatcacgaagatcgctaacaccagtaagaaaatgagtaaatatttcacattacttcccgttatgtggttagagcgaataaattatggtcaacttaccgcaatagccctttaaagtaccattttcgcgccgtctgcgaaatggcatccacgcgcattgttgatgatttaagggctaaattcggaaaatcaaccagcgttaactttcttgttctcgttgcgctatttcgcgattttcttccgcaggtggtgttaatggcccgcaaattcgttgcgcaagccacgttgccaccgccaccagtgcccacgaaatcaacgtagctaccaccagatcgcgtggccaatgcatcccgagcagcaggcggcttcccatgactcccgttgcccagaccagcaagatagcaatggttaacgttcgccgacgcggccacagcaaaccaacggccagcagtgcccaactggcagcaaacatcgtgtgaccggaaggaaaggcaaaccccgtctctttctgccagtgtgaacgcaaatattgtggaatatttttctcttcagccaactgttctttcactagatttccgcgttctgctcgctttaaagtgtagaactcatcaaccggaatatgatgtgttttttccagccagataacaaaaggtcgtggttcctggactttgtctttgatccaggatttaacgccttgtcccacaaggattgcggccgccagaatggcaaataatacaaaggcagccttaatgcgaaaacgcagacaccagagaaaccagccgaataaaatcaaatgtgtaatgacgccccagggctgggtgacagtttcagtaacccaaaaagccgctnttagtagccaactttgttctccaggttgccaacgccagccagaaatccatacggctactggcataacaagcaatagtgcagctcccactgcggtacgtctggcaatcgaacgcatggcctctcctttttgataagtcccacaatcataactgaaaatgccagttccaggaaaaattgacnnnatttgtgccattccgtgaacgatcgannnntcgtgattaggtgaaccccttctcgttatggcaaaataagccaatacagaaccagcattatctggagaatttcatgcagcttaaacgtgtggcagaagccaaactgccaaccccatggggcgatttcctgatggtgggatttgaagaactggcaaccggacacgatcatgtcgcgctagtctatggcgatatttccgggcataccccggtacttgcgcgcgtccattccgaatgtctgaccggtgacgccctgttcagcttgcgctgcgattgtggcttccagctcgaagcggcattgacgcaaattgccgaggaaggccgtggtattttgctgtatcaccgtcaggaaggtcgtaacattggtctgctgaataaaatccgcgcttacgcactgcaggatcaaggttacgatactgtagaggctaaccaccagttaggcttcgccgctgatgagcgcgacttcactctttgcgctgatatgttcaaactccttggcgtcaatgaagtccgcttgttaaccaataacccgaaaaaagtcgaaattctgaccgaagcggggattaatattgttgaacgcgtaccattgattgtaggtcgtaaccccaataacgaacattatctcgataccaaagccgagaaaatgggccatttgctgaacaaataaccctcttgcattgtgtaattaatttgcttgccggaagcaaaataaccggcaagcaaatacttgttacttcaacatattacgaatgacataatgcaaaatgccgtcgttctggtagtaagtcaactccgtcgcggtgtcgatacgacaacggcagggtacgacttcctggctaccatccgcgcgcgtaagcgtcaccggaaccgtcgcgccgggttgtagattttgcagatcgccaatatcaatcttctcttccccggttagccctaacgttttacgcgttacgccttgcggaaattccagcggcaggatgcccatgccaattaaattcgaacggtgaattcgttcaaacgattcggcaatcaccacacgaataccaagcagacgcggaccttttgccgcccagtcacggctggagcctgatccatactctttcccggcaatcaccgccagcggcgtttgctcctgcttatagcgcatcgcagcatcataaatagagactacgtcgctgtcaggtaaatgccgcgtcatccccccttcaacgccaggcaccatttcattacggatgcgaatattggcgaaggtgccgcgcatcatcacttcatggttaccacgccgcgaaccgtaggagttaaagtcttttcgctcaacaccccgaccttgtaggtatcgacccgctgggctgtcgggcttaatactgcccgccggagagatatggtcagtggtgactgaatcccccagcattgcgaggatccgnncaccgtgaatatcttccacaggtgctggcgttgcctgcatttcatcaaagaaaggcgataaacgaatataggttgaatcctcctgccatccgtaggtatcggatcgtgcgacgttaatttctttccactctgcagtgccttcaaagacttctgcgtactctttgcggaacatttctgtggagacttgttctaccgcacgggcaatttcttgtgccgatggccagatatctttcagatatattggatcgcctttacgatcatgaccaataggctcagaagccaggttgatattcatatttcccgccagcgcataggcaaccaccagcggcggcgaggccagccagttagttttaaccagcggatggatacggccttcaaagttacggttgccggacagcactgcaccgacggttaaatctccttttttgattgccgtttcgataggatcgggcagcggcccagagttaccaatacaggtggtacaaccgtatcccacaaggttaaaccccagttcgtcgagatacggtgtcagtttcgcttttgccagatagtcagaaacgactttcgaacccggtgccagcgacgctttgacccacggttgccgcttgaggccaagagttacggcttttttcgccagcaagcctgcggccatcagcacacttgggttagaagtgttggtgcacgaggttatcgcagcaatgaccacagcgccatcaggtaactgatactgatgtccgttcataacataatcgaccggctggcgatctttatgcgtggcattcacttccagttcgttactggcggcaaatgcttttggtacatcgggcagtgcaacgcgatcctgtgggcgtttaggccctgccaggctcgcttcaacgtcattcatatccagatctaacgtactggtaaaaatcggttcatcgcccgggttacgccacatgccctgcgctttggcatatttttcgaccaactcgacctgatcttcgctgcgcccgcttaaacgcatgtaatcgagggttacagcatcgattgggaagaagccacaggtggcaccatattctggcgacatattggcaatggtggcgcgatccgccaacggtagtgaatccagaccatcaccataaaattcgacgaatttccccaccacgccatgtttgcgcagcatttgggtaacagtgagaaccaggtctgtggcggtaataccttcacgtaattttccggtaagtttaaagcccactacgtccgggataagcatggaaaccggctggcctaacattgcggcttctgcttcgatgccacccacgccccaccccagcacgccaaggccgttgatcatagtggtgtgcgagtcagtaccaacgagtgtatccggataagcaatccattcaccgtcctgcaattcgctccacactgctttgccgagatattcgaggttaacctgatggcaaatgcctgtgcctggcggcacgacgctaaaccgactgaacgcttgctttccccatttcaggaacacataacgttcgtggttgcgctccatttccaggcgtacgttttcttcaaatgcctcatcatcaccaaaacgatcgacggtcaccgagtggtcaatgaccaggtcgaccggtgagagcgggttaacctttgcagtatcgccaccgaggcgtttaaccgcttcgcgcattgccgccagatcaacaacggcaggtacgccggtaaagtcctgcatcagcacccttgccgggcggtaggcaatttcacggtcagcatgggcatttttcagccatcccgccagcgcgtggatatcctcttcggtaaccgagttaccatcctgccagcgcagcagattttcgagcaaaactttgagtgacttgggtagacgggtgatatcgcccagtgatttggcagcaagcggcaggctgtagtagtggtaagttttatctttggcctgcaacgcgtccttactggcttctcgtagggttgacgacatagctcctccttaatgacagggttgcgaagccctgattctcttcagggtgaatattaaagataacacaaacatcgcgtaacgatttgataacaacccaaattgataaaagaggagaaaccttgtggcaaagcaaatgacaaccccgccgcagcggggtcaaggatcagtgagtaatgatccagaggagttcggcccagaagagcatcgacagagaaaatgcacccatccaggaccaatatttcatatttgtgttgatcataggctacacccttaacggttattactttgtgttgagataactcaacctgttattgctgcggtgtattaaaagccctttaattcattaaaaatgggtaataataatgatgataattattgtttcggctgatcatcttcagcaaacagttctataaaggcttgctgctgcgatgttagttgccagtcgtctggaataacgacggaacattcccgtttcgtttcgggttcattgtcactatgctggcataatggtgacgactccagttgctcctgaccaaccatagttatccccacactttccaaatcagcagtgcgacaaccacccagaaaagtgcagaaccaagaaaaaccgccagccaggctttacgttttaattcaggatcgcggcggggttcctgatttccagaaggcattgctaacctcatataatcgccatcacttatcagcaagacgttgaacgattggtgtaattaatcatacgatgagacaaatcctaaagaaactttagtcaaaaatccagcgaatttacgaatcgtctccagtgaataattcaatcttttgacctgaaatagatatttgaaaactggaatttgcgaggcgggtaattagacactactttacaggtaatttaccctataaatatgagggataaaaatattgtgcacggtatacaaataagtaacaaaagagaatatattccggcaccttcgctacataaaaggtgccgaaaataacgcaagaaattatttttccggcagttttatatctttaaacatgacctcaatttcttcattggagcgcaatgcgacagccgcatcaacgacatcacgcgttaaatgcggtgcaaaacgctgaatgaaatcatacatataactgcgcaaaaaagtactacggcgaaaaccaattttggttgtactgtggctgaagatatcgtgagcatcaacacgcacaaggtccggatcggcgaccggatccaccgccatgctggcaatgacccctacccccagccctaaccggacgtaagttttaatgacgtcagcatccgttgccgtgaaaacgatacgcggcgttaaccctgcgcgattaaaggcagtatccagttctgaacgtccggtaaagccgaaggtatatgtcaccaacggatattgcgccagttcttcaatggtaatggcttttttgcctgccagcgggtgatccggagtgactacaatagcccgattccagtggtagcacggtaacatcactaaatcttcatacagatgcagcgcttctgtggcgatagcgaaatctgcattacctttagagacggcatcagcaatttgtgtcggcgagccctggtgcatatgcaaagaaacgcggggataacgctcaataaagcctttgatgacgtttggtaacgcgtagcgtgcctgggtatgcgtggtggcgatatacagcgagcctttatccggccaggtgtgctcaccggcaaccgattttatggcatcaactttcgacaggacttcgcgagcgatacgaattatttcttgtcctgctggcgttacctgcgtcaggtgcttgccgcttcgggaaaaaatttgaatgcctagctcgtcttccagcattctgacttgtttactgatcccgggttgtgatgtgtaaagtccttccgctgttgatgagacattcaggttatgattgaccacctcaacaatatagcgaagttgttgtaatttcatgttaaaccatccacttagacgccatcaggacatcgttttttcgtcacacctggcgggtgactaatacgatttaataataaaaaaggtgctaactataaccactatatcatttatagccttagtgtataggtgtgaagaaaaaataatatgcaataaaaaagggccgctttcgcgaccctttgtttataaaaacctgacagaattaaaggttattttttcccttcaacccatttgccatcaacataaaatgctgaccagccagtcgcctttccgtctttttccgaagagacatattgctgtttggttttacggctaaagcgaaccatagtcttattaccttccggatcctgctgcggcgcatcggccagataacgcagtttttccggcagacgatcgcggaagcgatacagctcttccaccagcggcgcacgcgtttcacgcgatttcgggaaggtattggccgccaggaacacaccggcagcaccgtcacgcagcacgaaataggcatctgatttttcgcacggcagctccggtaatggtaccggatcttctttcggtggagccacttcgccgttacgtaaaatcttacgcgtgtttttacactcttcgttggtgcaggccatatatttaccgaaacgccccattttcaggtgcatttcagaaccacatttttcacactcaacgatcgggccgtcataacctttaatgcggaattcgccctcttcgatctcgtaaccgtcgcaggttgggttattaccacagacatgcaacttacgtttcggatcgatgagatagctgtccatcgccgtgccgcatttggggcaacgacgttttgcgcgcagcgcgttggtttcagcgtcttcgccttccagcacgttcagcacttcgttttccggcaccaggttaatggttgttttgcaacgctctttcggcggcagcgcatagccagaacagccaaggaataccccggtgctcgctgtgcgaatccccattttgcgaccacaggtcgggcagtcgatgctggtcagaaccatctggttcggacgcatacccccctcttccggatctttttcagctttatctaactgctgagtgaaatccgagaagaagtgatccagtacagctttccactctgcttcgtgatttgccacctggtcaaggctgttttccatctgcgcggtgaagtcgtagttcattaactcgcggaaattctcttccaggcgatcggtgacgatttcgcccattttttccgcatagaaacgacgattttctactcgcacatagccacgatcctgaatggtcgaaatgatcgacgcataggtagacggacgaccgataccacgtttttccagttctttaaccagcgatgcttcactgaaacgggctggcggcttggtaaagtgctgggctggtgtcagttcaacgagcgtcagagcatcgcctttatcgactgcaggtaagatacgatcttcatcgcctttacgcagtgcaggcatcactttcgtccagccatcaaagcgcaaaatacgaccgcgtgctttcaggcggaaatcgcccgcaccaacggtcagcgtcgtggagtcatatttcgctggggtcatctggcaggcaacgaactgacgccagattaactggtacagtttctgcgcatctgcttccatatccttcagcgattccgccatcacattgacgtcagaaggacgaatcgcttcgtgcgcttcctgtgagttttctttgctggcgtactgattcggactttccggcagatatttcttaccaaaattatcgctgatataaccgcgaaccatatttaccgcgtcctgactcaggttagtggagtcggtacgcatgtaagtgatatagcctgcttcatacaaacgctgcgccatcatcatggtttttttcacgccaaatccaagacgggtgctggcagcttgttgcagcgtagaggtaataaaaggagcgccaggtttactggttgtcggtttgtcttcacgttccagcacgctgtagcgcgctttttccagcagacttaccgcagcctgagtttgttctttgttgaccggacggaacggtttgtcgttctgatgagtcacctgcaacgccaacgcttcaccagatggcgtggtcgtgctggcatcgacttcccagaactcttccggcacgaacgctttaatttcacgctcacgctcgaccaccaggcggactgccaccgactgcacacgaccggcagacagaccacgagcgatctttttccatagcagcggcgaaaccatataccccaccacgcggtccataaagcgacgcgcctgctgggcattaacacgatcaatattcagctcacccggtttgttaaatgcctggcggatcgcgtttttagtaatttcgttaaacaccactcggctatagcgcgcatcatcaccaccaatcacttcccgcaggtgccatgcaatggcttccccttcgcggtcaaggtcggttgcgagatagatgtggtcggctttttcagccagttgtttcagttcagagacgaccttctctttaccaggcaacacttcatagtgcgcctcccaattgtgccacgggtcaacccccatacggttgacgagagcgccacgttcatcctttttaggctttttagccgtcttggtggaggtagagtcggcactctttttggcagctgagccactggtcggcaaatcgcggatgtgaccgacgctggatttcaccacgtagtcactacccagatacttgttgatcgttttggcttttgccggggactcaacgatgacaagagctttacccatattcaccttacctaatttgattcttccaggaatgcgtcgcacgttgataaaccttccactggcaacgagttactgatatggactcgctctctgcggatatcaaccccttgtcgtgactctgttcacgaaaattcaggtgactgagttaacaggtcttggcctacaggcgctatagcacgacgaaattttggtcgaatgtcaagcaaatctattgccagattgacgaaagcgtcacactgtacctgataaaatccgatacgcaactttattagcatgcaaaatccaaagttgccagtaaggcgctcttgccaccagcgtggtatatttgtctgcaagccatgcctggcgtagactaatgtccttgtttaaggagtaaataatgaacaaagagacacaacccatcgaccgcgaaacgctgttgaaagaggccaacaaaatcattcgtgagcatgaggatacgctcgcagggattgaagccaccggcgtcacacagcgtaatggcgtgctggtatttaccggcgactactttttagatgaacaaggattgccaacagccaaaancaccgcggtgtttaatatgttcaaacacctggcccatgtgctttcagaaaaatatcatctggttgattaaagcaaaacgcgaggtcttaccctcgcgtttgtcttttacatcaatggcttttgcccacgctgccaccagcgtagcaataatcgatcggcgctctctgccgcgctgccggtgaatcggtcaatgagtcgtttacgctgcatatagcgtacattgaccacttctcggccttccatcaggctaagaataacttcatcactggtgttgatttcatcaaccaggcctttctctaccgcctgttgtccgtaccagtgttcacccgttgccacctgttcaatatccagagacggacgcatacgcttcacaaaatctttaaataactgatgcgtttcgttcagctcttcgcggaatttctcccgcccttcttcggtattttcacccagcaaggtcagcgtacgcttatactgcccggcggtgtgcagttcgatatcaatatctttgcttttcaggaagcggttaaagttgggcatttgcgccaccaccccaatggaacccacaatagcaaacggtgcggaaacaattttgtccgccacacaggccatcatgtaaccaccgctggcagcaactttgtctaccgtaacagttaatggaatgtttttatcacgcagacgctgcagctgcgaagccgccaacccgtaaccatgcaccatgccaccagggctttccagacggagcacaacctgatcctgcggtttgaatgctgcaagtaccgccgttatctcttcacgtagcgagttcacttcatgggcgtccatgctgcctttaaagtccagcacccagacgcggggtttactgtcagttgacacctcgcccagtttggctttcgcttttgctgctttcgcttcttgcttgtgctttttcttctgcgctttgtgccactgtttttgctgatgtgagtccatcagcgccgcggccagttcttctttcatctccttatactgttcgctgagattgttgacccgtaactcgccacgctggcgtttattacgttgagcaacattgacaataatggcggcaatcgccgcaatcgctagcacaacggtaacgattttcgccaaaaacaaaccatattcagacaacaattccacgagtccccaccttggttaaacaacgctttggctcacagtttacaacaggcatgttaagccgtctcgcagagatgttattgcagcgaaagtatgacaaagtatccattttgcggtgttatcgcccgaggctgattgaaatgcccttctgtttcaggcataaagccccaaagtcataaagtacactggcagcgcgacagacaacgtcgttgaggagtagccatgcattaccagccaaaacaagatttactcaatgatcgcattatcctggtgacgggagccagtgatggtattggtcgtgaagccgcgatgacgtatgcacgctatggtgcgacagtgattctgttgggccgtaatgaagaaaaattacgtcaggtagccagccacataaacgaagaaactgggcgtcagccacagtggtttattctcgatttgctgacctgcaggtccgaagattgccaacaactggcacagcgcattgccgttaattatccgcgtctggatggtgttttgcataatgccggattactcggcgatgtttgtccaatgagcgaacaaaatccacaggtctggcaggacgtcatacaggtcaacgttaatgccacctttatgctcacccaggcactacttcctttattactcaaatcggacgccggttcactggtctttacttcatcaagcgttggacgtcagggacgagccaactggggtgcatatgcagcgtcgaaatttgccaccgaagggatgatgcaggtactggccgatgaatatcagcagcgcctgcgtgtcaactgcattaacccaggcggtacgcgcaccgcaatgcgtgccagcgccttcccgaccgaagatccacagaaacttaaaacacccgctgatatcatgccgctctacctctggctgatgggcgatgacagccgccgtaaaaccggcatgacctttgacgcccaaccgggccgtaaaccaggaatttcccaatgagtgatgaacgctaccaacagcgtcagcagcgagtgaaagaaaaagtagatgctcgtgtggcccaggcccaggatgaacgcggtattatcatcgtctttaccggcaatggaaaaggcaaaaccaccgcggcatttggtacggcaacacgcgcagttggtcacggaaaaaaagtgggcgtcgtgcagtttattaaaggcacctggcctaatggcgaacgcaatctgctggagccacatggcgttgagtttcaggtgatggcaacgggctttacctgggatacacaaaaccgcgagtctgataccgccgcctgccgcgaagtctggcaacatgcaaagcggatgcttgctgattcctcactggatttggttttgcttgatgagctgacttatatggtggcgtatgactatttgccactggaagaagtgttgcaggcgttaaatgaacgtccacatcagcagacggtgattatcacgggtcggggctgtcatcgggatatactcgaactggcggatacggtaagtgagttacgccccgtgaaacatgcgtttgatgctggcgtaaaagcgcagatagggattgattactaatctgtaaaaatgccggatatgacgtccggcatacgttgattaaccgttattacgcccaccagaacgacgtccgccgctcacctgactgtgacgtttcaccgcacgacgaatctgattcgccttcatgcgacgacggtctttttctacagcgactttagagctggtttctggcggcaactccaccagttcgcgcagatagttagtctgggcaagatccagctccgtccagccgccgcgtggcagacctttcggcagtgggatatcaccgtaacgaacacggatcaggcggcttacctgcacgccaaccgcttcccacagacgacgaacttcacggttacggccttcggtcagagtcacgttgtaccactggttgatcccttcgccgccgctgaacttgatggttttaaaggctgccggaccatcttccagctgcacaccacggcttaaatcacgcagtttcgcgtcgtcaacctgaccaaatacacgcacggcatattcacgttcaacttcacggcttggatgcattaaacggttagccagttcaccgtcggtggtgaacagcaacagaccacaggtgttaacgtccagacgacctacggcaatccagcgtgcaccgcgcagctttggcagacggtcaaacaccgttggacgcccttccggatcgttacgggtacacaactcaccttccggtttataataggccagaacgcgacaaatttgttcagcggactcacgtaccgaaatcaggtgaccatcgatacggattttcaatccaggggtaacttcaacgcgatcgccgagtttagcaattttgccatcaacactcacacgaccggcttcaataatagattcgatttcacggcgagaaccgtggccggcacgcgccagcactttctgtagcttttcgctcatagagcttccttttggtgtcgccttcccaggcgtctgatatgcttttgtgcaacagtgagtcagaacttacatctgactcactgatagtaaagtctgtttgaactcttcaggccttaagtaaacgactcgacgttttaactggcctggctttgaggcgcaacatactacactatctttatggttaaagcttgtttcgattaacatcagcttaattaccagccaccaccgcctccgccacccgcagcaccaccggaataacttcgccccaataaactggtattggcccccagactcaggtgcatctgtaatgagaacaaaacgccactacgggcaatttccggggcgcgaacagccgctgtgagtgatggggtgatacgtgctacccattctcttccaaggtttgctgagacagcccaacctagcaacgcgtaatccagtttccgtgtttcccctttccgccgacgcccactgtgtgttgctgcctctttacgcgcgagatagttaacgatagcttcaccgtgggcataacgttgctgcccagtttgggtaaactttggcagaaaaatataccccatgccagtgagataaccggtcaggaaaacagcgctaaaataacccgctggcatataccagtaaaagaatacatctccgacattgatatagagagaataaaaggccacgcctgaacaaatcagcggtaaaaacaaagtgatgattacacgattaacgcaaggcttgtcatcatcgcgggcaaacaaaagctcaagggaacaaaataaaaaaggaagaagccagcagatcataataaacatatcgcccaccagactcattcctgcccagcctacaggactcaggttaccgtaaagaatgaccgccaatattgccagtccaccccattgcaaaaaagtatcaggccggtaaaacgaagactttttacgcggcagataaaatttctgcatccgtaaaacatctaccgacgtaaattgcggcctgcgcttccagagatataaccatccacaaaccagtaatagacacggaaaccaaattaacaacgatgacgtggagggtaaaagaagatggctgaaaatattcgtcgtttgtggagccggggcattgctaagtaacgagtgaggccaacggtagagtaccgtgaaatcttcacgataaaacggatcgctggattcaattcttccgtcctcaaggatgcggccatttcgatatgtgtcgccctcttctccagtaaagagatcgatttcgctaaatggattacccgcgatatcagggaacttgagtgaaaatcgggtcttatagatttcaaacggccagtggttaccagtcacgttccagattaacagatctgaatctccctcacgcaggaaagcatttttaacctgataatgaatttgataatgatagtcgccttgaggcaagaaacgttgtttatcgcccacgacaatactcattaacccgatatgccagtcaagatgccagggttcaggaataccatcacgggtgacgccaacaatatgatagttcagcagtgcagcgtccccatcaggctgcatccatagtcgtggtaaatcacgataaaatccgtgcttaatctgctgatttcgcgcctgaaaatgaatattttctttgatgtcgagcaccccatccggttgcagagtggcttcaacatcaaagagcgagatcccttcttcataagaaggcatctccgtgtttttcgcataacttaacgaagagaaaaaaagcccaactatcaacagcaaaatgcagcgaaacttccctgccatagtcttccatccgtggaacgcaatttgttataagaaaggcttcacatcacctacgccttcacgcaccacgaccggcgtatcatcggtaagatcaataaccgttgttggtttctgcccgagatagccgccgtgaataatcaaatcgacctgtttttccagacggtctttaatttcttcgggatcggattcggtaaattcgctgcctggcagcattagcgaagtggaaagcatcggttcgcccagtgcttcaagcaacgcctgcgcaatcgggttagaaggcacacgcataccgatggttttgcgtttttcctgcaacagacggcgtggcacctccttcgtccccttcaggatgaaggtatagttgcccggcgtgttgtttttcattaaacgaaacgcaacgttatcgacaaatgaataggtcgagagttcagaaagatcgcgacacatcagggtaaagttgtgaccgtccggcagctggcgaatacgacaaatacgctccatggcgtttttatcttcaattttacagccgagcgcatagccggaatcagttggataaacaatcaccccgcctttacgcacgatctccaccgcctggttgattagacgttgctgcgggttatcaggatgaatataaaaaaactggctcataattccctctctgtggtgttctgcggctgttcccatagctgccagacgccttcaacgcctgcgggcagccagagtttacgacccagttcgatccacgggcatggctgatgaaaatcagatccttgtgatgcccataaatggtgctggcgggcaagcgtcgccagctgggtacgttcattgggcgattgctggcactgcgcgacttccatcgcgtcgccgtcgtgttcggcaaaatgcgcaaccaatcttttcagccatttagcactaagattgtaccgcccaggatgagctagcaccgccttaccgccagaatgatgaatgacatcaatagcttgttctattgtacaccactgtggcggaacgtatccggttttcccgcgcgccagatactttttaaagacatccgccattgaactggctttgccgcactcaacaaggaaacgcgcaaaatgaccgcgcgtcactgcgccgccctgcgccagtcgttgtgcgccttccagcgccccaggtatatgcgctttttcaagtctttcggcaatttgctgngcccgctgattgcgccgttctgtctgctgcgcgaggaactcacacattagcggatgagtaatatcaatattcagcccgacaatatgaatttcatgattttcccagaccg

SEQ ID NO: 599 - DNA, 463 bp, Escherichia coli
  Strain O55:H7
tttccacgccgggaataagattcagcgccagtcccgaacgtgaaatttcctctcttgctggcgcgattgcagctgtggtgtcatggtcggtgatcgccagggtgccgacgcgcatctcgactgcacggtgcaccaatgcttctggcgtcaggcagccatcggaagctgtggtatggctgtgcaggtcgtaaatcactgcgtaattcgtgtcgctcaaggcgcactcccgttctggataatgttttttgcgccgacatcataacggttctggcaaatattctgaaatgagctgttgacaattaatcatcgaactagttaactagtacgcaagttcacgtaaaaagggtatcgacaatgaaagcaattttcgtactgaaaggttggtggcgcacttcctgaaacgggcagtgtattcaccatgcgtaaagcaatcagatacccagcccgcctaatgagcgggctt

SEQ ID NO: 600 - DNA, 8459 bp, Escherichia coli
  Strain O55:H7
  modified_base (323)..(323): a, c, g or t
  modified_base (1309)..(1309): a, c, g or t
  modified_base (1359)..(1362): a, c, g or t
  modified_base (2942)..(2942): a, c, g or t
  modified_base (3322)..(3322): a, c, g or t
  modified_base (4029)..(4029): a, c, g or t
  modified_base (4909)..(4909): a, c, g or t
  modified_base (7179)..(7179): a, c, g or t
gaacaaaattagagaataacaatgcaaacacaaaaaccgactctcgaactgctaacctgcgaaggcgcttatcgcgacaatcccaccgcgctttttcaccaattgtgtgggaatcgtccggcaacgctgctgctggaatccgcagatatcgacagcaaagatgatttaaaaagcctgctgctggtagacagtgcgctgcgcattacagctttaggtgacactgtcacaatccagtccctttccggcaacggcgaagccctgctgacactactggataacgccctgcctgcgggtgtggaaaatgaacaattaccaaactgccntgtgctgcgcttcccccctgttagtccactgctggatgaagacgctcgcttatgctccctttcggtttttgacgctttccgcttattgcagaatctgttgaatgtaccgaaggaagaacgagaagccatgttcttcggcggcctgttctcttatgaccttgtggcggggtttgaagatttaccgcaactgtcagcggaaaataactgccctgatttctgtttttatctcgctgaaactctgatggtgattgaccatcagaaaaaaagcacccgcattcaggccagcctgtttgctccgaatgaagaagaaaaacaacgtctcactgctcgcctgaacgatcttcgccagcaactgaccgaaaccgcgccaccgctgccggtggtttccgtgccgcatatgcgttgtgaatgtaaccagagcgatgaagagttcggtggcgtagtgcgtttgttgcaaaaagcgattcgcgccggagaaattttccaggtggtgccatctcgccgtttctctctgccctgcccgtcaccgctggcggcctattacgtgctgaaaaagagtaatcccagcccgtacatgttttttatgcaggataatgatttcaccctgtttggcgcgtcgccggaaagttcgctcaagtatgacgccaccagccgccagattgagatctacccgattgccggaacacgtccacgcggtcgtcgcgccgatggctcgctcgacagggaccttgaaagccgtattgaactggaaatgcgtaccgatcataaagagctttctgaacatctgatgttggtggatctcgcccgtaatgacctggcacgcatttgcacccccggcagccgctacgtcgccgacctcaccaaagttgaccgttactcttacgtgatgcacctggtctcccgcgtggtcggtgagctgcgccacgatctcgacgccctgcacgcttaccgcgcctgtatgaataatggggacgttaagcggtgcnccgaaagtacgcgctatgcagttaattgccgaggctgaaggtcgtcgccnnnncagctacggcggcgcggtaggttatttcaccgcgcacggcgatctcgacacctgcattgtgatccgctcggcgctggtggaaaacggtatcgctaccgtgcaagccggtgctggcgtagtccttgattctgttccgcagtcggaagccgacgaaacccgtaataaagcccgcgctgtactgcgcgctattgccaccgcgcatcatgcacaggagacgttctaatggctgacattctgctgctcgataatatcgactcttttacttacaacctggcagatcagttgcgcagcaatggtcataacgtggtgatttaccgcaaccatattccggcgcagaccttaattgaacgccttgcgacgatgagcaatccggtgctgatgctttctcctggacccggtgtgccgagcgaagctggttgtatgcctgaactgcttacccgcctgcgcggtaagctgcctattattggcatttgccttggtcatcaggcgattgtcgaagcttacgggggctatgtcggtcaggcgggcgaaattcttcacggtaaagcgtcgagcattgaacatgacggtcaggcgatgtttgccggattaacaaacccgctgccggtggcgcgttatcactcgctggttggcagtaatattccggccggtttaaccatcaacgcccattttaatggcatggtgatggcggtgcgtcacgatgcagatcgcgtttgcggattccagttccacccggaatccattctcaccacccagggcgctcgcctgctggaacaaacgctggcctgggcgcagcagaaactagagccaaccaacacgctgcaaccgattctggaaaaactgtatcaggcgcagacccttagccagcaggaaagtcatcagctattttcagcggtggtacgtggtgaactgaaaccggaacacctggcggcggcgctggtgagcatgaaaattcgcggcgagcacccgaacgagatcgccggagcagcaaccgcgctactggaaaacgccgcgccgttcccgcgtccggattatctgtttgccgatatcgtcggcaccggcggtgacggcagcaacagcatcaatatttccaccgccagtgcgtttgtcgccgcggcctgtgggctgaaagtggcgaaacacggcaaccgtagcgtctccagtaaatctggctcgtcggatctgctggcggcgttcggtattaatcttgatatgaacgccgataaatcgcgccaggcgctggatgagttaggtgtatgtttcctctttgcaccgaaatatcacaccggatttcgccatgcaatgccggttcgccagcaactaaaaacccgcaccctgttcaatgtgctggggccattgattaacccggcgcatccgccgctggcgttaattggtgtttatagtccggaactggtgctgccgattgccgaaaccttacgcgtgctggggtatcaacgcgcggcggtggtgcacagcggcgggatggatgaagtttcattacacgcgccgacaatcgttgccgagctgcatgacggcgaaattaagagctatcaattgaccgctgaagattttggcctgantccctaccaccaggagcaactggcaggcggaacaccggaagaaaaccgtgacattttaacacgcttgttacaaggtaaaggcgacgccgcccatgaagcagccgtcgcggcgaatgtcgccatgttaatgcgcctgcatggccatgaagatctgcaagccaatgcgcaaaccgttcttgaggtactgcgcagtggttccgcttacgacagagtcaccgcactggcggcacgagggtaaatgatgcaaaccgttttagcgaaaatcgtcgcagacaaggcgatttgggtagaagcccgcaaacagcagcaaccgctggccagttttcagaatgaggttcagccgagcacgcgacatttttatgatgcgctacagggtgcgngcacggcgtttattctggagtgcaagaaagcgtcgccgtcaaaaggcgtgatctgtgatgatttcgatccagcacgcattgccgccatttataaacattacgcttcggcaatttcggtgctgactgatgagaaatattttcaggggagctttgatttcctccccatcgtcagccaaatcgccccgcagccgattttatgtaaagacttcattatcgacccttaccagatctatctggcgcgctattaccaggccgatgcctgcttattaatgctttcagtactggatgacgaacaatatcgccagcttgccgccgtcgcccacagtctgaagatgggtgtgctgaccgaagtcagtaatgaagaggaactggagcgcgccattgcattgggggcaaaggtcgttggcatcaacaaccgcgatctgcgtgatttgtcgattgatctcaaccgtacccgcgagcttgcgccgaaactggggcacaacgtgacggtaatcagcgaatcaggcatcaatacttacgctcaggtgcgcgagttaagccacttcgctgacggttttctaattggttcggcgttgatggcccatgacgatttgcacgccgccgtgcgtcgggtgttgctgggtgagaataaagtatgtggcctgacgcgtgggcaagatgctaaagcagcgtacgacgcgggcgcgatttacggtgggttgatntttgttgcgacatcaccgcgttgcgtcaacgttgaacaggcgcaggaagtgatggctgcggcaccgttgcagtatgttggcgtgttccgcaatcacgatattgccgatgtgctggacaaagctaaggtgttatcactggtggcagtgcaactgcatggtaatgaagatcagctgtatatcgatacgctgcgtgaagctctgccagcacacgttgccatctggaaagcattaagcgtcggtgaaaccctgcccgcccgcgagcttcagcacgttgataaatatgttttagacaacggccagggtggaagcgggcaacgtttcgactggtcactattaaatggtcaatcgcttggcaacgttctgctggcggggggcttaggcgcagataactgcgtggaagcggcacaaaccggctgcgccggacttgattttaattctgctgtagagtcgcaaccgggcatcaaagacgcacgtcttttggcctcggttttccagacgctgcgcgcatattaaggaaaggaacaatgacaacattacttaacccctattttggtgagtttggcggcatgtacgtgccacaaatcctgatgcctgctctgcgccagctggaagaagcttttgtcagcgcgcaaaaagatcctgaatttcaggctcagttcaacgacctgctgaaaaactatgccgggcgtccaaccgcgctgaccaaatgccagaacattacggctggcacgaacaccacgctgtatctgaagcgcgaagatttgctgcacggcggcgcgcataaaactaaccaggtgctcggtcaggctttactggcgaagcggatgggtaaaaccgaaatcatcgccgaaaccggggccggtcagcatggcgtggcgtnggcccttgccagcgccctgctcggcctgaaatgccgtatttatatgggggccaaagacgttgaacgccagtcgcctaacgtttttcgtatgcgtttaatgggtgcggaagtgatcccggtgcatagcggttccgcgacgctgaaagatgcctgtaacgaggcgctgcgcgactggtccggcagttatgaaaccgcgcactatatgctgggcaccgcagctggcccacatccttatccgaccattgtccgtgagtttcagcggatgattggcgaagaaaccaaagcacagattctggaaagagaaggtcgcctgccggatgccgttatcgcctgtgttggcggcggttcgaatgccatcggcatgtttgcagatttcatcaacgaaaccaacgtcggcctgattggtgtggagcctggtggtcacggtatcgaaactggcgagcacggcgcaccgctaaaacatggtcgcgtgggtatctatttcggtatgaaagcgccgatgatgcaaaccgaagacgggcagattgaagaatcttactccatctccgccggactcgattttccgtccgtcggcccacaacacgcgtatcttaacagcactggacgcgctgattatgtgtcaattaccgatgatgaagcactggaagccttcaaaacgctgtgcctgcacgaagggattatcccggcgctggaatcctcccacgccctggcccatgcgctgaaaatgatgcgcgaaaacccggaaaaagagcagctactggtggttaacctttccggtcgcggcgataaagacatcttcaccgttcacgatattttgaaagcacgaggggaaatctgatggaacgctacgaatctctgtttgcccagttgaaggagcgcaaagaaggcgcattcgttcctttcgtcacgctcggtgatccgggcattgagcagtcgctgaaaattatcgatacgctaattgaagccggtgctgacgcgctggagttaggcatccccttctccgacccactggcagatggcccgacgattcaaaacgccacactgcgtgcctttgcggcaggtgtgcccccggcgcagtgctttgagatgctggcactcattcgccagaaacacccgaccattcccattggcctgctgatgtatgccaacctggtgtttaacaaaggcattgatgagttttatgcccagtgcgagaaagtcggcgtcgattcggtgctggttgccgatgtgccagttgaagagtccgcgcccttccgccaggccgcgttgcgtcataatgtcgcacctatcttcatctgcccgccaaatgccgatgacgacctgctgcgccagatagcctcttacggtcgtggttacacatatttgctgtcacgagcgggcgtgaccggcgcagaaaaccgcgccgcgttacccctcaatcatctggttgcgaagctgaaagagtacaacgctgcacctccattgcagggatttggtatttccgccccggatcaggtaaaagcagcgattgatgcaggagctgcgggcgcgatttctggttctgcgattgttaaaatcatcgagcaacatattaatgagccaaagaaaatgctggcggcactgaaagcttttgtacaaccgatgaaagcggcgacgcgcagttaatcccacagccgccagttccgctggcggcattttaactttctttaacgaagccggaaaaatcctaaattcatttaatatttatctttttaccgtttcgcttacccctgtcgaacgtcaacttacgtcatttttccgcccaacagtaatataatcaaacaatttaatcccgcaacataacaccagtaaaatcaataattttatctaagtcacttattccgcaggcaattgttaatatatcaagaacgttcgtcataatatattttcctactttcttctcgttacgcttaatttgactaatcctcattagcgactaattttaatgagtgtcgacacacaacactcatattaatgaaacaatgcaacgcaacgggagaaataacatggccgaacatcgtggtggttcaggaaatttcgccgaagaccgtgagaaggcatccgacgcaggccgtaaaggcggtcagcatagcggcggtaattttaaaaatgatccgcaacgcgcatctgaagcgggtaaaaaaggcggtcaacaaagcggtggtaataaatcaggaaaatcctgattcaccgttaattattaatatcagctgataaagataattgcatctgcgggccgtatggctcgcagngatttcactggagaaaaatatgaatatgaagaccattgaagatgtatttattcacctgctttcagatacctacagcgcagaaaaacaattaacccgggcactggcaaaactcgcaagagcaacatcaaacgaaaaattaagtcaggcttttcatgcgcacctcgaggaaacacatggacagattgaacgtattgatcaagttgtggaatcagaatcgaatctgaaaattaagcgcatgaaatgtgtggcaatggaaggtcttattgaagaagctaatgaggtcatcgaaagtaccgagaaaaacgaagtgcgtgatgccgcactgattgccgcagcacagaaagtcgagcattatgagattgccagttacgggacattagcgacgctggctgaacaattaggttaccgtaaagcagcgaagcttctgaaagagaccctggaagaagaaaaggccaccgacatcaaactgactgatctggcccttaataacgtaaataagaaagccgaaaataaagcctgaaatatgaactttaacttttagtcattttataaagaggacattttcatgaatcgtattgaacattatcatgactggttacgtgacgcccatgcaatggaaaagcaagccgaatctatgcttgaatccatggccagccgtatagataattatcctgaactacgtgctcgtattgaacaacatcttagtgaaaccaaaaaccagattgttcaactggaaactattcttgattgtaatgacatttcacgttcagtcattaaagattccatgagtaaaatggctgcgcttgggcagtcaatcggtggtatattcccttctgatgaaatagtcaaaggctctattagcggatatgtcttcgagcaatttgaaatcgcctgttacacctctctattagcagcagcaaaaaatgccggtgatacagcctcaattccgatcatcgaagcgattttaaatgaggaaaagcaaatggccgactggctgattcagcatattccgcaaacaactgagaaatttttaattcgctctgaaactgatggcgtagaagcgaagaaataataccctttatgccatgtccttattgaccccgtatattacggggtcgtttttgtgcggaattaaaaacgatatcctgctgagaacataaacacccacggatcgaggcgtacgctatcatgttgctgtgcaccgcccagtttataattggcggtggtatcgatatccatgtaccacactggtagattttacaaaactcaataacatatta

SEQ ID NO: 601 - DNA, 3751 bp, Escherichia coli
  Strain O55:H7
  modified_base (424)..(427): a, c, g or t
  modified_base (2831)..(2832): a, c, g or t
  modified_base (2856)..(2856): a, c, g or t
  modified_base (3739)..(3740): a, c, g or t
  modified_base (3744)..(3745): a, c, g or t
tttacgatgcttttttatacagatctctcgtgtttttaactgattgattttgttgaactctttttttgttttgcaggagttactcctcttaccttattgtccactcgatgaccaacacattcacaacccaaaccagaatatcctatctatgaagcatgtatccgcacgcagattaactatggtttacattgttctaccacaatagtcgcatcctaaatgggtgcggttgaggatcaccatccttgaagaggatgcccgccactttaactgcatgacagggctatttaaacaatcactaaaaatcgcccaagagcattctgtttctataatgtattccaagagattaaaaaataatatcatacgttattcggcagagttcgtatgtactacggcgtcccaaccatgtcccaaaacaaaaatttcnnnnctatacacgttccaaaaaattccacaacaaagagagtctgctgacgagttgttgattcactgattaatacgtaaaattgataactgctggaaatcatacaatactcgtactttcgaaagttcgctaaccaggtgctacacgcgaggtgttgcagttttctttacgatttatcattcaatcctaatccatgcatgacatgtggtgcctgtggggtgatcctacctacgtaatgtggacacagccctaatcaaggttctgtttttcaaaacagttccgtgctgagacagccacaagtactgtgtcggcaccaccgattgtaatcacactagatctaattaaacacagccgtctgcattatttcccgactcataaaatattagccgtaaatgcattcgacttttagtgagtggaagaaactttccgccctagcattatcgtaacactaaaaattgtatcttagactcaacaacatgcaatgtagatggctttacagtgtttaacagaagatcctgtagttttgatatgcgtcctcccggaagcgcagacagaactccacaactgagattatcaatatcagaagtcgcatggatgtcaaaaataatagagacagagacaaataatacaaacaaatcatagctattagcccagaaaagagttggtacactagccatgaataacttcctaacaacttgattttttagttatttttttcttcattcttgaaaaaggatgccccgaaagggttccagagttcgattttctgcgcttctgcaaataatcaaggggttacaaagtggttgcccctttgtttttagtgctcttggtatacccattggtacatttagcgcaataccatctggtatcacttaaagacacgaaaaacaactttttatctttttgtttcgctcaaattagtataaaaagctgaacaacaaacaataaaaaccattaacatcaatagattatgatggcttcaatctaaataataggctatataatactgcaagacacaacacatgctgtcactatgagtcaactatttagatgatattagtgacctgtttcagagcattagcgcaaggcgattctttgtcttcttgcactaattttttgtcataaaaatgttcctagcactgggcatcaatatcgcaggtcagaaagagctcctggggatgcggctggccgaaaatgaaggggcgaatttctggttcaatgtgctgactgaactgaaaaaccgcggtctgaacgatatcctcatcgcctgtgtggatggcctgaaagaattcccggaggcccgcatccagttatgcatcgtgcatatggtgcgcaacagcatgcgcttcgtgtcatggaaggaatacaaagccgtcactcgcgacctgaaagcgattagcctcccacagaagaggcaggccagcaggcactggaagcgtttgctgcggcctgggactgccgctatccgcagataagccggtgctagctgtcaaactggactaacttggcgacgtttttcgcttatccggcagatatccgcaaagtgatctacacaacgaacgccgtcgagtcgctgaacagtgtgatccggcatgccatcaggaaacgcaaggtgttcccgacggacgagtcagtaaaaaaagtggtgtggctggcaatccaggccgcgtcacagaaatggacaatgccgttaagggactggcgaatggcaatgagccgctttattatcgagtttggtgaccgtcttgacggtcacttttaagaaaaggcatttacacagaatcctaaacaggctcacaggcctctaatcatccacattgtaaagatcctttgttgtaagtaagatctggtaccctaataatatcaaaaggattaaaatcatcactgcatccttccacgaggcatttcattgctcgtagatcaccatatagctctgaagagtgatgcggacatagcagattataaactttacatttcgaatcttctttgccttgtctactttcctcaatttttactttcaatgaatgcagaaaaaaaagatccctgatataactatccctatcctctatcgtcattcccgccctcagcgctccgacactcatcagtattttcatttctcacctcaaatacactatttctcttatccatcagcccacttacaaaagcacttagctcttgaaaaatttcctcaagctcattattatttctggcacatgaatatatagagaccataacatcaagtttatcttgtaattcaggagaaagaaagtgattatgattaagctcacttactgattccggagtcgaagggttacctcttcctgatacatacatccatgaataaagatttgctgaagaaccacttgttggtaacatatcaaaacccccttaacaaataaatccataaatnntattgcaactaatatatctggatnaaaatattatatcttacttaatactacactaataagatccagctttcctccgtgataagattgcatgacttgatgttcactccatgaaatatcagaaacattataagatgatatatctattggattaaattcatttctcatacgatcatataaaacatttgtctctgttgtatcaacaaaaagaattccttttttctccagtctgtcaaacatatcgtaaatagcctgttcagcttgtgctggtaatgatggaatatccaaaagagattccccatttattttattcattctaataccaataacatttccattatcattatatattttctctgcactcccggaaccataatactgattgaaacaacgaacttcgcttgtcacctcttcatggctttgagatatagtaaacatcttcaacacttttgttgtatcttccatatcttcatacacgacagcattaccacctttaccaataacattacctggcacgggtgatttattgttgctaaccctcggcaactctgactgagtataatccgctggaggtaactccggctgcgcataatccactggaggtaaatcaggtctgttcgaatgaacagagcctctttctatagtcgtgctcactggcgatgtattcagcatagcctcaatttttctgctaatctctcccttaggccatcccaacctgtgcaacagattagtaaaacaaccactatgactttctcttgtaacgcaaaacttattatcagtgaccacaacacgatatgttctgttgccaaccgttacttgcgtcccgctatcagagtgaacagcagcatcccttacagaggataaaacacgattatcaggcgaagtcaggtttctggttaaagaattccannaacnncccaaa

SEQ ID NO: 602 - DNA, 1260 bp, Escherichia coli
  Strain O55:H7
  modified_base (679)..(679): a, c, g or t
  modified_base (730)..(730): a, c, g or t
  modified_base (741)..(741): a, c, g or t
  modified_base (945)..(945): a, c, g or t
  modified_base (1117)..(1117): a, c, g or t
  modified_base (1231)..(1233): a, c, g or t
aacatacatttcaaccttcaaaataaacttatctaattattcctaacagacatcccccgtacatgacaacaaaaaccggagccggactccggtttttgtgaagctatcgggttacttcatttcgccaatattttcccacttcccgtcagcacgcaggatttgcagcggtcttactacacactgacccgaggacgaaaaaagagttcgggctgggaagagacagaagagtagcaatttcagaagcattcacaccaacattgagcttttcagcgaaagtgggcacgaatcattgctggacagggttaaaggcactgactcaatcactcttcatacgtggcttgattgatatgaaacaatcctcagctagagggggagcaagccgaaaacattactcgactacgccagcaaaatcagggtaattcgaagaaaattgccggacaaaccgctcactgacatatcaacgaaagaggtggcagcaatgctaaacacctacgtcgcagaaggtaaagcggtttccgcaagagtaatcaggtcaacccttgttgacgtttttcgaggggcaatagccgaggggcatgtggcaacgaatccagtaacaacaacccgtgcagcaaagtcagaagtaaggcgctcaaggctgacagctaatgagtatgtcgctatttaccatgctgctgancacctccccatctggctgaggctgkcaatggatttagctgtmgttacaggncagagagtggncgatttgtgcagaatgaagtggtcagacataaacgatggtcatcttcacattggacagagtaaaacaggagccaaaattgccattccgctggctctaaccattgacgcactcgacatctcactggttgatacactacagaaatgcagggaggccagcagcagtgaaacaataatcgcatcracctatcacgaaccactttctcnagccacagtatcacggtatttaacaaaggcgcgaaatgcatccgggatctcgtttgatggagacccaccgacatttcatgaactacgtagtctgtccgcgaggctatatcggaaccagattggctacaagtttgcacaacgtcttcttggacataaatctgattcaatggcngcgcattatagggacagtcgcgagcgggagtgggacaaaattgaaatcggataatgattttattttgaccaataatgacttaccagatttaacaacttgatatttaataagatnnntgaacgaacaacttccatgtcagaagg

SEQ ID NO: 603 - DNA, 32 bp, Escherichia coli
  Strain O55:H7
  modified_base (5)..(5): a, c, g or t
aaatnacaaaaatacattaaaaatcattatgt

SEQ ID NO: 604 - DNA, 92 bp, Escherichia coli
  Strain O55:H7
aaaacgcgacaaaacactacatttagagtcacaattaatcaatgagttaggtgtgattagtgacctgagacagagcattagcgcaaggtgat

SEQ ID NO: 605 - DNA, 83 bp, Escherichia coli
  Strain O55:H7
tttttgtcatcaaacatacagccaatcagaagagcataaagctgccaagcattatatgtcttagttttatgctcattttcatt

SEQ ID NO: 606 - DNA, 23 bp, Escherichia coli
  Strain O55:H7
aacacttagagtaaaaatgtaat

SEQ ID NO: 607 - DNA, 11 bp, Escherichia coli
  Strain O55:H7
atacaaccaac

SEQ ID NO: 608 - DNA, 184 bp, Escherichia coli
  Strain O55:H7
  modified_base (89)..(89): a, c, g or t
gtgttcaagcgataaactggtaaatttaacaacttaattttgagatctaagtcacatcaatcaagcattcaaacagctatatattaaanctgtccacatcggatatgtgacactaataatatcaatggattgatattattaatggatataaacatgcaataaggatttatcatgaacattcaac

SEQ ID NO: 609 - DNA, 27 bp, Escherichia coli
  Strain O55:H7
atcaccacacaaaacaatcaacatcat

SEQ ID NO: 610 - DNA, 5 bp, Escherichia coli
  Strain O55:H7
gaaca

SEQ ID NO: 611 - DNA, 30 bp, Escherichia coli
  Strain O55:H7
cccctacacaaataccgcaatccgaattac

SEQ ID NO: 612 - DNA, 73 bp, Escherichia coli
  Strain O55:H7
  modified_base (10)..(10): a, c, g or t
atatgcagcnacatgcaccggaatgcggtgaaacaacagctctactgagcttgataaaagatgaaggtctgct

SEQ ID NO: 613 - DNA, 21 bp, Escherichia coli
  Strain O55:H7
gaaaaaaagcattggatatgt

SEQ ID NO: 614 - DNA, 23 bp, Escherichia coli
  Strain O55:H7
taaccaccgagccaaaagaccca

SEQ ID NO: 615 - DNA, 23 bp, Escherichia coli
  Strain O55:H7
  modified_base (15)..(18): a, c, g or t
tcaagtagttcgtannnntggtg

SEQ ID NO: 616 - DNA, 26 bp, Escherichia coli
  Strain O55:H7
aaatggatggaagcttgttggagaaa

SEQ ID NO: 617 - DNA, 177 bp, Escherichia coli
  Strain O55:H7
  modified_base (3)..(4): a, c, g or t
  modified_base (129)..(129): a, c, g or t
  modified_base (135)..(136): a, c, g or t
  modified_base (141)..(142): a, c, g or t
ggnncaaaagcaaattacacggaggagtgggttatcagaccgggagaagcagattttaaatatggtacatctccactacaggcaactctagggctggagtttggcgcacatttcaaatgggatttaganaacccnnatacnnaatatgccgttcttaccaatgctgccgcaaatgcg

SEQ ID NO: 618 - DNA, 76 bp, Escherichia coli
  Strain O55:H7
  modified_base (12)..(13): a, c, g or t
  modified_base (24)..(27): a, c, g or t
  modified_base (50)..(51): a, c, g or t
atggttgggcanncagcagggcannnnatacagtgtaatacccccggatnnaagccagacactattttatggtggg

SEQ ID NO: 619 - DNA, 39 bp, Escherichia coli
  Strain O55:H7
  modified_base (38)..(38): a, c, g or t
ttcactgactatcctcgtatatggtggcatgcaagagna

SEQ ID NO: 620 - DNA, 87 bp, Escherichia coli
  Strain O55:H7
tatcgaaagcaatgacttaccacatcataatccattaaatcatgttgatatcgttgatataatccaagaaacaagagtctaagcttt

SEQ ID NO: 621 - DNA, 49 bp, Escherichia coli
  Strain O55:H7
acgccctcaagtcatctgaaacctgtcaaccacagacaccttcttatat

SEQ ID NO: 622 - DNA, 22 bp, Escherichia coli
  Strain O55:H7
tgaatactctcttgcgattgtg

SEQ ID NO: 623 - DNA, 25 bp, Escherichia coli
  Strain O55:H7
  modified_base (15)..(15): a, c, g or t
ccctgttttaattcnaactccagac

SEQ ID NO: 624 - DNA, 27 bp, Escherichia coli
  Strain O55:H7
cttacatgacaacaaaaaccggagccg

SEQ ID NO: 625 - DNA, 49 bp, Escherichia coli
  Strain O55:H7
  modified_base (25)..(28): a, c, g or t
tcgggttacttcatcccgccaatannnncccacgtcccgtcagcacgca

SEQ ID NO: 626 - DNA, 201 bp, Escherichia coli
  Strain O55:H7
  modified_base (12)..(12): a, c, g or t
  modified_base (67)..(67): a, c, g or t
  modified_base (84)..(84): a, c, g or t
  modified_base (96)..(96): a, c, g or t
  modified_base (105)..(105): a, c, g or t
  modified_base (152)..(152): a, c, g or t
  modified_base (197)..(197): a, c, g or t
ggtcttaccacncactgtatctgctttttatccgcatccagtatcaccacctgcgtgattaccctgncctgctccggaataatnccattctcatcngactccagnatgtctgccggccccagwcgcagytgtgctgtaagtaactccccgtnttcacggtcatcatgctttccgtacccgcacagacgctgcataantttt

SEQ ID NO: 627 - DNA, 75 bp, Escherichia coli
  Strain O55:H7
  modified_base (65)..(66): a, c, g or t
  modified_base (69)..(70): a, c, g or t
agccccttaacatcctgccacggcccgtcaccaaacctgacctgcaaatgctgaaaaaaaccctnnacnngtgtg

SEQ ID NO: 628 - DNA, 18 bp, Escherichia coli
  Strain O55:H7
ctgtttgtctcaataatg

SEQ ID NO: 629 - DNA, 6 bp, Escherichia coli
  Strain O55:H7
cggccc

SEQ ID NO: 630 - DNA, 28 bp, Escherichia coli
  Strain O55:H7
cccccgggtcgcccttcggtccctgagg

SEQ ID NO: 631 - DNA, 20 bp, Escherichia coli
  Strain O55:H7
ctctccccgctctcccctgt

SEQ ID NO: 632 - DNA, 218 bp, Escherichia coli
  Strain O55:H7
  modified_base (17)..(20): a, c, g or t
  modified_base (116)..(118): a, c, g or t
  modified_base (170)..(170): a, c, g or t
  modified_base (189)..(189): a, c, g or t
cccctttggcccgggannnnccaccacggtggggattcggtttacggcctcttccgccgctatcctgctttgttccgctgactgtgcgctttctgctgactcccgggctttttctnnngcggtcgttgcatccctggctgcattaccggctgcactttctgccgtctttnttgacaactcagcatctgntgcactttgtgatgactcactggcttttt

SEQ ID NO: 633 - DNA, 56 bp, Escherichia coli
  Strain O55:H7
  modified_base (3)..(3): a, c, g or t
gcntcccctgctgaagtgtcagcatttgcagcgctctcttctgcctgactggctga

SEQ ID NO: 634 - DNA, 45 bp, Escherichia coli
  Strain O55:H7
cattcagcgtaccgggttgagaatcttcatacacggtgatggtcc

SEQ ID NO: 635 - DNA, 37 bp, Escherichia coli
  Strain O55:H7
  modified_base (2)..(5): a, c, g or t
  modified_base (36)..(36): a, c, g or t
annnncagaatgacgctgtactgaccgtactcaacnt

SEQ ID NO: 636 - DNA, 23 bp, Escherichia coli
  Strain O55:H7
gccaccgtgttcaccaccaccgt

SEQ ID NO: 637 - DNA, 22 bp, Escherichia coli
  Strain O55:H7
  modified_base (17)..(18): a, c, g or t
cttgttgtcagttacgnngaga

SEQ ID NO: 638 - DNA, 23 bp, Escherichia coli
  Strain O55:H7
  modified_base (16)..(16): a, c, g or t
gaaccagcggttacgnacggaat

SEQ ID NO: 639 - DNA, 23 bp, Escherichia coli
  Strain O55:H7
cataacggtatttcacgttaatc

SEQ ID NO: 640 - DNA, 37 bp, Escherichia coli
  Strain O55:H7
  modified_base (5)..(6): a, c, g or t
  modified_base (34)..(35): a, c, g or t
cgggnncgttcgtcgaggcatgaagataccccgnnct

SEQ ID NO: 641 - DNA, 26 bp, Escherichia coli
  Strain O55:H7
gcaggcatatcaataacaccactgta

SEQ ID NO: 642 - DNA, 81 bp, Escherichia coli
  Strain O55:H7
  modified_base (26)..(26): a, c, g or t
  modified_base (28)..(29): a, c, g or t
cgtattatccagcgcggtacggttananntttcagcaccgtttttccgcactatcagacggcatgaggagtaaatatcagt

SEQ ID NO: 643 - DNA, 23 bp, Escherichia coli
  Strain O55:H7
gacgttgttgagcgtcccggagt

SEQ ID NO: 644 - DNA, 56 bp, Escherichia coli
  Strain O55:H7
  modified_base (24)..(25): a, c, g or t
tcagggaaaatgccggaggattanngccgctggtaatggtgggagccgtcagatat

SEQ ID NO: 645 - DNA, 36 bp, Escherichia coli
  Strain O55:H7
  modified_base (12)..(13): a, c, g or t
  modified_base (30)..(31): a, c, g or t
ttaatcatcgcnntcctgtctgccgccagnngcacc

SEQ ID NO: 646 - DNA, 22 bp, Escherichia coli
  Strain O55:H7
gtatcaacctgaaccttctgta

SEQ ID NO: 647 - DNA, 47 bp, Escherichia coli
  Strain O55:H7
  modified_base (22)..(22): a, c, g or t
gaaaaaatccaggtaaccttcngcatcatcgctcgcccgaccgacgg

SEQ ID NO: 648 - DNA, 20 bp, Escherichia coli
  Strain O55:H7
ggtttgatattgatactggc

SEQ ID NO: 649 - DNA, 44 bp, Escherichia coli
  Strain O55:H7
ctgcctgatatccgcaatccgcgtttccgagaaccagaactcaa

SEQ ID NO: 650 - DNA, 39 bp, Escherichia coli
  Strain O55:H7
  modified_base (34)..(35): a, c, g or t
gcacaaacgtcagcgtctgcccgttccataccgnnatac

SEQ ID NO: 651 - DNA, 46 bp, Escherichia coli
  Strain O55:H7
  modified_base (22)..(23): a, c, g or t
  modified_base (27)..(28): a, c, g or t
  modified_base (31)..(31): a, c, g or t
  modified_base (37)..(37): a, c, g or t
acgcattgaaagtcatccgcgnntctnngcncccganaccatccgg

SEQ ID NO: 652 - DNA, 1899 bp, Escherichia coli
  Strain O55:H7
  modified_base (305)..(306): a, c, g or t
  modified_base (385)..(385): a, c, g or t
  modified_base (399)..(401): a, c, g or t
  modified_base (403)..(406): a, c, g or t
  modified_base (409)..(410): a, c, g or t
  modified_base (592)..(592): a, c, g or t
  modified_base (880)..(880): a, c, g or t
  modified_base (1547)..(1549): a, c, g or t
  modified_base (1892)..(1893): a, c, g or t
aattttttttaatatgttcatgtcattctcctgttctgcctgtatcactgcccacttcatccagccccttaacatcctgccacggcccgtcaccaaacctgacctgcaaatgctgaaaaaaaccctgaacccgtgtggcatctttgggggcaagaaaggtcagtccggtgatgagtgcgccatctgtatccgggaaccagccattgctgtttgtctcaataatgtttcccggccccagacggaaccgtatttgtgtctctccccgctctcccctgtcacctttcggcccctgcgggcctgccggnncagcatcacctgccggtccccgttcgccggttgccccgacagggccggtgtcaccgcgctctcccttatcacccttcgncccctgaggacccnnngnnnnccnnttccccctttggcccgggaggtcccaccacggtgggggattcggtttacggcctcttccgccgctatcctgctttgttccgctgactgtgcgctttctgctgactcccgggctttttctgttgcggtcgttgcatccctggctgcattaccggctgcactttctgccgtctttcttgacaantcagcatctgctgcactttgtgatgactcactggctttttgagcagccgcagaggccgaggacgaggacgcctcctctgactgctttgcagcggctgcactttctgccgcctgccgggctgactccgatgcatcccctgctgaagtgtcagcatttgcagcgctctcttctgcctgactggctgatatgccggcattcctcgcggacgtctccgcctctccggcattcttcttcgcctcctcagcgtgacgcgccgcttcttccaccatcagttcaaaacgacgcagngcctccggccggacgtcatcctccgacatggcaccgagaaaatcattcagcgtaccgggttgagaatcttcatacacggtgatggtcccggcatgtgacggcgggaatccttccaccaacagaatgacgctgtactgaccgtactcaacgtccatgctgtaacgaccggcttcatccggattttcagaggccaccgtgttcaccaccaccgtgctgctggtccgtctggctttcagttgaatggtgcagttctgtaccggttttcctgtgccgtctttcagtacacctgaaatctttactgccatattcaccccacaaaaacgcccaccagaaccggcgggctgtcataactctgtgttacctggctaatcagaatttataaccgacccccacaatgaaaccgtcagtgcgccagtcgccactgccggagccttcataagcaaggtcaataaccaccgtctctacgggactgaactgaatcccggcattccaggccggcgacagatgacgcgcagtatgaccatcactggcggtggtggtctccttcacataccccggtttcacttcatcacgccggtaatcctgaacactgtcagaccagcgggtgtacgccatcccggccatgccatagagactgacccgctcactgagctgccagacagggccnnncatcagactgacataacgaccgcgcaggctttcataatggaaggtattttcacccgtcttcatcgtgtcacttttcttcaccgatgcataactcagcgcgacaatgccgcccaggtgatccgtgaactcataacggtatttcacattaatcccttttaaatcacctgcacgcgcaccggtaccggacaatgccggtacgccgcccgggtgaacctgagcatatcccacggaaaatgcaccgtgtccgctttcagcctgtgcaggaagggaaatgcctgtcagcagtgcggtccagaataaaatggctccgtataaatgtcgtgtagtggcacagtaaatttgnncacctg

SEQ ID NO: 653 - DNA, 2029 bp, Escherichia coli
  Strain O55:H7
  modified_base (1678)..(1679): a, c, g or t
  modified_base (1683)..(1684): a, c, g or t
tgatatcctcaccacaacacaaaacaggtgacttaatgaacaagaaaaccaaacgtactttcacccctgaattcaggctggaatgtgcacagctaattgttgataagggctactcatatcgacaagccagtgaagcgatgaatgtcggttctaccacgcttgagagttgggtgcgccagctcaggcgagagcgtcaggggattgcgccctctgccacacctattactccagaccagcaacgtatccgcgaactggaaaagcaggttcgccgcctggaggaacacaatacgatattaaaaaaggctaccgcgctcttgatgtccgactcgctgaacggttcacgatagttgccagactgagtgacagccactcagttgtcagcctctgttctgctctggaaatacaccgcagcagttaccagtactggcgaaaacgacgcgatacggttaatccggcgcgagtcaggttgtgcagcgaaatacgccgggcgtggaaccaaagtaggggctctgcgggggcgcgcacgctggctgaaatgctgacccaaaacggcgtcccgatgagccgttaccgtgccgggcgtctgatgaaatatctgaacctgagcagttgtcagcccggaaaacatcagtacaaaaatgctcgtcaggaacatacctgcctgccgaatctgcttgagcgccagttcgctgtgcccgagccagatagggtatggtgcggagatattacgtatatctgggcaggaaatcgctggtgctatctggcggtcgtcatggatctttttgcccgcagggttatcggctggagcctgtcagcgaatgccgatactgccctgataagcagtgccctgcggatggcgtatgaggtgcgtggtcagccgcgggacgtcatgttccatagcgaccagggaagtcaatatacaggactgaaatatcaacaacttctctggcgttacaggataaagcaaagtgtcagccgacggggaaactgctgggataacagtccaatggaacgcttcttccgcagtctgaaaacagaatgggtgccaaccgatggctacacaggcaaagacgtggcccggcagcaaatcagcagttatattctgaattattacaatagcgtcaggcctcaccattataacggagggctgacgccggaagagtcagagaacagatatcatttttactgtaaaaccgtggccagtattacttgaccactacatcgcatgatgacctctcgttttcagtcaataaaaaaggcacctcctgaggtgcccgtccgggttaataaaccgtcagctgatactgatccctgctgtggattttttcatgaccacaaccagtaaatcactgatgtacgttgtcggcgtccagttgttcgcaccggccgacgacacattaaacgtcagggtgacatgaccccgccctgccggcatatctatcaccgatgagaacacccggctgacatccgttgccggttcatggaaaatctcaaccccgttcttcagcacctgcagcttacaggtggaataccagtacgactgctgattcgggctgttgaaattctggtgtttcgtcccgcgaaacagcaccgggggaatgatgatctgccggtcgaagccctggtcatcgtaaactgtgacggttaccgtcccgctggcataactgttattccgggnnaagnntttccccaccgtcttcaccaggtcgccttcaatctggtttgcagacagtttccctctgatgacacagttctcgttaatggtgacattattgagcgtgccggtattcgcggtaattgctccgctgatatccgcgttcctggctgtcagcttcccttccggcgtcagggaaaacgtcggggggttgccggatgacgtgatactcaccgcaaacaggcgtttcaggaacacgtcgttcatgaatatctgatcgccctgaccaacaaacatcggctttgtgttgccattcgcaggattaatcatcgcaatcctgtctgccgccagcagcacctgactctgcattcctgc

SEQ ID NO: 654 - DNA, 1722 bp, Escherichia coli
  Strain O55:H7
ttctcaataccggcaccgatacccgcaatataaaggcgtccgtccttcatctgttgcagcttcacagcccacatgctgttcagattattatttgtatcaacctgaaccttctgtatctgctggatcgctgcactctggtcttccagtttcttattgacggtctgcgtgatttcattactgacatccgtgatggacgttctgatttccgccaggtcaggcgcaagctgaccgttatcaatctgagtccacaactcctgagccagatgggttttccctatctctcctttgaaaaaatccagatagccggatgcatcatcactcggctggccaacagcctccacaaatgccgatttgccaacggtgttcacactgcggatataaaagtaataatcatggcccggtttgatattgatactggcggctatccagtacagccccgtgccaaggtagcgggctgtggtttcaacctgcctgatatcggtaatccgcgtttccgaaaaccagaactcaaactgtaccgtcgggtcatacaccgcaagacgcgggaccgctgttatctgaaaatagcccggtgtcagctcaatcgtggcgggtaccgcaggtgcattaatcctgaacgtggtggtggccggttccccctgctggccataactgttaattgccctgactgtcagggtgtattccccgagcggcagaccactgaaacgatgctctgtatccgcagtgatggcggtggtcaccagacggctgtcctgaccgcttccactggtcaggcgcagactgaagcgcacgcccttcaccacccgcggcgtgtcccatttcgcctgcgccagatactggctgtcagctgcactcacctccaccgtcaggtgctgcactgccggtgggataacgctgttcagggtgcctgactgcggctcaaagctggccccgttatccacgatggcttctttctccggcacatgctgcactgccgtgatggcaaaggtaccgtccgtgttttcccggatggaaacacagcggaacaggcgacgacgcagtgacggcagggagagtccccatacaccgtatgtctccacaccatcaggcagggtgctgacctgtatccggtccggcgcggggtgtgcagtgatggccacgctcaccggcttaccgctgccgttaatcaggttcaccgtggcggcacctgtctccggcagggtcacctcacggtccagtgtcagggtgcggctggcggcatcgatggacaggatacgtccgccggtcatggtcccggcatagtcgttatcacagatttcaataatgtcaccgggtgtgtgacgcagcccctgtgacccgagcgtgaaatccaccgtctgcgtttccagcagtccggtctttatcacccacagcccggcacggtgggcctgaccgcgactggtgcaaccgaacgcatccatcttcagcaggttgcgcccgtagcgcagtatggcttccgggtcttccaccagttccgtggaggtctgccagccgttatgcgggtcggtgtaattcacctccaccgccgtgtggcggtccttcagggcgctgaagctgtagagaaaccccacgccgttatcatccaccaccacatcgcagttggtgtacggccacaccacatccgacgggcggtcctgaacgaacgtcagcgtctggccgttccataccggcatacagcgcatcgccgagcagaaatcactgaga

SEQ ID NO: 655 - DNA, 52 bp, Escherichia coli
  Strain O55:H7
cgcacagacgctgcataagtttttttagtatgttcatgtcattctcctgttc

SEQ ID NO: 656 - DNA, 204 bp, Escherichia coli
  Strain O55:H7
  modified_base (116)..(117): a, c, g or t
actgcccacttcatccagccccttgacatcctgccacggcccgtcaccaaacctgacctgcaaatgctgaaaaaacccctgaacctgtgtggcatctttggggtcaagaaaggtcnntccggtgatgagcgcaccatctgtacccgggaaccagccattgctgtttgtctcaataatgctcgccggccccagacgaaaacggat

SEQ ID NO: 657 - DNA, 78 bp, Escherichia coli
  Strain O55:H7
ccaccgggccagccgcacctgtttctcctttcggtccctgtgggcctgccgggcctgccgcaccggtatctccctttg

SEQ ID NO: 658 - DNA, 21 bp, Escherichia coli
  Strain O55:H7
gctctcccctgtcacctttcg

SEQ ID NO: 659 - DNA, 23 bp, Escherichia coli
  Strain O55:H7
ggaccagcatcacctgccggtcc

SEQ ID NO: 660 - DNA, 26 bp, Escherichia coli
  Strain O55:H7
ctttggcccgggaggtcccaccacgg

SEQ ID NO: 661 - DNA, 23 bp, Escherichia coli
  Strain O55:H7
  modified_base (2)..(3): a, c, g or t
  modified_base (11)..(12): a, c, g or t
anngcctcttnngccgctatcct

SEQ ID NO: 662 - DNA, 135 bp, Escherichia coli
  Strain O55:H7
  modified_base (31)..(34): a, c, g or t
  modified_base (46)..(47): a, c, g or t
  modified_base (60)..(61): a, c, g or t
  modified_base (64)..(65): a, c, g or t
  modified_base (67)..(68): a, c, g or t
gttccgctgactgtgcgctttctgctgactnnnnggctttttctgnngcggtcgttgcannccnngnngcattaccggctgcactttctgccgtctttcttgacaattcagcttctgctgcactttgtgatgact

SEQ ID NO: 663 - DNA, 117 bp, Escherichia coli
  Strain O55:H7
  modified_base (88)..(91): a, c, g or t
  modified_base (93)..(94): a, c, g or t
gcatcctctgactgctttgctgaggctgcactttctgccgcctgccgggctgactccgatgcctcccctgctgaagtgtcagcatttnnnncnntctcttctgcctgactggctgat

SEQ ID NO: 664 - DNA, 83 bp, Escherichia coli
  Strain O55:H7
  modified_base (71)..(72): a, c, g or t
ggcattcctcgctgacgtctccgcctctccggcattcttcttcgcctcctcagcgtgacgcgccacctctnncaccatcagtt

SEQ ID NO: 665 - DNA, 155 bp, Escherichia coli
  Strain O55:H7
tcctccgacatggcaccgagaaaatcattcagcgtaccgggttgagaatcttcatacacggtgatggtcccggcatgtgacggcgggaatccttccaccaacagaatgacgctgtactgaccgtactcaacgtccatgctgtaacgaccggcttc

SEQ ID NO: 666 - DNA, 95 bp, Escherichia coli
  Strain O55:H7
  modified_base (54)..(54): a, c, g or t
  modified_base (89)..(90): a, c, g or t
accgtgttcaccaccaccgtgctgctggtccgtctggctttcagttgaatggtncagttctctaccggttttcctgtgccgtctttcannacacc

SEQ ID NO: 667 - DNA, 2 bp, Escherichia coli
  Strain O55:H7
tt

SEQ ID NO: 668 - DNA, 13 bp, Escherichia coli
  Strain O55:H7
  modified_base (2)..(3): a, c, g or t
cnntattcacccc

SEQ ID NO: 669 - DNA, 35 bp, Escherichia coli
  Strain O55:H7
ctggctaatcagaacttataaccgacacccacgat

SEQ ID NO: 670 - DNA, 76 bp, Escherichia coli
  Strain O55:H7
  modified_base (61)..(62): a, c, g or t
  modified_base (64)..(65): a, c, g or t
ccactgccggagccttcataagcgacatcaacggccactgattcggtcgggttaaactgcnngnnagccccccacg

SEQ ID NO: 671 - DNA, 71 bp, Escherichia coli
  Strain O55:H7
  modified_base (11)..(12): a, c, g or t
  modified_base (38)..(38): a, c, g or t
  modified_base (54)..(55): a, c, g or t
  modified_base (62)..(62): a, c, g or t
  modified_base (69)..(70): a, c, g or t
cacttccggtnngcacgtcgtgcgttttcctcttgttntcagttacgcgaagannatccccngagaaannc

SEQ ID NO: 672 - DNA, 23 bp, Escherichia coli
  Strain O55:H7
  modified_base (21)..(22): a, c, g or t
tacccgccatcgcatacgcgnng

SEQ ID NO: 673 - DNA, 23 bp, Escherichia coli
  Strain O55:H7
  modified_base (16)..(17): a, c, g or t
  modified_base (21)..(22): a, c, g or t
agacggccccgccatnncgcnna

SEQ ID NO: 674 - DNA, 231 bp, Escherichia coli
  Strain O55:H7
  modified_base (11)..(12): a, c, g or t
  modified_base (25)..(25): a, c, g or t
  modified_base (105)..(108): a, c, g or t
  modified_base (158)..(159): a, c, g or t
  modified_base (171)..(172): a, c, g or t
atgccagcggnnatcgctgtaacgngtcagctggcgattcttgtctcctgcatagctgaatgacgtcaccagccccagtgtgtccgtaaactcataacggtattnnnngttaatcccgttcagatcatcgctgccgggaacgttcgtcgaggcatgannataccccgcgcnnagcgtggactgatgttcagatgcccatgcaggcgcaccggatacagccagacaaatggc

SEQ ID NO: 675 - DNA, 31 bp, Escherichia coli
  Strain O55:H7
  modified_base (3)..(6): a, c, g or t
cannnngtttacgcataattacctctcgctt

SEQ ID NO: 676 - DNA, 401 bp, Escherichia coli
  Strain O55:H7
  modified_base (295)..(296): a, c, g or t
ggcgcccgtatatgggttataaaattcagctgatactgatgcctgctgtggattttttcatcaccacaaccagcagatcgctgatacttgctgtgggataccagttatttaccagccatgctgacaccgaaaactccagcgtcatgtgaccgtgaccggcaggcatatcaataacgccactgtaaatcagcgtattatccagcgcggtacggttataaatttcagcaccgtttttccgcactatcagacggcatgaggagtaaatatcagtatgctctctctcatgtttagcgcnnctgaatgccaccgccggaataacaatttgccggtcaaacggctgatcgtcataaaccctgacggtaatggtccctgatggccaccgctccggtgcacgggaatcc

SEQ ID NO: 677 - DNA, 168 bp, Escherichia coli
  Strain O55:H7
  modified_base (3)..(4): a, c, g or t
  modified_base (16)..(17): a, c, g or t
  modified_base (49)..(50): a, c, g or t
  modified_base (114)..(115): a, c, g or t
  modified_base (166)..(167): a, c, g or t
ctnngcccactgtttnnacgagatcgccttcaatctggttcgcggacanntttcccagaacccgacagttctcgttaatcgtgacgttgttgagcgtcccggaattcgcattcnngttaccgctgatatcagcatttcttgcggtcagactgccctccggcgtcanng

SEQ ID NO: 678 - DNA, 23 bp, Escherichia coli
  Strain O55:H7
  modified_base (11)..(12): a, c, g or t
caaacagccgnntcaggaacaca

SEQ ID NO: 679 - DNA, 25 bp, Escherichia coli
  Strain O55:H7
  modified_base (9)..(10): a, c, g or t
  modified_base (16)..(17): a, c, g or t
aactgattnncctgcnncacaaata

SEQ ID NO: 680 - DNA, 148 bp, Escherichia coli
  Strain O55:H7
  modified_base (146)..(147): a, c, g or t
caatacggtcagccagcagcagtatgttgctcaggggctggccatcagtatcctcaatccccgctccaataccggcaacatagggaatgccgtctttcgttttttgaaccttcagcatgtacagcgcagccaggtcatcatttgtnnc

SEQ ID NO: 681 - DNA, 27 bp, Escherichia coli
  Strain O55:H7: Synthetic oligonucleotide
  modified_base (3)..(4): a, c, g or t
gcnntatctgctgtatggtggcgctct

SEQ ID NO: 682 - DNA, 90 bp, Escherichia coli
  Strain O55:H7
  modified_base (17)..(18): a, c, g or t
  modified_base (25)..(26): a, c, g or t
  modified_base (28)..(29): a, c, g or t
  modified_base (33)..(34): a, c, g or t
ttcggtgatggtggtcnncatctcnncnntctnntccgcaagctggctgttgtctatcagctcccacagcccctgagccagatgcagttt

SEQ ID NO: 683 - DNA, 23 bp, Escherichia coli
  Strain O55:H7
aaaaattccagatacccttcacc

SEQ ID NO: 684 - DNA, 27 bp, Escherichia coli
  Strain O55:H7
gcccgctgatttccacaaacgcagatt

SEQ ID NO: 685 - DNA, 23 bp, Escherichia coli
  Strain O55:H7
  modified_base (4)..(5): a, c, g or t
tttnnacctgagatatgtctgcg

SEQ ID NO: 686 - DNA, 65 bp, Escherichia coli
  Strain O55:H7
  modified_base (3)..(3): a, c, g or t
ganaaccagaactcaaactgtaccgtcgggtcatacaccgcaagacgcgggaccgctgttatctg

SEQ ID NO: 687 - DNA, 281 bp, Escherichia coli
  Strain O55:H7
  modified_base (79)..(79): a, c, g or t
  modified_base (122)..(122): a, c, g or t
gcccggtgtcagctcaatctgtgacggcgctgccggtgcggcaatccggaacgataccgacgccggatcgccctgctgnccccacgcatttrccgcccggactgtcagcctgtagttccccngcgccagttgcgtgaagcggtatgtggtttccgtcgtccgggccgtgctgaccagccgctcactgccgtcatccgcgaccacggtcaggcgaagcataaagctcacgcccttcaccaccttcggcgtgtcccatttcgcctgtgccagatactgaccgt

SEQ ID NO: 688 - DNA, 97 bp, Escherichia coli
  Strain O55:H7
  modified_base (10)..(11): a, c, g or t
acctccaccnncaggtgctgcactgccggtggrataacgctgttcagggtgcctgactgcggctcaaagctggccccgttatccacgatggcttctt

SEQ ID NO: 689 - DNA, 160 bp, Escherichia coli
  Strain O55:H7
  modified_base (64)..(64): a, c, g or t
ggtacgtgctgcaccgccgtgatggcaaaggtaccgtccgtgttttcccggatggaaacacagnggaacaggcgacgacgcagtgacggcagggagagtccccatacaccgtatgtctccacaccatcaggcagggtgctgacctgtatccggtccggcg

SEQ ID NO: 690 - DNA, 183 bp, Escherichia coli
  Strain O55:H7
  modified_base (83)..(84): a, c, g or t
ccggcttaccgctgccgttaatcaggttcaccgtggcggcacctgtctccggcagggtcacctcacggtccagtgtcagggtnnggctggcggcatcgatggacaggatacgtccgccggtcatggtcccggcatagtcgttatcacagatttcaataatgtcaccgggtgtgtgacgcagcc

SEQ ID NO: 691 - DNA, 156 bp, Escherichia coli
  Strain O55:H7
  modified_base (5)..(7): a, c, g or t
  modified_base (24)..(27): a, c, g or t
cgtgnnntccaccgtctgcgtttnnnncagtccggtctttatcacccacagcccggcacggtgggcctgaccgcgactggtgcaaccgaacgcatccatcttcagcaggttgcgcccgtagcgcagtatggcttccgggtcttccaccagttccgt

SEQ ID NO: 692 - DNA, 182 bp, Escherichia coli
  Strain O55:H7
  modified_base (113)..(113): a, c, g or t
gcgggtcggtgtaattcacctccaccgccgtgtggcggtccttcagggcgctgaagctgtagagaaaccccacgccgttatcatccaccaccacatcgcagttggtgtacggncacaccacatccgacgggcggtcctgaacgaacgtcagcgtctgsccgttccataccggcatacagcgc

SEQ ID NO: 693 - DNA, 44 bp, Escherichia coli
  Strain O55:H7
cccatkccgtagcgckggtgrgtcagcatgtcccacaggcacca

SEQ ID NO: 694 - DNA, 107 bp, Escherichia coli
  Strain O55:H7
  modified_base (76)..(76): a, c, g or t
gtatgccggtttcaggctgccgtcccagataccgctgtamgtgcgtttttccgggtcatagtttgacggtacctgnatgatgcgaccgcggatatggtagttcaccg

SEQ ID NO: 695 - DNA, 126 bp, Escherichia coli
  Strain O55:H7
ctgcagccccacaatcgccgtgttcgggtagcactgtttcacatcgatgatttcggtgtatgacgaccagagcgtcttattctgcagctggtccggggtgctgtccgctgtctcccggaccatccg

SEQ ID NO: 696 - DNA, 128 bp, Escherichia coli
  Strain O55:H7
aggtggtcttgccgttaatggtgacatccttttccgtcacccagttaccgttacgctgcaactgaatcagcagtcggacagaagagggattacggtcgccctttgaggtggtctccaacagtgactgc

SEQ ID NO: 697 - DNA, 70 bp, Escherichia coli
  Strain O55:H7
  modified_base (18)..(18): a, c, g or t
  modified_base (26)..(29): a, c, g or t
tcacttccacgcccagtncggtttcnnnnccggaggactcaaagccttcaggtggtgtctgctcctgctc

SEQ ID NO: 698 - DNA, 81 bp, Escherichia coli
  Strain O55:H7
  modified_base (25)..(27): a, c, g or t
  modified_base (57)..(58): a, c, g or t
  modified_base (75)..(75): a, c, g or t
  modified_base (79)..(80): a, c, g or t
caggattaccgtccgtgtccgtcannngggttttgttcaccagaatactctgcagtnncttcaccggaccttccnccgnnc

SEQ ID NO: 699 - DNA, 25 bp, Escherichia coli
  Strain O55:H7
cttcatcacgggtgctgatgtcctg

SEQ ID NO: 700 - DNA, 129 bp, Escherichia coli
  Strain O55:H7
  modified_base (3)..(4): a, c, g or t
  modified_base (29)..(29): a, c, g or t
  modified_base (115)..(116): a, c, g or t
  modified_base (120)..(123): a, c, g or t
  modified_base (126)..(127): a, c, g or t
cgnnaggcaccggcatcgggttcccctgngcaatcatgttatccagcgaggaaaagtacgtgttctgtctgccgttatccgttgcgcggtaatccggtgtttttgccttcggggnnagcnnnnggnnca

SEQ ID NO: 701 - DNA, 33 bp, Escherichia coli
  Strain O55:H7
  modified_base (4)..(4): a, c, g or t
tganaacagcatcgtggtggcagaaaaaccacc

SEQ ID NO: 702 - DNA, 51 bp, Escherichia coli
  Strain O55:H7
gaaccccataacgccattgatgccccggcagtgaagaaagagcccacgatg

SEQ ID NO: 703 - DNA, 47 bp, Escherichia coli
  Strain O55:H7
cccccagcacaatctgcagtccaccctttccggccccggccagtcgc

SEQ ID NO: 704 - DNA, 29 bp, Escherichia coli
  Strain O55:H7
  modified_base (26)..(27): a, c, g or t
agacgggcgtacaccgcctccggtgnngt

SEQ ID NO: 705 - DNA, 48 bp, Escherichia coli
  Strain O55:H7
ggctgaggcggcggccaaatcgttgtaaatccccgtgaaggcagatac

SEQ ID NO: 706 - DNA, 80 bp, Escherichia coli
  Strain O55:H7
  modified_base (18)..(19): a, c, g or t
  modified_base (46)..(48): a, c, g or t
ttgccatttttcggaatnnctctcccgtttactcagttgttcaggnnnatggtgaagcagttcaccgttgccgcagtata

SEQ ID NO: 707 - DNA, 1 bp, Escherichia coli
  Strain O55:H7
a

SEQ ID NO: 708 - DNA, 54 bp, Escherichia coli
  Strain O55:H7
cgccaaagcagcacagcaggatatcgccaggctgtgcggaaggcagggaaatcc

SEQ ID NO: 709 - DNA, 31 bp, Escherichia coli
  Strain O55:H7
  modified_base (11)..(11): a, c, g or t
  modified_base (23)..(23): a, c, g or t
tgtccaggtanaggttctgaccnttgcgcca

SEQ ID NO: 710 - DNA, 50 bp, Escherichia coli
  Strain O55:H7
  modified_base (10)..(10): a, c, g or t
atccggcatntcagtccccgccagatgataagcatcccggaacagcgtgt

SEQ ID NO: 711 - DNA, 232 bp, Escherichia coli
  Strain O55:H7
  modified_base (8)..(8): a, c, g or t
  modified_base (29)..(31): a, c, g or t
  modified_base (112)..(115): a, c, g or t
  modified_base (139)..(142): a, c, g or t
ccgtcacnccgtgctcaaagcgccgtccnnncagatgtggcacacagcggaatttgtgaatgtcaccccggcagaccagccaccagggcagtgcgctttttatctgcagccnnnngtcagcctcgctcagccagggcannnnaccgggatgactgtggaccagtgccacaatctccccctgcatctctgcccgcagccagtcttccggtgcgatacgaaaatacgcctccgg

SEQ ID NO: 712 - DNA, 105 bp, Escherichia coli
  Strain O55:H7
agggatataccactccccctccggcgtgcttatcacgaagccgcacgactccgcaggcgcacaccgccgggcatgcgccagaatcgctgattcagtctgtgtcat

SEQ ID NO: 713 - DNA, 23 bp, Escherichia coli
  Strain O55:H7
  modified_base (6)..(7): a, c, g or t
  modified_base (11)..(14): a, c, g or t
  modified_base (16)..(19): a, c, g or t
  modified_base (21)..(22): a, c, g or t
aagttnnttannnnannnnannc

SEQ ID NO: 714 - DNA, 24 bp, Escherichia coli
  Strain O55:H7
ggttgtcgaactcatccgccactg

SEQ ID NO: 715 - DNA, 90 bp, Escherichia coli
  Strain O55:H7
  modified_base (55)..(57): a, c, g or t
  modified_base (81)..(81): a, c, g or t
gccccgtccgtctccgtcggtgtcgccagcacaaacgaggccgtcatggccgtcnnntctgacatctgctccaccacccancggtctctc

SEQ ID NO: 716 - DNA, 23 bp, Escherichia coli
  Strain O55:H7
  modified_base (7)..(10): a, c, g or t
tccggannnnccgccacaaaatt

SEQ ID NO: 717 - DNA, 143 bp, Escherichia coli
  Strain O55:H7
  modified_base (25)..(28): a, c, g or t
  modified_base (30)..(30): a, c, g or t
  modified_base (68)..(68): a, c, g or t
  modified_base (74)..(74): a, c, g or t
  modified_base (116)..(116): a, c, g or t
  modified_base (140)..(140): a, c, g or t
acacccggcggcggaccaccgtggnnnncnccaggctctgcaaatcctccgccatcccggtgacaagnccgaanagattggacaccgtcagcgacgggcgggcactgctgcccttnccgttcatctcaaagccactgccntca

SEQ ID NO: 718 - DNA, 45 bp, Escherichia coli
  Strain O55:H7
  modified_base (3)..(3): a, c, g or t
ccnctcaccgccctgcaccgtcaggtcgatttcccagagcaccac

SEQ ID NO: 719 - DNA, 61 bp, Escherichia coli
  Strain O55:H7
  modified_base (3)..(4): a, c, g or t
tgnntgctctgacttaaccgactcgttcaggctttcttcatgaatattctgcatcagttca

SEQ ID NO: 720 - DNA, 46 bp, Escherichia coli
  Strain O55:H7
aaccaccatgccaggataaaaattcatccagccagcgccgggttga

SEQ ID NO: 721 - DNA, 32 bp, Escherichia coli
  Strain O55:H7
  modified_base (31)..(31): a, c, g or t
cagccctgtggggcggcgctgttcataaccnt

SEQ ID NO: 722 - DNA, 69 bp, Escherichia coli
  Strain O55:H7
  modified_base (43)..(44): a, c, g or t
cactcacctgcatcccttcacgcgggaccagatgcagcgtttnnatctcagccactcagcattcctccg

SEQ ID NO: 723 - DNA, 66 bp, Escherichia coli
  Strain O55:H7
tggtcaatcagctgcacaagactgcctgccgcctccggccctatctgtccgttagccccgtcattc

SEQ ID NO: 724 - DNA, 23 bp, Escherichia coli
  Strain O55:H7
acaccagaccagcactgccgttc

SEQ ID NO: 725 - DNA, 84 bp, Escherichia coli
  Strain O55:H7
  modified_base (2)..(3): a, c, g or t
  modified_base (7)..(8): a, c, g or t
  modified_base (27)..(27): a, c, g or t
  modified_base (61)..(64): a, c, g or t
  modified_base (78)..(79): a, c, g or t
cnntcannccggccccttttgcaaacncaaagtacgtgggcgtgtccacaatgctgttgcnnnncgcgctcaggtttnncgagg

SEQ ID NO: 726 - DNA, 22 bp, Escherichia coli
  Strain O55:H7
  modified_base (18)..(18): a, c, g or t
  modified_base (21)..(21): a, c, g or t
ccgtttgccgccgtcttnatnc

SEQ ID NO: 727 - DNA, 25 bp, Escherichia coli
  Strain O55:H7: Synthetic oligonucleotide
gcattcataagaacttttgatattt

SEQ ID NO: 728 - DNA, 40 bp, Escherichia coli
  Strain O55:H7
  modified_base (3)..(4): a, c, g or t
  modified_base (16)..(17): a, c, g or t
  modified_base (24)..(25): a, c, g or t
tgnnccattccacttnntttccgnncagcatctccgtgat

SEQ ID NO: 729 - DNA, 45 bp, Escherichia coli
  Strain O55:H7
  modified_base (34)..(35): a, c, g or t
gctgcctgtgaggcgtaatcggacgcattatccnnccagttactg

SEQ ID NO: 730 - DNA, 40 bp, Escherichia coli
  Strain O55:H7
  modified_base (34)..(35): a, c, g or t
ttctgccagtccgcacgctgcacatccgattcgnnataaa

SEQ ID NO: 731 - DNA, 95 bp, Escherichia coli
  Strain O55:H7
  modified_base (89)..(90): a, c, g or t
gcctgtctgtaaaaatcctcactgttatccccggtctgatactgagactgaaggtccgcatccttctggcggaagctgtcgcggatctnntgcaa

SEQ ID NO: 732 - DNA, 31 bp, Escherichia coli
  Strain O55:H7
ccctgcccgtaccccagcagttcagattcat

SEQ ID NO: 733 - DNA, 83 bp, Escherichia coli
  Strain O55:H7
  modified_base (47)..(48): a, c, g or t
  modified_base (58)..(59): a, c, g or t
ccgccagtgccagttgctctttctgctgcttcagcagccgggaaaanntgtcttccgnnttttccgtctctgattttccaccc

SEQ ID NO: 734 - DNA, 105 bp, Escherichia coli
  Strain O55:H7
tttgggtttattcgcctcgttattgcgccaggcttccagggcattactgatataacgttgtctcgcctcctgatacggatcacccacaaaaccgaggtcatccgc

SEQ ID NO: 735 - DNA, 19 bp, Escherichia coli
  Strain O55:H7
  modified_base (2)..(3): a, c, g or t
anngggccagctcacgctc

SEQ ID NO: 736 - DNA, 99 bp, Escherichia coli
  Strain O55:H7
  modified_base (4)..(6): a, c, g or t
ctcnnntgtttatcatccagggtggcctgtggcagccgtaacggcacattcaccagtccctgccgctgctgaagcagttcattccccagccccagcaga

SEQ ID NO: 737 - DNA, 21 bp, Escherichia coli
  Strain O55:H7
  modified_base (2)..(2): a, c, g or t
cnaaagtaccgggccaccccg

SEQ ID NO: 738 - DNA, 26 bp, Escherichia coli
  Strain O55:H7
  modified_base (4)..(5): a, c, g or t
ctgnntgaactgggtgatcaccgagc

SEQ ID NO: 739 - DNA, 39 bp, Escherichia coli
  Strain O55:H7
actggcaccggatattttcagccctgtcgaaatggcctc

SEQ ID NO: 740 - DNA, 22 bp, Escherichia coli
  Strain O55:H7
gtaaccatattcacgcatcgag

SEQ ID NO: 741 - DNA, 24 bp, Escherichia coli
  Strain O55:H7
  modified_base (22)..(23): a, c, g or t
cagggccgcattatccgaaaannc

SEQ ID NO: 742 - DNA, 23 bp, Escherichia coli
  Strain O55:H7
  modified_base (14)..(15): a, c, g or t
  modified_base (19)..(20): a, c, g or t
ctgtccgctggctnntatnnatc

SEQ ID NO: 743 - DNA, 29 bp, Escherichia coli
  Strain O55:H7
tttcagacgggcattcacggaactccact

SEQ ID NO: 744 - DNA, 23 bp, Escherichia coli
  Strain O55:H7
agagcatggcgtccttcagtgca

SEQ ID NO: 745 - DNA, 55 bp, Escherichia coli
  Strain O55:H7
  modified_base (39)..(40): a, c, g or t
  modified_base (43)..(44): a, c, g or t
gaaaaccgctttcacgatctgtgcattacggatatcccnncgnncatcacccagc

SEQ ID NO: 746 - DNA, 24 bp, Escherichia coli
  Strain O55:H7
atcatcgcctcgctcgcactcagg

SEQ ID NO: 747 - DNA, 3191 bp, Escherichia coli
  Strain O55:H7
  modified_base (165)..(166): a, c, g or t
  modified_base (1124)..(1126): a, c, g or t
  modified_base (1129)..(1130): a, c, g or t
  modified_base (1150)..(1153): a, c, g or t
  modified_base (1813)..(1814): a, c, g or t
  modified_base (2013)..(2014): a, c, g or t
  modified_base (3185)..(3186): a, c, g or t
tacttttttctggccgactctgcatcagcgatcagttccagtgcctgacgcagcaaccgggcatgtaccggaccatagacggccagcacctgctcacggtcgtccggagtgaacacccgttgcaggtcaatatcacacaggacatcgcagaacagcgtcacatcnncttccaggttacggcgggttttcgccaccaccgacagggtatcgtcatcctctccatcaccattgagcacttcctgccacagataccaggcctctgccgaaggctcccgcagcaccacgctgacatttctccattccggcaccttcaccgttttatgacggaaccccgacagtctggccagcgccagtgttttcagatcttttgccataagccttatccgcccgcaccattaaccgttactgtacacgcatcagaggtaatgctctgcggctgttctgcagaatccgttacctcgcaggtataagcccccttatcacctgactgcgtattggctttactgaaagtgtcagtagtctgtccctctaccggctgaccatccttcttccaggcgtgtttataaggcggcgttcccccgttgacactgactgacattgtcagcagcgcaccggtattcatggtaagtgtcttctccggatttttcacaaacgccagcggtaccacataggacaccggtttacccttcaggcgaagtgaaaacgttgcagccaccacgccgttggtaccggatgaccaggtgtgctgacgcacttccgccaggaacttaaagcccttaccggacggaaactgcaccttaaacgcatacaccgtgtcattgtcataggcatcacgcagggcgttctgggcctgattcagataaaaattacccgacatggaaatctcggacgacgcccccagaccgttgatgttctcctgctctgtggagcagagcgtggtcacatcaatatcctgtttctgaccggcggtgaactggacttccttgatggtgcagtccaggcgcagatattccgccttatccatagtttcagcagtcgccggggcagatgaaatcatcacctgcgtcagctgtgagcgttcatacaaagcagacattctgcctcctgataataaaaaacccgcnnncgnnggggtatgggttttgtagannnnaaagaaaaagtcacaccgtgacctgaaactccagggttgcacggtaacagcggttttccggaatatagtcctgcatttcactgacggatcccggggccagcagcattatggcttcacgggcgtcctgacgtatctgacgcgcctgcgtcacagtcccggcataaacgtctatctgcaccgacactgaggactccgcctgcccgcccatcacgtccgccgacaccgatgaaatcaggctgaaaaccacccacggaagcgccaccgacggcctgccatccagcagggggaccacatacgggtacacctgcccgccggcaagatgcgccagataaggatacaaatccacctccgtcatcgtctcagtatctcatcaatggcccggttcatccgcgcaatcgccacctgagctgcctgttcactgcgcacatcaaacgccgggcgcacaaacgggtgcggtggcatattcacggtccccatttccacaaaccgccagtagaaagcgttgcgcgggttatccgccttcatggtgttatcgctgttaccggtgtccggattaacaccacggatatggacaccggattccatcccgccatcgcgggagcgccgggaaaggaccaccacattgcggcgcagttttcccctgcgtaccggtgcccgtgnnaccacttcttctttcagcacattcgcacccgcacgggttgcctcacgcagcacccggttattttccgcaccactcagaagctgcaaatcgcggctgatgtcctccagccccgaaaaatccagcagggtttcgatcatttttcccctcccagccgacagagaatttccagacgcccgccggtcgcatccggcacgggcannccgacaacgttcaggatccggtcacgccatggaccactcagcacatgaagtcgtgacgctgccgtgatttcccggccggactgaccgcgcacccagatgcggatttccgcctgcgccatttccgcaccggactgcatccgctcccggctgctcctgccacggatatccgcatgaattttcccgcatgacacccattcttctgtcatttctccggcagcattacgggttaacaccggcttcagaacacttatcatctgtgtcagacgacctgcagatattgccattcctccctcctcataacaccgtcggacaacgcaaatcgtaaatcagcacggacacagaaaacggcagttccccctgcacgaggtcttcccgctcagcaagatccggattccggtacagcatcccggtcagtcgcatggcagcccccttcatccgggttaatgcctcgcccgggatcagctcaccgtcctcactaatcactttatcccggctgccctgaatgtaggccagcagcacggcggtagcctgacgaaccttgtccatcagcatgtcatcatccgcgtcatggtcaacacgcagatgtgccttgatctcttccagtgtcagtaatgccgtcattttccgcctcctgcatcccgtccacgttttgcagccagggtccagcctgatgaatgagcttctccgggtttatcaccggtcatactgttgcagtgccacagcgagcccccccacgtcaccgtatcaccggggtggtaggtttcaccggctctgaacacaccgcggtagagcatcaccggcagggaaaatgttttttccgtacgctggccactgctgtgccggatcaccacagagaacaaccgctcccccgtcatactgacgtcaatatccgccaccccgtcaaccaggcattcccatccccgcatcccgtgcgttttttcatacgcccgccagaatcctcccaggtgtgtggcatacgtgccccggggaaaggatttttgatcgtcaatagcggggagcacttccagagccgtggcatcacgcccgtcctgcggagccggcagggcattcaccgcctccagaaccgccttccgcagaacatccggatcgtaatcacgaccatcacgcggagcagggatatggcttacagcctctttcaccatctgctcanncatcg

SEQ ID NO: 748 - DNA, 4185 bp, Escherichia coli
  Strain O55:H7
  modified_base (2)..(3): a, c, g or t
  modified_base (4041)..(4041): a, c, g or t
  modified_base (4112)..(4113): a, c, g or t
annatcgggggtgatacttttgccgtctgccggcaccggtattttcgcgaccgcatcattcaccgcctgcttcagtacttccggatcgtagtcacgaccatcacgcggaacaggaatatggcttaccgcctctttcaccatctgctcaagcatcggacgcacatcatccggggtgagacttttgccgtctgccggtacaggaatgctcccgacagcatcattcaccacctgcttcagtacttccggatcgtaatcacgaccatcacgcggagcagggatatggcttacggcctctttcaccatctgctcaagcatcggacgcacatcatcgggggtgatacttttgccgtccgccggtaccggaatattcgcaaccgcatcattcaccgcctgctgcagtacatccggatcataatcacgaccatcacgcggtaccggaatggtccccacagcgtcatccaccatcgcctgcagaaccgggatgtacctcatccaccgtcacatgcttctgtaataccgccgacagggaagccagtttctcttcaaacgcttgtgcctgcgcggccatcttctcctcaaatgtgcgctgtaaatccgccagcaccgtggcgaattcttctcccagtgcacgaataatggacagttcccgttccgtcattttcgcagtatccccctcaacatcgctttcaccgcaccatgctctgtttcactgattgccttattaccgtcagatgcgccgtcaggcagttgggctgaaactcttttcccggacgacgcaaacggatcttcacgggcatcacgacgggacagcgcctccagactgtagttctgctgctgaagatacagtgcatcacctcccgcaaggggcggcaggttctcacgtttacgggcctcattgggcgtgagaagcgtatttttcaccgactcacccagcgttttcatgcgccgttcgctgtccattctcagcagcgtggtgacgtcaaactccgtactctcgttttcccccgtttccagcgcctcatccagtaacagttcaatggactcaatcagcgtctgcaggcactgggaataatactgctgctccagcgcctccacgttgtcactggaaggtggctggccaacgccaatcttgtaggccgggacacggaacaccgaacagacaatttcagcggtcatcttcagttgttccaccgtctgcgcatccaccggtgaaaacgtcgtggggttgtattttgccccgttgctcaaaatggccgttttccccgcattttcgccggtatacccgctgtcccagttgctcttcagttttttcgcattttcttccgtaatactgccggggatctcaatcaccccggacggcctgccgccatttctgaaaaaagacgtcgaattttcctgaatatgatgcccctgcgtggccgccagcccggcggcatacaccggcggcagccccacaagcggatgaaaaaaacagttaaaccggtcgtggatcacttcccgggcaggcaccgtcaccgcctccgtgatcccgcagttccggtccggcgtgatgcgatagaacacctcgccgtcatccgccaccagaggttcaacccggctccagtccagaatacgcagttctttgatctgcccccgggagttacggattttcagcaccaccgtattgccgtgacgcagtttggcgttcagccacagttcaaaaaactggatacgattctgctgtgcattgggacgacgacagagacgggcaatatccccctgccgtttttcacagcggatcccctgtgtatccgtctgcatcaggcgcagccgcattttggcgatatcctgggatatcagcgaaatgcaagaaaacaccgcatgaaaggagaggacactttccggatcggctttcacaccctgctgccaggcgccggcaaagggctcagccaccgcctgaaacaggctggtccagcccacctcttttacatcacgtcctgatttctggttttttcgggttcgtcgcaaaaggttccacattcgctatgctccgcatcatgtttctttttctgacccgccggacgtcgcgctgtgatgtactccgcctttcccaggcgaaccagcacctccgcacacggctgtgcgacatcccggatatccccgggccgggcatcatgtgtaccctgcagatatcggatttttgccatcagttactgcgggacgctctcacctcccgccctcctcatcagactcagccgccggacgcactgccgtagttcacaccggtgatcacagccaccgccgcagtacggcgacgacgccagttgatccagcgctccgcacggatggccacgctgccggtctggaacatggaaaccagctccaccggcgacggtgtggtgctgtcgccgcccggctcagactgcatttccagtgacgcttcacgggacatatccactgccacaccgccgtcatccgccagataaatatccggtgcattcaccagtaccagctggtcacccacatactgggagacaatcaccggaagcccctgaaaggtcccgcccagcagggtcatgtccggatattccttctgacccagcgcatttttacgcatggacagcgccagggcattcgtgctggacatcagccagacagcaccagtgggctgcagatttgccgtcacaaactggccaaacgcggcctcggcatccgcatccgggttaccggttgatgccgtgcccttcacatcatgggtgatggacgccggggagacatctgccactgcagcttttttcgggtccacaaagtctgtgtccagacgcgccaccaccgcttctgccagcgcattacggaccagtgcatcagctgccggactggaaaagcggatcagctcttccgtcagtaccgcaatggccgacaccttcgcatgactgaaggtgatggactcaaaatcaaacttcgtcaggggtctggccttaccctcccccacccagccggcagcaccgccggacacctgggcatgcacgcggatattgaacggcaccagacgaagtgcagggatcccgccctgaccaaatcgcccgataatggtctgcggacgcaggtaatcaataaagtcctgcgcatattcctgatattcagacaggctgcctgcccactgtgggtccgtggtggtccctgcccccaccgccgatttcaggacatgatgcagacgactgtcatccggatactgacgacgggccacttccagggcttcagagcggacacctttagccgcggccagwgatttggcaaagcgggcgaaaccaatccccttctccagtttctgctcaacacagatcaccggcgctgaagccaccgtggccacattcccgttaccggcctgtttcaccggctgtgccgtggcggccttactggtttccagttcacgcagacgcttcaggtgcgcatccacctgacggatttccgctgcggtgttgtcgtagtgctcttcctcttccacatccagtgtgcggccttcctctgcggctttgttcatgatctcctcaagggaggctgccagcgccgcacgcttgttttcaaaacttttaatctgttcaccagtattcattgctgacttttccttatgaaaagaggttattgactgtgccgaagcgccggcagaagatgcgattttcaccaccggtctccggttgccggacgcggcagaaaacgggctgccgaaagatttaatggtccggatggtgcattccgcattcgcgggcacggtgacggcagacacctccatcagttcccagcgcagaaaatgcagtccgcctccgtccagataagtgtattcatggggccggaagcccacagaaagccccctgaccagcccggtcttaatggcagcccaggcttcatccagccgggcagccagctgcgacggcatatccggtacgggcttcaccagtgttgccgtgatttccagaccttcactgacccggcgtaccgtacactggcccaccggacgggaatagtcatgctgccagagaaacgggatcgcactgccaaactccnccccctccggctccaggatgtcaccatcccgatccggagaaggcgttgacgcaatcccggtgatcacccgnncatcctcactgaaggatttcaccgtcagcagggaacaggcccgtttaagagtcacatcagcctcctgaaaat

SEQ ID NO: 749 - DNA, 5411 bp, Escherichia coli
  Strain O55:H7
  modified_base (899)..(899): a, c, g or t
  modified_base (1765)..(1766): a, c, g or t
  modified_base (2543)..(2543): a, c, g or t
  modified_base (3404)..(3405): a, c, g or t
  modified_base (3407)..(3408): a, c, g or t
  modified_base (3678)..(3679): a, c, g or t
  modified_base (3748)..(3749): a, c, g or t
  modified_base (5288)..(5288): a, c, g or t
  modified_base (5352)..(5353): a, c, g or t
ccgccgcagcggttcatgatggttacagggtgagcagggttatatgaaaaaaacctcatacgctttctttttcggttccggattcagggacatcagggacaccgcattgaagagcgccatcagcgggtcaatttttccccgtccgctggcctgtttggtgataagaatggcgttacctttaggctccacccgggcattgccaacgcaccaggccatcagtggctgaccaccatgcaccagcactccctcagccagtttgcgctcggtggttttgatggccccgcccagcttccagccctggcttatccccaccacactctcatcggggatcccggcttccgccagtgaatccagaatctgccccacacctgacgggtcaataccgatatgatccagtaactcagcctcatgaatacgacgcacatactccgccacttccgccgtgtcatccccgacccgacggacaatcgtcatgtctccacaggccacaaaatcctgaaaccgggatgcctcactcttccgtctgaccaccgcggtttcatgcacccaggcatggccccagcccagccattcgcgggtttccctgtcacggccaatcacgtacattcccagcagatcatccaggcccccgccgtcaatccccaccgtcaccacatcagcgcgctgcaggatatcgtccaggctgacgcgcctgccctgctgctcccagaaatccgcgcccgcccagcggtcagaacgcagggcaagaccgatttccacattggcgtgttttgacatgaagccacgaaatgcttcctcaccagcctcccgggctttacggtactcccggtacagaaaagcctcatccaccgaataaccgagattcgggttaaccatggcgaggttttccatcagcaggngagccccgctttccaccatttcaggaggatgctcaaaaatcaccggcagaaagtgcggatcatgaattttgccgtcacggacatcccgggcgtactgcagtttctgtctgaacaccccggcaggcggttcattcgactgggtggttgtgtacaccacaaatccttccggacgggaggcaagcccgccgatggcttcacgtagcatgtcttccgctttgtactgcttgccaaacagccacagttcatcaatcagtgtccccacggacttgataccggacaccgtattcggatcggctgccaccaccttcagggtggtgtccgtcacccgatgggtgatggtccggatatgtgtctgcacctgacagaggtcatccagatcatcgtcccgtcgtaccatatccctggcagggttgaaggcgttagccgccacctccacggtcggggccagaatggtgtagcccgccgcctgccgccagttcagtaacagcgccgtcatcatgatccccgcggccagcgtggacttactgtttttcttggggataaggataaaaacttccttgatatggcgtacaccggtctgcgcatcataggagccaaacagggccgccaccaggtcaaacacccactgtgcgcaggactccccgaacgtcgggctacccggtgcatccacaatccgcagttgtttaaaaatcgccagtgcatgtgcagcctggtccggataaatcggagccggaataatcgacagtccctttttcaggcgctctgcccagtccggacatgccgtgctccatacaggtatcatccgctttcctcattctggttattcaccaccagtcggggagatggtggcaccgaaaaacggttanncgcttttttcgcggcatcaccttttgccgattttttaccggcatcgccttttttatggtgtgtgaactgcgccagtcgccaggccgcatccagtgccagtttcgggtcaattatcaggttttccaccaggatctgccccatagctttcaccggatcgggaagaccatcctccatatattcaataccatgagatatcaccgcgggcggaggcatctccggatttgtttcgtccggctgtggtattgcagccacctcacggcgacggggtttatcctcctgctctgattttttctgccggtaaacaggaacctcatccacctccaccgtttcgcactgtttacgggctataaacgcgagcacctccggatcttttgccagctgcgagcctttaatcctggcggtcttcgccgaataaccggcggcaagggctgacgctgttttgtttttcccggacatgagcgccagcgcaaattttcgtttttgcgttgtcagcacagcctcctcccgggtccataacgcactcagccgggtatggttcagcccatttttcccggcgtctcatgccgcaaatgttaactgctgcctggttaacatttgctgaaaaagccagttaacatttttttcgcacaacaaactgaataataaagataaaaaccgaaaaaatgcccgggcagccagttaacatgttaactggcctgaaacaggaattttttctctgcatgagacggggggcggtgtccggggcgatcgtttttttcgccggatgatccccccccnggggcgggtcacagtccgatgatatcgtctgccctgccatgacctccggcagcgtcgggtccggcataccactcgccgtttcactgactgacttctggcgatggcattcggtacagagcgtccagagattcgtctcctcattaccaccaccgaactgaagtgcaatgcggtgatcgagttcactgtcacaaaggtcaaccacacgcccacagagacagcactgtccggcatccctcagccagatacgacgcttgagggaaacccgggcactgccactgacccgacgctgttcacccttcaggacattcacccgccgggtattcagagttttgattctgcccggtaacgtacgaagcacggccatgtaaaatcctcgccatatagcttgtcaccagaggaaagaaaatgtcaccgaaaaaccggacccgcagaacaacaacccgcaacatccgatttccaaaccagatgattgaacaaattaacatcgctcttgaccagaaaggttcaggtaatttttcagcgtgggttattgaagcctgcagaagaagattaattaatgaaaaatattctcaatttgtacccaacaaagacaaacacgaccagagcacctgttcagacaggtttacttaaacgacttatatatgacacaaaaagcgaccactaaagtcgctttttcttatggtaacaggcaataactctctcagatattttttagcatttttttgaccgcgcgtttccggacgtattctgttctcctgtccctttatatcgtcggaatacccgccgctcttcaaatcccattcccaactcagaatgtagtctgttgaccgcttgttttatttcggtcaggttcaccggtgnnannggagtccggcgcgccttacgcaaacactctgctcgtttctgtgccgccacttttcttttctggtcatcacttagctgtaccatcacttttgcccatcgttcagctgctctccggtacagtccttttttctccagacattctgccacgtgatcatgtagcataagtgacctccgattatctacagactgccatcctgaatttaccttcccttaatgaaataacaataaaaaacaaaccacgcaaaaacaataaaataacacacaaaaaaanntaaataataaacaaaaataatcaccttattttattattttttgagggggcaattactgaacaaaaaacnntgactatatactcaaaaccaaacaactattctgccaatcaggtatcatggcaacacacggaattaccgtgtttttgccttctctgcccatacaatacgggcatatacttcatactctattgtaatatttctatccatgcgccccactccatttacctgtaaataatattcaaaatatttatcacagaaatcgtttttggccatgaactgagcacactataaagtccggaactgactctttgttaaattaccttaatgttaccagtaacaccttcataacaaaacatcacggtatacactgggtacggatatattcctgtgctccttccagttgcttctgcattgccatcagccgttctctgaggatgaaataatcccgttcagcggcttctgccagtcggggaccggttgcattacccacgccggaggtgatgggggctttacgcaaggagcctggacagttggcgttgatgcgcaggcgcttacgaccagcggcaacatcagcacgcagagtttcattttcagctctcgcatcggctaattccctcgagtatctggcatcaagtgcagcgacatcacgctggcgtacctgcatatcagtaattgtcacgttcgccagcttcagctcactggcttttttatcgcgttgcgctttgtaggtaatggcgttatcgcggtaatgattaacagcccatgacaggcaggcgataatgcagataaccagagcggagataataacggttaccctgctcattgttgcccccacaaacagacttcacgctcaatctcgcggcgagtcatcagccctttccattgcttaccgccagcgtatgtccagcgccgtagctgatcacatgcgcctttgatatcgccctggtttattttgcgaagaagcgtcgatgttctgaaattgccagcgcccacgttgtaaacgaacgagtaaagagcgccgcgcgttgtttccggtatatcgactttgatgtacgggttaatttgtctggcgaccgtggcaaggtctttattcaggagggctttgcattctgcttcggtatacgttttaccgggcatgatgtcttttccggtgtgtccgtgacatacagtccatacgccaacgatatctttgtatggtatgtagctgacaccttccagaccatcgttaccacctggaccagtgatgagcacagacgctatggcaacagccccaccaccaatagcagctgcaacagccttgcgtaatgacggcgacattattcacctctcgcagccttacgcttatcttctttaatcttgaaataaagatttgtcagatacgtcagcaggccaaacagcagacttcccagcacacctattgccacccactgggacggagagactttgtccagcagctgcagtaaccagtatcccgtccccaccgctgacgtggtgtatgacacacctgttgtgattttttccatctgatgtatgtctccgtcaccgccgacagaaaatgaaagtaaagaaaaacaaaaaagccgccagtgtcacccactgacggccaacnccgggagccgtgattatggcattcaggctctgctaaaaatgccagataacattccggcctcccnntgattcaggttataaatgacacaatatcttgacaacatccgtcactgtctgtcagaaa

SEQ ID NO: 750 - DNA, 261 bp, Escherichia coli
  Strain O55:H7
  modified_base (4)..(4): a, c, g or t
  modified_base (13)..(13): a, c, g or t
  modified_base (68)..(68): a, c, g or t
  modified_base (203)..(203): a, c, g or t
  modified_base (237)..(237): a, c, g or t
ccanctatccttntgagccagcacctctycaccgaaagtcagtgctggctgtttttttccttaataangcatctgtaactgaaacaatccgcatattgataatatattgacaggcatcattgctgtctgtgaaaaataagtctctacaaacatataaggccttttagccagcgtcttctttcaggtcagtcgctggctttttntttattatgctgccggtgcatttatctccagcancagactttctatctcaacgccata

SEQ ID NO: 751 - DNA, 56 bp, Escherichia coli
  Strain O55:H7
  modified_base (4)..(4): a, c, g or t
ctgngtaaagtacgacatcaggaacggattaccggtacccgtcatcgccacaccat

SEQ ID NO: 752 - DNA, 49 bp, Escherichia coli
  Strain O55:H7
  modified_base (25)..(28): a, c, g or t
  modified_base (47)..(48): a, c, g or t
ctgccgccctgtgtcagcagggtannnncgtcatccaccggatgcgnna

SEQ ID NO: 753 - DNA, 140 bp, Escherichia coli
  Strain O55:H7
  modified_base (136)..(137): a, c, g or t
atagcggttgccagacgatccggaataatgctcctgcgcgcccatgaactgaaatgtgtcgggcggtttgatgatacctggtttccattcgttctcgatgccgcaccgtaatatcctgatgccggaatatccggannttc

SEQ ID NO: 754 - DNA, 257 bp, Escherichia coli
  Strain O55:H7
actctccctgtttttatacccgccgtacacggtgtcgtactgggtagcgtatgtatttttccagtaatacgtcgtgtcaccacaaacccacggcacatctgcagcactgccaccatggcactgcgcgttaaacacggagaggtcagcacgaaactgtgtcagcatggctgtaaacagcgcaggttgctgtgcgtgggtggcggcgctcatgtcaaactcaccctgcatccagcagacggccagcagaacgtttttgg

SEQ ID NO: 755 - DNA, 63 bp, Escherichia coli
  Strain O55:H7
  modified_base (60)..(62): a, c, g or t
ttgtgcgggaaatcagatcctgatataacggcttgcccaccccccagcgtgccgaatccnnnc

SEQ ID NO: 756 - DNA, 44 bp, Escherichia coli
  Strain O55:H7
gccctgggtaaatgccgaaccaccacgacagcatggtaccagca

SEQ ID NO: 757 - DNA, 42 bp, Escherichia coli
  Strain O55:H7
  modified_base (32)..(32): a, c, g or t
  modified_base (35)..(35): a, c, g or t
  modified_base (41)..(41): a, c, g or t
tcagcgtactcatatcctgcacatcatgcagncantggtcng

SEQ ID NO: 758 - DNA, 24 bp, Escherichia coli
  Strain O55:H7
  modified_base (2)..(3): a, c, g or t
anncccacccggcgtcactgtact

SEQ ID NO: 759 - DNA, 40 bp, Escherichia coli
  Strain O55:H7
  modified_base (2)..(3): a, c, g or t
tnntgcgcggatccggagcatcgtatgaatccggcagcgg

SEQ ID NO: 760 - DNA, 2 bp, Escherichia coli
  Strain O55:H7
ct

SEQ ID NO: 761 - DNA, 23 bp, Escherichia coli
  Strain O55:H7
gatgacgtagtaccaatccggct

SEQ ID NO: 762 - DNA, 26 bp, Escherichia coli
  Strain O55:H7
gcaatcgcctgcatcagggtataagg

SEQ ID NO: 763 - DNA, 196 bp, Escherichia coli
  Strain O55:H7
  modified_base (55)..(55): a, c, g or t
  modified_base (63)..(65): a, c, g or t
  modified_base (71)..(71): a, c, g or t
  modified_base (106)..(106): a, c, g or t
  modified_base (132)..(132): a, c, g or t
tgccagccctctttcagtttgtgtgtcagcttttccgcaaggtctgacggcgacnccgccctnnnaacatngtaatgtttaatcgacatcgaatttctcccrtgcnsaggaacagagttaaaaagccggaancggaatcaaatcacaggatgaccatctgccagtggctggtcgtaaaaaaaaggccgcgccatgc

SEQ ID NO: 764 - DNA, 122 bp, Escherichia coli
  Strain O55:H7
  modified_base (50)..(53): a, c, g or t
ataaagggataacgatgatagtttgagaaaaacagaaataacacttttgnnnnaaagcatggtgccgggtgcctcccggtgaattcagtatcagcacctgaatccacgattatcccatatac

SEQ ID NO: 765 - DNA, 299 bp, Escherichia coli
  Strain O55:H7
  modified_base (107)..(107): a, c, g or t
  modified_base (158)..(159): a, c, g or t
  modified_base (224)..(225): a, c, g or t
  modified_base (229)..(229): a, c, g or t
  modified_base (233)..(234): a, c, g or t
  modified_base (245)..(245): a, c, g or t
  modified_base (297)..(298): a, c, g or t
ccgcacagggggattcaccatgcagaagtgtttttaataaacagcaaacaaaaaaatcaagcattatgcaggctgtttctttttatcaccggccacagcaataccanaatgccgcagaccagccccccatccgccagcaccgacatgattctgctggnnaaatccaccatcaccaccagaaacagcaggagtgcagccacagtcaggcgcagttttaccgtcannggtnattnnccagacgaagncccagaacaccggcaatctcttccagcaccttgcgctcttccggctcaattnng

SEQ ID NO: 766 - DNA, 87 bp, Escherichia coli
  Strain O55:H7
  modified_base (2)..(3): a, c, g or t
  modified_base (31)..(32): a, c, g or t
  modified_base (86)..(86): a, c, g or t
gnncaccgccacatccagcacatcttccgcnncacgcgtatcgtgtttcacatcctcgatctcacgtaacgccgcacgacgaccant

SEQ ID NO: 767 - DNA, 64 bp, Escherichia coli
  Strain O55:H7
taatttctgacgtaaacgcggacagcgcaggctgattacgcagtacctgttcgatcttcgcttt

SEQ ID NO: 768 - DNA, 32 bp, Escherichia coli
  Strain O55:H7
ggcgttaatcaccacctgtgccagatcgcgtt

SEQ ID NO: 769 - DNA, 59 bp, Escherichia coli
  Strain O55:H7
aataccaaacatcgtgacgttcctttgggtgggtgagccaacgcccgggagcgatctgc

SEQ ID NO: 770 - DNA, 41 bp, Escherichia coli
  Strain O55:H7
  modified_base (8)..(9): a, c, g or t
  modified_base (17)..(18): a, c, g or t
tccgtaanntccccccnncccccccgaaaggctctgtggtt

SEQ ID NO: 771 - DNA, 134 bp, Escherichia coli
  Strain O55:H7
  modified_base (4)..(5): a, c, g or t
  modified_base (11)..(12): a, c, g or t
  modified_base (42)..(42): a, c, g or t
  modified_base (129)..(132): a, c, g or t
tacnnaaaagnnccgcaaaagcgagccgggaaaataagtgtngcgcgttgtactggagtcgaaccagtgaccgattgcttagaaggcaattgctctgtcctgctgagctaacaacgcagaataccgatnnnnga

SEQ ID NO: 772 - DNA, 18 bp, Escherichia coli
  Strain O55:H7
caccactgagctaaaggg

SEQ ID NO: 773 - DNA, 20 bp, Escherichia coli
  Strain O55:H7
cgaaatcaatgttgcaagca

SEQ ID NO: 774 - DNA, 27 bp, Escherichia coli
  Strain O55:H7
caccagcgcattcaccatgtctatccg

SEQ ID NO: 775 - DNA, 23 bp, Escherichia coli
  Strain O55:H7
  modified_base (8)..(8): a, c, g or t
ggcacaanaaaacccgcttgtgg

SEQ ID NO: 776 - DNA, 51 bp, Escherichia coli
  Strain O55:H7
  modified_base (40)..(41): a, c, g or t
  modified_base (45)..(45): a, c, g or t
tgccatcacgtacaaaatcggcaaaatatcagatttgcannaaanatatgc

SEQ ID NO: 777 - DNA, 20 bp, Escherichia coli
  Strain O55:H7
ttttgttttgaacgtgttct

SEQ ID NO: 778 - DNA, 30 bp, Escherichia coli
  Strain O55:H7
gcctcactatccagtcggtgaaaaatgtgt

SEQ ID NO: 779 - DNA, 46 bp, Escherichia coli
  Strain O55:H7
  modified_base (36)..(37): a, c, g or t
  modified_base (39)..(40): a, c, g or t
  modified_base (44)..(45): a, c, g or t
tccccaccaaaaagttctgcttttactgcctgcgcnncnngccnna

SEQ ID NO: 780 - DNA, 52 bp, Escherichia coli
  Strain O55:H7
  modified_base (31)..(32): a, c, g or t
  modified_base (48)..(49): a, c, g or t
gttcctgcgttttcccagcaatttttctggnnccggattgagtattannttc

SEQ ID NO: 781 - DNA, 22 bp, Escherichia coli
  Strain O55:H7
cgatctgatattcccaacaaat

SEQ ID NO: 782 - DNA, 24 bp, Escherichia coli
  Strain O55:H7
gctgtaacaccacaacaaccaggc

SEQ ID NO: 783 - DNA, 146 bp, Escherichia coli
  Strain O55:H7
  modified_base (34)..(34): a, c, g or t
  modified_base (37)..(40): a, c, g or t
  modified_base (74)..(75): a, c, g or t
  modified_base (115)..(118): a, c, g or t
  modified_base (122)..(124): a, c, g or t
caagagacagaacagcccgccgccacgatgatgncgnnnnctcaaccggactgaccagaggaattgacgtcacnntcgccagcgattgctttcccgggattggtggattatcccnnnntatnnnttttccagtcacttcatcgcgg

SEQ ID NO: 784 - DNA, 33 bp, Escherichia coli
  Strain O55:H7
  modified_base (25)..(25): a, c, g or t
gcttcaagctgaccttttgttgccncactcaaa

SEQ ID NO: 785 - DNA, 40 bp, Escherichia coli
  Strain O55:H7
gataatgagctgctcacgcacaaactgtaaatagtggtta

SEQ ID NO: 786 - DNA, 153 bp, Escherichia coli
  Strain O55:H7
actgctcgtcgtctatgagaagtccggcatgcgtcagcacatccagtggtgctttcaggatattgtccaggtcacgacggcgcttatccggtggctctgcaataatctttatcaccagccttccggacaggtttaatttcaaccgctgctggc

SEQ ID NO: 787 - DNA, 30 bp, Escherichia coli
  Strain O55:H7
  modified_base (2)..(5): a, c, g or t
  modified_base (25)..(25): a, c, g or t
cnnnngcgggtaaggcaaaacaaantctat

SEQ ID NO: 788 - DNA, 23 bp, Escherichia coli
  Strain O55:H7
  modified_base (8)..(8): a, c, g or t
  modified_base (18)..(19): a, c, g or t
cccggtangatgtcgctnncacg

SEQ ID NO: 789 - DNA, 36 bp, Escherichia coli
  Strain O55:H7
  modified_base (11)..(11): a, c, g or t
tttccgcacgnaaccccagcgaacgacgtaataccg

SEQ ID NO: 790 - DNA, 33 bp, Escherichia coli
  Strain O55:H7
ggataattcagccagagataattcacgctcctg

SEQ ID NO: 791 - DNA, 30 bp, Escherichia coli
  Strain O55:H7
ttcattgcgtgacggatgatgtcaatcatc

SEQ ID NO: 792 - DNA, 75 bp, Escherichia coli
  Strain O55:H7
  modified_base (11)..(12): a, c, g or t
  modified_base (44)..(45): a, c, g or t
  modified_base (49)..(52): a, c, g or t
tctgttgagcnngttgatccagtgaatcagatgtctgctcccgnngctnnnngtcgcagtgccagcacaacacca

SEQ ID NO: 793 - DNA, 23 bp, Escherichia coli
  Strain O55:H7
  modified_base (13)..(14): a, c, g or t
  modified_base (18)..(19): a, c, g or t
aatcaccgtgtanncacnngcag

SEQ ID NO: 794 - DNA, 34 bp, Escherichia coli
  Strain O55:H7
  modified_base (30)..(31): a, c, g or t
accagtcagacagtgcaccagcgccacccnnagc

SEQ ID NO: 795 - DNA, 28 bp, Escherichia coli
  Strain O55:H7
  modified_base (9)..(9): a, c, g or t
ctccagatncgttgctggaatgtgcggg

SEQ ID NO: 796 - DNA, 37 bp, Escherichia coli
  Strain O55:H7
aaaccagaatgccaggaaaaaacaaaacccgccgaag

SEQ ID NO: 797 - DNA, 20 bp, Escherichia coli
  Strain O55:H7
gaggtggcgagggatttctc

SEQ ID NO: 798 - DNA, 45 bp, Escherichia coli
  Strain O55:H7
  modified_base (37)..(40): a, c, g or t
tctcttactcctcaggttcgtaagctgtgaagacagnnnnctccg

SEQ ID NO: 799 - DNA, 23 bp, Escherichia coli
  Strain O55:H7
  modified_base (3)..(5): a, c, g or t
  modified_base (10)..(11): a, c, g or t
cgnnnctcgnngaggtctttcct

SEQ ID NO: 800 - DNA, 39 bp, Escherichia coli
  Strain O55:H7
ccttttgctgcttcatagcctgcttctccttgcctttcg

SEQ ID NO: 801 - DNA, 20 bp, Escherichia coli
  Strain O55:H7
  modified_base (19)..(19): a, c, g or t
taagaggctaacctacatnt

SEQ ID NO: 802 - DNA, 33 bp, Escherichia coli
  Strain O55:H7
gccaccggttctgcttccagcgatgccagtgca

SEQ ID NO: 803 - DNA, 23 bp, Escherichia coli
  Strain O55:H7
  modified_base (15)..(15): a, c, g or t
  modified_base (19)..(21): a, c, g or t
attaccgccctttcnggcnnnct

SEQ ID NO: 804 - DNA, 23 bp, Escherichia coli
  Strain O55:H7
  modified_base (3)..(4): a, c, g or t
tcnncacagagagcatccagtca

SEQ ID NO: 805 - DNA, 22 bp, Escherichia coli
  Strain O55:H7
accgcctcctgaaaattaccct

SEQ ID NO: 806 - DNA, 26 bp, Escherichia coli
  Strain O55:H7
  modified_base (2)..(3): a, c, g or t
anntctccgtcaggtaactttcgaat

SEQ ID NO: 807 - DNA, 85 bp, Escherichia coli
  Strain O55:H7
ccggcaatcacttttccgatacaacacggcgggaagaatcagtaatctgtcgaacaatatcccggtgcttgttcagctcccgcag

SEQ ID NO: 808 - DNA, 37 bp, Escherichia coli
  Strain O55:H7
ttaccgttctgattaacgcgtgccagccgccccgttg

SEQ ID NO: 809 - DNA, 1127 bp, Escherichia coli
  Strain O55:H7
  modified_base (942)..(942): a, c, g or t
  modified_base (944)..(945): a, c, g or t
tgcgagtactgacgccgaacttacccgccagttcctcacacgttttagcaccatcctgaccgataaactcaatcatcatgtctgcggtaactttttgttcgacctccccggtcagcatatcctgtgcttcagattttactggccgctcttcggttacccgggattcaccttcgccagccagaaaccaggtgtgacccgttttatcaacaacgccattttttttgagttcccacagttcgttgagaacttcttcacggctgatatcaagccgcgccgccagttcaacagaattggctttacccatcgctttcagtgcatgcaatacggtttccattaaaacttcctccggataaaaattacttctcagttcctgtgctggctgacgttcggacgccagctctcccagttaaacgtcacccagcgaccaccgttcatggacatgcggtccatcacccgctcgccgagaagtgtattcatcgctgcatggttaagatttgtcagcatccccacactgagtaacgatgccgttctgcggtcaacaatctgattcagcgtgacctgctcattacgcgtatcccgttgcatgccaatttcatccagtaccagcaggtcaacgccacacaatccctgcaaaaatttttcgcccgagtttttgttgtcgtagctgccatgtaacgccagcatcacatccgccactgttatcacaatcacactgcgacctttcgccagaaggtggttgccaatagccgccgccaggtggttttttcctgtgccaggcctgccactgaaaacaaaattcgtacagcccttccagctctgccgcaatggatttcgcctgactcagggcatggcgctgaccatcgttctgcacccggtagttaccgaacgtacacttccggtgaagcggctggataccggagcggttaatgattttttcaaccngnntctgatgattcagacgattaacctcctcgcttcgcttacgcccttcagcaagctgccattcccgccactccgccaccgtacggtacggagggattgcatcctgcggcacaaatctgctgactcttgccagaacaccacctgacgtaatgtttttcatggtgcgctaccccctgaaacccggc

SEQ ID NO: 810 - DNA, 131 bp, Escherichia coli
  Strain O55:H7
ttcggtatccggttcagaaatatgattcacgcaacgctgcgcgggcgaacgccccaggcggataaccagttcatcccatttttcccggagttttgccggactcatgatgttttttacccagaacgaatccc

SEQ ID NO: 811 - DNA, 26 bp, Escherichia coli
  Strain O55:H7
ttaaaaaatcctgttcagtcgtctgc

SEQ ID NO: 812 - DNA, 70 bp, Escherichia coli
  Strain O55:H7
gaagatcttttatctgacggatcaggttttaatactgacggatcggggtcaatcatcgcccccctaatcg

SEQ ID NO: 813 - DNA, 124 bp, Escherichia coli
  Strain O55:H7
  modified_base (50)..(51): a, c, g or t
acagttgatccatcaaaatttgacgggtcaaccgttgaggggtcaatatnngacgggtcaactgttaacgggtcattttttgccgggctaatttttcttttcggtttatatgactcacgcgccg

SEQ ID NO: 814 - DNA, 1549 bp, Escherichia coli
  Strain O55:H7
  modified_base (1307)..(1307): a, c, g or t
  modified_base (1309)..(1310): a, c, g or t
  modified_base (1314)..(1314): a, c, g or t
  modified_base (1542)..(1543): a, c, g or t
  modified_base (1547)..(1548): a, c, g or t
acattaagccgatagatattgcttacattacgcccaccgaccttacgctcttccttcgtcagccagccctctttcgccagttctgcaatagccgatttcactgtggattcacttcttgcaccgatctgacgccggatagtttcaatggcaggccatgacacgccctcgtcattgctgtagtctgcaagacgggccataaccgccaccctggataagatcatgccggtgaaggcgcacccttcccagacaagaccatgaagcttgctgctcataaaacccccgaacaccgtgcttttagtgcatcaccacagcattccctgccgggccgccgcgattcatctggtcatacaaaacaaccgctgacgcaacaaaatcatcgacatccttcaccagccgatccctccgttcgacgatctcacggtaatattcagaactgtggctgcgcatacgggccaccagcaaaggcggcatcgccttttcgatcgccggtaacagagcctgcattttttcaacagcatcaggggtgtctttctctacccagcggaaaattttctgggtattgcgagccagggcttccggatggctgtcgtcatacagttctgggaacgtcatacccaactcaaaataagcctgggttattccagctgctggaactttttcgccatcaggacgcgcccaggcattcatcgccatgcggatgtgttcatgcttgattttcatgaatcaagctcctagaaagtggttgtgttaacgttttggtatcttccagctcgggccaaatattcatccaatcaaaaggccttagttgctgacgtgtaacttcaccattactggctcgctcaataaggacacataacgatgcccctaacacttgacctttactcaatgcctttcttagataaccgatgctggtaccacactcgcatgcaaacatacgctgttcatctgacgaaagagaattgagaaatattcttaattcttccatagctactccttagtaaacacagcaaagaatacccacaggtaaacaaaagtcaatacccacaggttgtttaccttgcggtaatcgcatctattatttacctatggacaaatatgaatttagacgacagcaactcatcaaaattcgtgatgagaaatgcgatggtaaagcggttaacgtggccagaaagatcgggcgcgagccttcttatgtatcaagaatgttgtacccagaggggaaaaagggaaaaaaacggatcgctgatgatatggtggagattatcgaagagtcctttgggttaccccggggatggatggatggtatngnnttcntcatcaacgaacacagcctccagttatgaaacaagggttctaacgccacgacaacgtatttttttagatctcttagacgaactgccagaaagtgaagcggataaattattaaaaactcttgaagagaaaaaacagtattacaatatgatctacgaagaaatccgtaaaaagaaagcacaaaacgcatcatagctcaccaaacaactagtcaccagttaagacaccgcnnaaannt

SEQ ID NO: 815 - DNA, 977 bp, Escherichia coli
  Strain O55:H7
  modified_base (71)..(71): a, c, g or t
  modified_base (205)..(205): a, c, g or t
  modified_base (422)..(422): a, c, g or t
  modified_base (429)..(430): a, c, g or t
  modified_base (709)..(709): a, c, g or t
  modified_base (764)..(764): a, c, g or t
  modified_base (771)..(771): a, c, g or t
gggtatttactttttaaatacctatgggtatccttcttttcataccaacccaccccgccccacagaatgcngggcaatacttcgagttaccaggcagtggtcaggggttaagtagccagcccgaggcgtaagaacatgacggcagggttcaactttaataactatgcagcaggtttttgttccgctaccccagcgttaagggganatgaggtcagcatggatactatcgagcttggcaacaacgaatctctggtrtgtggcgtgtttcccaaycaggacggcacgtttaccgcgatgacgtataccaaaagyaaaacgtttaaaaccgaagctgccgcgcatcgctggttagccagaaacgctaactgattagcgccagtaaaaacaggtttccacaggttaatttaccctgaaaagtcagngcataanncgaaagcgcacggcgagatccctttgcatataagtcttgtcgttaaatttcttcgaccgtgcgcttctggttgtggcaatccgcgaaatggcgcggcggtaagtatggcggggttatcccttcccccgttgaggacaccgggttgtcaggttgaccatacgcttaagtgacaaccccgctgcaacgccctctgttatcaattttctggtgacgtttggcggtatcagttttactccgtgrctgctctgccgccctttttaaagtgaattttgtgatgcngtgaatgcggctmagcgcacgcggaacagttaaaaccaaaaacagtgttatgggnggattcnctgtatccggcgttaattgttaactggttaacgtcacctggaggcaccaggcaccgcatcacaaaattcattgttgaggacgcgataatggaaacgttattaccaaacgttaatacgtctgaaggttgttttgatattggtgtcactatcagtaaccctgtatttactgaagatgccattaacaagagaaaacacgaacgggagtt

SEQ ID NO: 816 - DNA, 68 bp, Escherichia coli
  Strain O55:H7
  modified_base (62)..(64): a, c, g or t
atgctggcccgtttacgtccgatacaaaaaggatgctggcaatgaatacagcatttgcactnnntctg

SEQ ID NO: 817 - DNA, 55 bp, Escherichia coli
  Strain O55:H7
  modified_base (3)..(4): a, c, g or t
atnncagtcagtgttcacaggacaatgcaggagtgtgtgactgcagcaaccgaac

SEQ ID NO: 818 - DNA, 30 bp, Escherichia coli
  Strain O55:H7
  modified_base (6)..(6): a, c, g or t
  modified_base (26)..(27): a, c, g or t
tgttanccggtcgataaagttattcnncag

SEQ ID NO: 819 - DNA, 106 bp, Escherichia coli
  Strain O55:H7
  modified_base (20)..(20): a, c, g or t
  modified_base (105)..(105): a, c, g or t
aaatcccggcaggtctttanaacagttccgtaataaacatccgatttcattcttatatgccagcaatggcagggatttgttcacccttaaatctgtaatgaggtna

SEQ ID NO: 820 - DNA, 38 bp, Escherichia coli
  Strain O55:H7
  modified_base (29)..(29): a, c, g or t
acgaacaggcaataaaggaagaaggtgcngtcgctgta

SEQ ID NO: 821 - DNA, 118 bp, Escherichia coli
  Strain O55:H7
  modified_base (92)..(92): a, c, g or t
  modified_base (110)..(110): a, c, g or t
ttgtttgcgaggataaacccggtataccccgccctgccctcgattcctgggatgctgaatatatgcaggaaaaccgctgggatgaggagtcngcttcctttgtcccggtngagactga

SEQ ID NO: 822 - DNA, 265 bp, Escherichia coli
  Strain O55:H7
  modified_base (15)..(15): a, c, g or t
acttttgacaacctngcccctgaagtacagaacgctgtcatggttaagttcgacacatgtgaaaacatcactgttgatatggtgattagcgcacaggaattgttgcaggaagacatggcaacattcgacggccatatcgttgaagcgttgatgaaaatgccagaagttaacgctatgtatccggagcttaagctgcatgccatcgggtgggttaagcataaatgtaagcctggtgccaaatggcccgaaattcaggcagagatgc

SEQ ID NO: 823 - DNA, 225 bp, Escherichia coli
  Strain O55:H7
gtgaacgcaaggaagccggaaaatacacgtctgttgttgatctcgcccgcgccagagccaatcaacagcacactgaaaattcaacaggaaaaatcaacccggtcattgctgccattcatcgcgaatacaagcagacatggaaaacactggatgacgaactggcctacgctctctggcctggtgatgtggatgccggaaacattgacggcagcatccatcgctggg

SEQ ID NO: 824 - DNA, 24 bp, Escherichia coli
  Strain O55:H7
agactggaagcgtatctcggcatc

SEQ ID NO: 825 - DNA, 298 bp, Escherichia coli
  Strain O55:H7
  modified_base (47)..(47): a, c, g or t
acagcctgatgcccttcgctacgaccgccagactatttttggccttntccgtgaacgtccgatcgacattcacaaagaccctgtggcactgaacaaatacattactgaatacctgactacaaagggcgtgtttgaagatgaaggaagaaatcagagcgcaactgatactctctcgtcgccagtaccagaaactgatgcagtggaaacggcaattccggacaacgaaaaaaccgaatgcaaagtggaagtcgaaccatctgtagagcgtgaggggccgttctacttcctcttcaccgac

SEQ ID NO: 826 - DNA, 46 bp, Escherichia coli
  Strain O55:H7
  modified_base (9)..(10): a, c, g or t
  modified_base (12)..(13): a, c, g or t
cgaaaaatnngnncgcgcaaacaaactttctggtctggataaggcg

SEQ ID NO: 827 - DNA, 57 bp, Escherichia coli
  Strain O55:H7
  modified_base (52)..(55): a, c, g or t
ctgacgccgatgaactgcttgcagtatcgcgtggtgaatttgttgaggggannnncg

SEQ ID NO: 828 - DNA, 23 bp, Escherichia coli
  Strain O55:H7
  modified_base (8)..(8): a, c, g or t
  modified_base (17)..(17): a, c, g or t
atgatccnaaatgggtnaagggg

SEQ ID NO: 829 - DNA, 307 bp, Escherichia coli
  Strain O55:H7
  modified_base (46)..(46): a, c, g or t
  modified_base (49)..(49): a, c, g or t
  modified_base (67)..(67): a, c, g or t
  modified_base (73)..(73): a, c, g or t
  modified_base (78)..(81): a, c, g or t
tcaaaacagcccaaatacgcaacaaaacgagccagaaacgaaacanccngaaccagtagtgcaacangaaccngaaannnnctgcaccgcctgcggtcagagcggtggcggcaactgccctgattgtggtgcggtgatgggcgacgcaacataccaggaaayattcgrtgaagagaatcagcctgaagttcaggaaaaagatccggaggaaatggaaggtactgcacatcagcacaaggagaacactggcggcaatcagcatcatgccagcgatagtgaaactggcgaggcgtcagatcccttaatt

SEQ ID NO: 830 - DNA, 108 bp, Escherichia coli
  Strain O55:H7
  modified_base (61)..(63): a, c, g or t
  modified_base (78)..(81): a, c, g or t
  modified_base (101)..(103): a, c, g or t
agtcatcataatctcacatccaccagcagagcggggattcatctgatgatcgaccttgaannnatgggaaaaaatccnnnngccccgattatctcaatagnnncaata

SEQ ID NO: 831 - DNA, 23 bp, Escherichia coli
  Strain O55:H7
  modified_base (2)..(3): a, c, g or t
  modified_base (7)..(8): a, c, g or t
  modified_base (12)..(13): a, c, g or t
gnnctgnntacnnctggcggagt

SEQ ID NO: 832 - DNA, 36 bp, Escherichia coli
  Strain O55:H7
  modified_base (29)..(30): a, c, g or t
  modified_base (32)..(32): a, c, g or t
ccgtggcgttactacaacgatcgcgatgnncncaca

SEQ ID NO: 833 - DNA, 49 bp, Escherichia coli
  Strain O55:H7
  modified_base (4)..(5): a, c, g or t
cagnnaaaatacgtttcaactatctggcaaaaactgatcccaagtcagg

SEQ ID NO: 834 - DNA, 63 bp, Escherichia coli
  Strain O55:H7
tcgatgagcgaagtaatcatgatcgtctctcctggcaaatgggtatccgaagagcagttaatt

SEQ ID NO: 835 - DNA, 136 bp, Escherichia coli
  Strain O55:H7
aaaaatcgtttatggaaggaagggaatataagcatgtcgctcatgacggtatgccatgggataacagtccatgcttttacaacctggaagaaattgatcgctggattgagcgccaggcatctgcaagaccaagacg

SEQ ID NO: 836 - DNA, 1 bp, Escherichia coli
  Strain O55:H7
t

SEQ ID NO: 837 - DNA, 96 bp, Escherichia coli
  Strain O55:H7
aatgagagaagctgaaatgaaatatccgacaggcgtggaaaaccatggagggaaattacgtatctggtttgtttataaaggtgtaagagtcaggga

SEQ ID NO: 838 - DNA, 40 bp, Escherichia coli
  Strain O55:H7
acaggcgcattgcaggtgagctgcgcgcctctgtttgtta

SEQ ID NO: 839 - DNA, 96 bp, Escherichia coli
  Strain O55:H7
ttttcgactatgcaaaacagtttccctcctcacacaatctggaaaaatttggtgaggcccgacaagatttaaccataaaggaactggctgaaaaat

SEQ ID NO: 840 - DNA, 88 bp, Escherichia coli
  Strain O55:H7
  modified_base (72)..(72): a, c, g or t
acgtcactcaacacgtaccgtgccgtcatcaaaaatattctgagcataatcggtgaaaaaaatcttgcctcntcgattaataaagaaa

SEQ ID NO: 841 - DNA, 33 bp, Escherichia coli
  Strain O55:H7
  modified_base (25)..(25): a, c, g or t
tggataccagatccccaaaagtaantatattgt

SEQ ID NO: 842 - DNA, 142 bp, Escherichia coli
  Strain O55:H7
  modified_base (56)..(56): a, c, g or t
  modified_base (64)..(64): a, c, g or t
  modified_base (78)..(79): a, c, g or t
  modified_base (81)..(82): a, c, g or t
  modified_base (121)..(121): a, c, g or t
  modified_base (133)..(133): a, c, g or t
ttacatgacaaatctttacgccgtgttccagttcggtgttgataacggttacctgncagataanccgtttaagggganntnnccattaaaggaatcaagaaccattcctgatcctctttcncgggaggaattnatccgtctt

SEQ ID NO: 843 - DNA, 175 bp, Escherichia coli
  Strain O55:H7
accgtcctcagtggtgatttttaatgtgacgaaattacgccccggacaggtaacaaaaacttcagcctttacgatcttcatgttcgattccttgcatcgcttgtcgtgatgcatgaaatctacgcaactgagctactaccatacaagtatgaagatcgaaaaaagccggagtgat

SEQ ID NO: 844 - DNA, 1196 bp, Escherichia coli
  Strain O55:H7
  modified_base (58)..(61): a, c, g or t
  modified_base (781)..(783): a, c, g or t
  modified_base (1131)..(1134): a, c, g or t
  modified_base (1190)..(1193): a, c, g or t
gcgtatatttgcgctgtgaatggttgacaaaagatgaaatagaataccttttgtcagnnnncacttcctcgtatcttattgataaaatggatttatgttcctacgtgcgcccccagcccacaacaatgatcaacatgccgcaaagcgcaatcaacgcccccgtccagtcataaagagtcagtttcacgccatccacaacgcgcagccacatcaacgccgtgcagacataaacgccaccataagccgcgtaaacacgcccactcgccgcaggatgcaacgttaacaaccagacaaacagcgccagtgaaatccccgccggaagcaacagccagatactggcgtttcgttttaaccacaaccagggcagaaagcatccaataatttcacacagcgcagtagcaaaaaatagtaacgttgttttaatcatctttgtcacttattgacatcatgtatagttatagggcgacataatatcatcaatataaacaccctcctggtacgttttgcgttcgcagtggatggtgtagaatcatctttaatcattcatacagggaatgaattatgaaaatcactctcagcaaacgaatcgacctgctcgcttttctgctgccttgcgcactggcattgagcacaactgttcatgccgaaactaacaaactggtgattgagtctggcgacagtgcacaaagccgccagcacgccgctatggaaaaagagcaatggaatgacacgggcaatctgcgccagaaagtgaataaacgcactgaaaaagagtgggatnnngccgacgccgcttttgataaccgcgataaatgcgagcaaagcgccaacatcaatgcctactgggagccaaatactttgcgctgcctggaccgtcgaactggccgcgttattaccccctaacctgttattgatttaaggaatgtaaggacacgttatgccaagcgcccacagtgttaagctacgcccgctggagcgtgaagatttacgctatgtacatcaactcgacaataacgccagtgtgatgcgttactggtttgaggaaccctacgaagcctttgttgaactctctgatctgtatgataagcatattcacgatcagagcgaacgacgctttgtggtggaatgtgnnnncgaaaaagccggtctggtggagttggtggaaattaaccatgtacatcgccgcgcannnnttc

SEQ ID NO: 845 - DNA, 1561 bp, Escherichia coli
  Strain O55:H7
ttatctccccggagtatcaggggaaaggtctggcaacccgtgccgccaaattagcaatggactatggcttcaccgttctcaatctctataagctgtatctgatcgttgataaagagaatgaaaaagcgattcacatttaccgcaagcttggcttttcggttgaaggtgaattgatgcacgagttctttattaatggtcaatatcgtaatgccattcgcatgtgtatattccagcatcagtatctggcagagcacaaaacaccgggtcagactctcctgaagccgaccgcacaatagcattaataataatcgatcgtatttttgatggtgtaaacccgttcgacggcgggttttactccttcatcaacaatgatcagctgacagcccaccggattggcgtgactgtcatattcacagctctgttttacattaccaactcgttgattattcagtaaagtaaccgctgtgtaatctaattttttgatcgggtccgttgatggcgtggcgctgacagataatgttttgtcgttacttttcgtggttttacccagtggataaccctgatcatcatagcgatattccatctgcatttgtttgctgctggctttaatcacgaagccattatcatcggtttcccaactcaccccggcagaaggtaattctgctagctggcattttccctgtaaacgtactctcttctccagcgtctcggcatcacggtaataattggcgtccagtaccagagcgaccacggtattattttccagatccagtaattcgagtgaatcaaaacagccttcttccgacaaagtccccgaaacacgtttcgtcacttcaccttgctcatccattaatgtctgagtgaaatcttttaccggaccacgcagcggatcaaaatcgaattcattagagaaactggccatctcaggagtaaatgaaagtgttacctctgtgcggtcacatcctgtgagtaatatcgcgagtaagcatggcagtaatttgtatttcacatcagtcaccagagagtagagatgattctcaatcatagtagcaaatacagtactttacacgtgaaatgctatgcttaaagaagttatcttcgcgttaggagcttatgatgaaactctcaacctgttatgccgcgcttctgctcgccctcgcctcacccgcggtactcgccgcgccgggatcctgtgagcgcatacaaagcgatatatcacagcgcattatcaataatggcgtacccgaaagcagcttcacgttaagtattgtacccaatgaccaagttgatcagcctgattcccaggtcgtcgggcattgcgctaatgatacgcataaaattctctacacccgcaccaccagcggtaacgtctctgctcccgcgcagtctacccaggatggcgcgcctgccgaaccgcagtaatacattatcgactacacgccggatacgacacatccggcgatttggacatacaacataatcccaccatattactcatacccttctattgatatggattaataattattaacccaaaatgggtagactccctctattgtta

SEQ ID NO: 846 - DNA, 31136 bp, Escherichia coli
  Strain O55:H7
  modified_base (1574)..(1574): a, c, g or t
  modified_base (3683)..(3683): a, c, g or t
  modified_base (4377)..(4377): a, c, g or t
  modified_base (4882)..(4882): a, c, g or t
  modified_base (4898)..(4898): a, c, g or t
  modified_base (5292)..(5295): a, c, g or t
  modified_base (5297)..(5297): a, c, g or t
  modified_base (6638)..(6638): a, c, g or t
  modified_base (6762)..(6762): a, c, g or t
  modified_base (7113)..(7113): a, c, g or t
  modified_base (7123)..(7123): a, c, g or t
  modified_base (7739)..(7739): a, c, g or t
  modified_base (12401)..(12401): a, c, g or t
  modified_base (13669)..(13669): a, c, g or t
  modified_base (13673)..(13673): a, c, g or t
  modified_base (14750)..(14750): a, c, g or t
  modified_base (15498)..(15501): a, c, g or t
  modified_base (15746)..(15746): a, c, g or t
  modified_base (16533)..(16533): a, c, g or t
  modified_base (21349)..(21349): a, c, g or t
  modified_base (21607)..(21607): a, c, g or t
  modified_base (26213)..(26216): a, c, g or t
  modified_base (27395)..(27395): a, c, g or t
  modified_base (29912)..(29912): a, c, g or t
aacttttatataacgataaagaacagggagtgagttatgtccaaaaatgaacgaatggtgggcatcagccgcagaacactcgttaaatctaccgcgataggttctctggcgctggctgcaggcggtttttctttgccgttcaccctgcgcagtgcagcggcagcagtacaacaggccagcgaacaagtggtctggggtgcctgttccgtcaactgtggtagccgctgtgcacttcgtctacatgttaaagataatgaagtggcctgggtggaaactgacaacaccggcagcgatgagtatggcaaccatcaggtacgcgcctgtttgcgcggtcgctccatccgccggcgtattaatcatcccgatcgcttgaattacccaatgaaacgcgtgggtaaacgcggtgaaggcaaattcgaacggattagctgggatgaagccctggatactatcgccagtagcctgaagaaaaccgtcgaacaatatggcaatgaggctgtatatattcagtactcttcggggatcgttggcggcaatatgacccgctcttcgccatcagcctcggcggtcaaacgcctgatgaactgctacggcggttcactcaaccagtatggctcctacagcactgcgcaaatttcctgtgccatgccctacacctacggcagtaatgatggcaacagcaccacggatattgaaaacagcaagctggtcgtgatgtttggtaacaacccggcagaaacccgcatgagcggcggtggcatcacttatcttcttgaaaaatcccgcgaaaaatcgaacgcaaaaatgattgttatcgatccgcgatataccgatacggctgctggtcgtgaagatgaatggcttcctattcgcccgggcaccgatgccgcgctggttgcgggtattgcctgggtattgattaacgaaaatctcgttgatcaaccttttctcgataaatactgcgtcggctatgacgaaaaaaccttacccgcagatgcacccaaaaatggtcactataaagcctatattcttggtgaaggtgacgataaaacagcgaaaacgccgcagtgggcttcgcaaattaccggtatcccggtggaccgtatcatcaaactggcgcgtgaaattggcacagcaaaacccgcttatatctgccagggctgggggccgcaacgccaggcaaacggcgagctgaccgcacgcgctattgctatgttgcctattctgacgggcaatgtcggcatcagcggcggaaatagtggcgcgcgtgaatcgacctataccattaccatagagcgcctgccggtgctggataatccggtcaaaacgtcaatttcctgcttcagctggacagatgctatcgatcatggcccacaaatgacggcaatccgcgacggtgtccggggcaaagataaactggatgtgcccattaagttcatctggaactacgcgggaaataccctggttaatcagcattctgacatcaacaaaacgcatgaaattctgcaggacgaatcgaaatgcgaaatgattgtggtcatcgaaaactttatgacctcatcggcaaaatatgncgacattctgctgccagacctgatgaccgttgagcaggaagatattattcctaacgactacgccggtaacatgggatatctcattttcctccagcctgtcaccagcgaaaaattcgaacgcaaaccgatttactggatcctgagtgaagtcgcgaaacgtcttggacctgacgtctatcaaaagttcactgaaggtcgcacgcaggaacaatggttacaacatctgtacgccaaaatgcttgccaaagatccggcgttaccgtcttacgacgaactgaaaaaaatgggtatctataagcgtaaagatcccaatggtcattttgtcgcctacaaagcatttcgtgacgaccccgaggcaaatccacttaaaacaccttccggtaagattgaaatttattccagcaagctggcggaaattgcccgtacctgggaactggaaaaagatgaagtgataagcccactgccagtttatgcctcaacctttgaaggctgggactcccctgaacgtagtacctttccactgcaactgtttggtttccattacaaatcccgtactcactcgacctacggcaacattgatgtcctgaaggctgcctgccgtcaggaggtgtggatcaaccctatagacgcacagaaatgtgggattgccaacggcgatatggtgcgggtgtataaccatcgtggcgaagttcggctaccagccaaagtgacaccacgcattctccctggggttagcgctatgggccagggagcctggcacgaggccaatatgtctggcgataaaatcgaccatggcggatgtgtgaatacgctaaccactctgcgcccttcaccactggcgaagggaaacccgcagcacacgaatctggtcgagatcgaaaaaatataacccactacaaccataaattctggcatgacattttgtttgaaaagcaataagtgagtaatgatgaaaatccataccacataggcgctcatgaaggctgaaatcagccgtagaagtctgatgaaaacctccgcacttggcagtcttgcgctggcaagcagtgctttcactctgccattttcccaaatggtccgagcggcagagacaccggtagaagagaaagcggtctggagttcctgcaccgttaactgcgggagccgctgtctgttacgtttgcatgtgaaagatgacaccgtgtactgggtggagtctgatacgacaggtgacgacgtctacggtaatcatcaggttcgtgcgtgtttacgcgggcgctctatccgccgacggatgaatcatcctgataggttgaaatatcccatgaagcgcgtcggcaagcgcggtgaaggtaaatttgaacggataagttgggacgaagccctggataccatcagtgataatcttcggcggatcctgaaagattacggcaatgaggctgtacatgtcctgtacggaacaggcgtagatggcggaaacatcaccaactcaaacgtcccgtaccgtctgatgaactcttgcggtggttttctcagtcgctatggcagctacagtaccgcacagatcagtgccgcaatgagttatatgttcggtgccaatgatggcaacagcccggatgatatcgccaatacgaaactggtcgttatgttcggaaataacccggcagaaacgcggatgagcggtggtggtgtcacttactacgtcgagcaagcccgcgaacgttcaaacgcacgcatgatcgtcatcgatccacgttataacgacacagctgccgggcgtgaagatgaatggctgcccattcgccctggcaccgatggcgcactggcctgtgcgattgcctgggtactgattactgaaaacatggtcgatcagccatttctcgacaaatattgtgttggttacgatgaaaaaacgctgcccgccaacgcaccacgtaacgcgcattataaagcctatattctgggcgaagggcctgacggcatagctaaaacgccggaatgggcagcaaaaatcaccagcatcccggcagaaaaaattatccagttggcacgagagatcggttcagcaaaacctgcttatatttgtcagggttgggggccacaacgacattccaacggcgagcaaacatnccgcgctattgccatgctttccgttctcaccggtaacgtcggcataaacggcggcaactcaggtgtacgcgaaggtagctgggatctgggggtagaatggttcccgatgctcgagaatcctgttaaaacgcagatttccgtctttacatggacagatgccatcgaccatggtacggaaatgaccgcgacccgtgatggtgttcgtggaaaagaaaaactggatgtccccatcaagtttttatggtgctacgccagtaacacattgatcaatcaacatggcgacatcaatcacaccaatgaggtgcttcaggatgacagcaagtgcgagatgattgttggcattgaccacttcatgacggcctcggctaagtattgcgatatcctgttgcccgacctgatgccaacagagcaagaagaccttatctctcatgaatctgcagggaatatgggctatgtgatcctcgcccaacccgcaacctcagcaaaatttgaacgcaaacccatctactggatgctgagtgaagtcgccaaacgcttaggaccggacgtttatcaaacctttactgaaggtcgcagtcagcatgaatggatcaaatatctccatgcgaaaacgaaggaacgtaaccctgagatgcccgactacgaggagatgaaaacgaccgggatctttaagaaaaaatgcccggaagaacantacgtcgctttccgcgcattccgtgaagatccacaggcaaacccgttgaaaacaccttcggggaaaatcgaaatttattctgaacgactggcgaagattgcagatacctgggaattgaaaaaagatgaaattattcatccccttcctgcgtataccccaggttttgatggctgggacgatcccctgcggaaaacctatccactgcagttaacgggcttccactacaaagcgcgtacccactccagctacggcaatattgatgtgttacagcaggcctgcccacaagaggtgtggatcaaccccattgatgctcaggctcgcggtatccgtcatggcgataccgtgcgggtatttaacaataatggagaaatgctgattgccgcaaaagtgactccgcgtattctgcctggcgttaccgccatcgggcaaggtgcgtggcttaaagcggatatgtttggtgaccgggtcgatcacggcggcagtatcaatattctgacctctcacngcccttcaccgctggnaaagggaaacccgtcgcacagcaatcttgtccagatcgaaaaggtttaaggagtagcccatgaccacacaatatggattttttatcgattccagccgctgtactggctgtaaaacctgcgaactggcgtgcaaagattttaaagatcttggcccggaagtcagtttccgccgtatttatgaatatgctggcggcgactggcaggaagataatggcgtctggcaccagaacgtgttcgcttattatctctccatctcctgtaaccattgcgatgaccccgcatgtacaaaagtctgccccagcggcgcaatgcataagcgtgaagatggctttgtggtggttgatgaagatgtttgtatcggctgccgctactgccacatggcttgtccgtacgnnnngncacagtacaatgctgaaaaagggcacatgacgaagtgcgatggttgttattcgcgcgtcgccgaggggaaacaacccatatgtgtcgaatcctgcccgctgcgtgcacttgagttcggtccaattgaagagctgcgccagaagcacggcactcttgctgccgtcgcgccactgccgcgcgcgcatttcacaaaacccaatatcgttatcaaacctaacgccaacagccgcccgaccggcgataccactggttatctggctaatccggaggaagtgtaaaatgggaaatggatggcatgaatggccactggttatctttaccgtattgggtcaatgcgtagtaggcgcgctgattgttagcggaattggctggttcgccgccaaaactgacgcagaccgtcagcacattgttcgtggcatgtttttcctctggctgttgatgggcatcgggtttattgcctctgtcatgcacctgggatcgccactgcgggcgtttaactcgctgaatcgaatcggagcttctggtctgagtaacgagattgctgccggttccatattttttgccgttggcggactatggtggctggtggcggtcatcggtaaaatgccgcaagcgttggggaaactctggttacttgtcagcatggcgctcggcgtcattttcgtctggatgatgacctgcgtgtatcaaatcgacactgtgccaacctggcataacggttacactacgctggctttcttcgtgacggtattgttgagtggtccaatacttgctgccgcaattctgcgggcagcccgcgttacatttaataccacaccatttgccatcattagcgttctggcgctgatcgcttgcgccggggtgattgtgctgcaaggtttgtctctgtcgtctattcactcatccgtgcaacaagccagcgcactggtaccagattacgcctccttacaggtctggcgtgtggtattgttatgcgcaggtctaggatgctggctttgtccgctcatacgtcgccgtgaacctcacgttgccggacttattctagggttaatcctcattcttggcggtgagatgatcgggcgtgtgctcttttatggcctgcacatgacggtaggaatggctattgcaggttaacaaattggtgcggggcaacccgcacatttcaggatgttaggaatgacccatttttcacagcaagataatttttctgtcgcggcgcgcgtgttgggcgcgctgttttattacgctccagagagtgctgaagccgcacctctggttgcggtactcaccagtgacggctgggaaactcagtggcctctaccagaagcgtcattagcgccnctggtgacggcttttcagacacagtgtgaagagactcacgcccaggcctggcagagtttgtttgtcggcccgtgggcactgccgtctccgccgtgggggtcggtctggctggatcgcgaatctntgctgtttggcgattcaacattggcacttcgtcagtggatgcgcgagaaaggcattcagtttgaaatgaagcaaaacgaaccggaagatcattttggttcactgctgttgatggctgcgtggttggcggagaatggtcgccagacagaatgcgaagaattgctggcatggcacctttttccctggtcaacacgttttcttgacgtttttatcgaaaaagcagaacaccctttctaccgtgcactgggtgaactggctcgcttaacgctggcgcaatggcaatcacaactgttaattcctgtcgcggttaaaccactctttcgataggatcaccgtaatattgccggatggngacgattacncgcgattcggcaacaatacgttacagtgtcacgttttttgtctcttaaagcacgcactgcttttgcagctggcctcttttgccgcaaaatagtcgcccgtgtttcattgcccatttctgctcatgcatcatctacacacctatccggatctgcgcactatgttccgccgtctgcttatcgcaacagtcgtcggtattctcgcggcctttgccgttgccgggtttcgtcatgcgatgctgctactggagtggttgttcctcaataatgactccggcagtctggtcaatgcagcgacaaacctttccccctggcgacggctgctaactccggcgctcggcggactggcggcgggtttgttgttgatgggctggcagaaatttacccagcaacgccctcatgcgccgaccgattacatggaagcgttgcaaaccgatggtcagtttgattacgcagcaagcctggttaaatcgcttgcctctctgctggtagtaaccagcggcagtgcaattggtcgcgaaggtgcgatgattcttttagctgcccttgccgcctcctgttttgcccaacgttttacgccacgccaggagtggaaattatggatcgcctgtggggccgnggcgggaatggctgcggcctatcgtgccccgcttgctggcagtttatttatagccgaagtgctgtttggcactatgatgttggcctctctcggcccggtgattatttccgccgtcgtggcattgctggttagcaatctgattaatcatagcgacgcgttactctacagcgtacaactctcagtgacggttcaggctcgtgactatgcgctgattatcagtacaggtgtgctggcaggtctgtgcggaccactgttgttaacgttaatgaacgcctgtcatcgtggatttgtgagtctcaaacttgcgccgccctggcaactggcactaggcgggttgatcgtgggtctgctttccctgttcacacctgcagtgtggggcaacggctatagcaccgtacaatcctttttaaccgccccgccactgttaatgatcattgccgggatcttcctttgtaaactgtgtgccgtgctggcgagtagcggttccggcgcacccggtggtgtctttacaccgacgctatttatcggtcttgccattggcatgttgtatggtcgtagtctgggattatggttccctgatggcgaagaaattacgcttttactcggattgaccgggatggcgacactgttggcggcaaccacgcacgcgccgattatgtcgacgttgatgatatgtgaaatgaccggggagtatcagctactccccggtttattgattgcctgcgtaattgcgtcggtaatctcgcggacgttacaccgtgactctatctaccgccagcacactgcgcagcatagctaagcggatgtattgccccagttcacgctgttcggcgcgcggcagataaggcagttcaccaatgagcggtgccggaagttttttaccgagcacatcaatgatttccgcataatgcgccagtcctgggttgattcggttagccacccagccaatgagcggcagcccgtcgttggcaatcgcctgagctgttagcagtgcatggttaatgcaaccttcctgaataccgacaaccatcaacaccggcagttgttcctgcaccacccattcagagagtggacgcaaatcattcatcagactacgccagccgccagtcccttctaccacgacatgatcgactttttcggtcaggtttgccaggccgtttgaaatgagggtgtaattgattgggcaactgtgcgccacgctactttcttcttcgcttaacgcgataggattaactgcttcataaggcagttcgatggttgaaacactctgcaacaccagggcatctttattacgcagcccttcgggtgtctctttgctccccttcgctacgggtttatatcccgcaaccgtttttccctgggaggctaacgcttgtagcaatgcgcgggaaaccaccgttttccctacagaagtgtctgtaccggtaataaagaaacgcttcagcatcactaactccaccgttatgcttcacaaatataaaccaggaaaataattaaccttgaaagtctaagttatgctttcctggcccaaattgagatagcgcaaattttggtagaacagttaaaaaatgttaaccctgcaacagacgaatcaacaaagaaccgttatacatcgcgtcttttaccagcgcagcccctgccatcgtgccctggttagaaaactgagtactctcaacgctaatgtgctgactatacgcaggaagggcctgctgacggatgctatctgagatgaccgggaagaggatatctgccgctttacttaacggtgagccaatcagtattttttgtgggttaaataaattcaccatgatggcaagaatgcgccctacatgcgcgcccaccccggtaatgatgtcttttgccagcagatcgccgcgcaatgccgcctgacacaatgagtccacggttaacggttgcccatgtaacatcgagctcatggattgattgagacgcagctgtgccagctcaagaatactgtccacactggcgatggtttcgaggcagccgtggttcccgcaataacagcgtttaccatatgggtctacctgtgtgtgacctatttccacgaggctactgctgcctgcgtgtagcagatgaccatcggtaatgacgcccgcccccacgttgtgatcgataaccacctgaatcacatcgcgcgccccgcgtgaggcaccaaacaaggcctctgccatcgtccatgcgctgatatcatgctgaatataaaccggaacgccggtatgctgctccagagcctcgccgagcggcatctcttttacatcctcgtagaacggcatgcgatgtacaatgccattttccgtatcaataattcccggcagggttatggcaatcgaagttagacgctcaagttttttctggtggcggataaaaaactgatcgatatgggaaatgatacgatccagcaatggcgagtcatcttttaacgccagttcctgcgactcttccaccaccagtttgctgctcagatcgcgcagagcaaggaaaatctccccgcgactaatgcgcagagaaagatagtgccaggcttcagtttcaaccaccagccccaccgccggacggccacggttccccgcttctttgatttccagctcttgcaccaggtgtgcttcgagcatctcacggacaattttagtgatactggcaggagccagctgcgccagacgggaaagatcgatacgcgagactggaccaagctgatcaatcaggcgataaaccgcgcccgcgttggtctgctttatttgatcaatgtgcccaggctggttttcagcaaccaccgcatactccctatattttcgcgctccgaaataatctgtaggctatggtgaagcacttcaatacgtgtcgtcaaatttttacttaggcatgtgattaacagcacatttttcgggctttttcgctgaaatttccctcacctgagagcattcagcagatgaatacgaaagttacgcgcagctggactttgttcatgatgtttcggccagaccaaccacatttcagaaaccgcatcctcttcagcaatcggcacccagcgcatttcgttgagctgaacacgtttaaatgacgcaggcaaaattgaaacacccagaccggcggaaaccagaccgatgatggtcattgcctcgcccacctcctgagtgatgacgggcgtcaaatggtaacgtcgcatcagcccgagaatatcgtcatacagccctgtcccgacgtgcggatcaaaaaagacaaagggttctttcgccagttcagccagcgttacattcgggttatttgccaggggatgatcgtgcgggatcatcgccataagcggttcatggacgatgactgcgtgttcaagcgtctccggtaacgctgtgttacgcagcaatcccatatccagcgttccttcaatgagcggagcgatttgctcgcgagtgttcatttcgcgggtttgtaaatggacatcgggataatctcggcgaaacagcgataacgtatcggacaccgcccgaataaaaggagccgacgaagtaaaaccaatgcgcaactcccccgcttcaccctgatgcagtctttcagcgcgagcggcagcgtcatccaccatagacaggatttgccgactatctgcaagaaactgttttcctgctgccgtcagcaatacactgcgattggttcgtgccagcagtcgggcaccaatttgttgctccagcgcctgaatctgctgacttagcggcggttgcgaaatattcaggcgggcagcggcgcgcccgaaatgcagctcttccgcaacagcaacaaagtaacgcagatgacgaagttcaatattcatatttaaaacatcttatttgagattattaatatattagacagaacaattcgattttcctaacctatgtataagcctgatccacaggcatatttagcaaggatttcaagtgagccgtactacaactgttgatggcgctccggcaagcgacactgacaagcaaagcatttctcagccaaatcaatttattaaacgcggtacgccgcaatttatgcgcgtcaccctggcgctgttctctgccggactggcaacatttgcacttctctattgtgtgcaacctatccttccggtgctttcgcaggagtttggcttaacgcccgcgaacagtagtatttcactgtccatttccacggcgatgttggctattggtttgctgtttactggccccctatccgatgccattggtcgcaaaccagtgatggtaacggcgctactattggcctccatttgtacgttactttcgacaatgatgaccagctggcacggcattttgattatgcgcgccttgattgggctttcgttaagtggcgtggcagctgttggcatgacttatcttagcgaggaaatccaccccagtttcgtggccttttcgatggggttgtatatcagcggcaactcaattggcgrcatgagcggacgcttaattagtggtgtcttcacggactttttcaactggcgaattgctctggcggctatcggttgtttcgcgctagcctcggcgttgatgttctggaaaatcctcccggaatcacgccattttcgcccgacttcgctgcgacctaagtcgttgtttatcaactttcgtctgcactggcgtgaccggggattaccgttattgttcgcanaaggctttttgctgatggggtcgttcgtcacgctgtttaattacatcggctatcggttgatgctctccccctggcatgtcagtcaggccgtggttggcttattatcgctggcttatttgaccggtacatggagctcacccaaagccggaaccatgaccacccgctatgggcgtggtccagtgatgttgttttcgacgggggttatgctgtttggtttactgatgaccttattcagctcgctgtggctgatctttgccggaatgttactcttctcagcaggattcttcgcagcccactcagttgccagcagctggatcggcccccgcgcaaaacgcgctaaaggccaggcctcctcgctgtatctgttcagttactatctggggtcgagtattgccgggacgctgggtggtgttttctggcataactatggctggaacggcgtcggcgcatttattgctctgatgctggtcattgctctgctggtcgggacgcgtttgcatcgtcgtctgcacgcctgaaaaataagtccggactgcggtaaatacccgtccggacttattgcctgctcaaaccaacgttaatagccatcctaaaatagacgaagcgccagccaattcccgcagcgcgtctagcgtcatcaggattataagtacccaaataaacggattcattttgctgtgtgtcatttattactgatgcgcagttattctaccgctttgtaagtagtaaaatagttaacccgatcaagactactattattggtagctaaattttccttaagtcacaatacgttattatcaacgctgtaatttattcagcgtttgtacatatcgttacacgctgaaaccaaccactcacggaagtctgccattcccagggatatagttatttcaacggccccgcagtggggttaaatgaaaaaacaaattgagggtatgacaatgaaaaaagtattagctctggttgttgccgctgctatgggtctgtcttctgccgcctttgctgcagagactgcgaccacacctgctccgactgcgacgaccaccaaagcagcgccggcgaaaactacacatcataaaaaacagcataaagcagcacctgcccagaaagcgcaggcggctaaaaagcatcataaaaatacgaaagctgaacagaaagccccagaacaaaaagcgcaggcagcgaagaaacacgccaagaaacacagccatcagcaaccggcaaaacctgctgcacaacccgcagcgtaagttttcaacagtaatgcnggcncgccccctcgcgcctgaaaattacggtgctaagcgggtaacgtttagcaccgcctttagcggagggtagtatggtgggccgttatcgctttgagttcattcttatcatccttattttatgcgcactgattgccgcccgtttttatctttcctgatcgtagttatctgattttactcccactttcatcccgtcccgtctatagtatttatgagggtttgcttttaataatcataattacccaccagagtgtgatatgcgtacaaccattgctgtagtgttgggtgcaattagtttgacgtctgcttttgtgtttgcagataaaccagacgttgccaaatcggcaaacgatgaggtcagcaccctgttttttggtcatgatgatcgtgtgccagtgaatgacacgacccaatcaccgtgggatgcggttgggcaactggaaacggccagcggcaatttatgtacggcgacgctgattgcacccaatctggcattaacggcaggacactgtttattgacgccaccaaagggtaaagccgataaagcagtggcgctgcgttttgtgtcaaataaaggtctttggcgctatgacatccacgacatagaaggccgcgttgatccgacactgggaaagcggttaaaagcagatggggatggttggattgtacctcccgcagccgcgccgtgggacttcggattgattgtgctacgtaatcccccttctggcattacgccgttgccgttatttgagggagataaagccgcgcttaccgccgcattaaaagcggcaggtcgtaaagtgactcaggcaggataccctgaagatcatctcgatacgttgtacagtcatcaaaactgtgaagtgactggctgggcgcaaacgtcggtgatgtcacatcagtgcgataccttgccgggtgacagcggttcgcctctgatgttgcataccgatgacggctggcaatcaattggggtgcaaagttcggctcctgccgcgaaagatcgctggcgcgccgataaccgggccatttctgttaccggttttcgcgacaagctggatcaactgtcgcaaaaataatnttcaaacgctgcccgacagcgcgggcagcgtcttcatcaggcaagtttcaccatgatcattccagccaacagcaagaccaggccaatccagcctttacgatttaaccgttgaccaaacaagatccaacctgcggctaacgtggcggcaataccaaacccgccccacaatgcataagcgacagacaagtcgatccctttaacggcctgagaaagcgcactaaaggcagccagcaccgccgccagggagagcaagccaaatattttgcgacgaaagccgtcagaaaatttcaaaaagacgttagcaacgatttccagcacgattgccaatgccagccaggcggcgtgaacccattcaaactgcgccatggttcacctccagttcaggtttacgtgctttacgggtacctgatttgatcaacactatcccggcgaccagggtggttaacccggcaattttcatcagcgataaactttcgtcgaataacaaaacgctaaacaaggtaataaataaaataccgataccttcccacagcgcataagccacacctaaggctatttttttaacagcgaaagagagaaatatatacgacagagaaatcatcaccagcattaaaataaagccgccatttccctcactgacgctcgcccatttcatagacagcgtaccggtaatttctgtagcaatagccagacctaataaaatccaataaatatacattgtccttctcctgcaagagaattattttannnntcgcttaattcagcgaaaccaaagtaaagtggtcaagccccgcgtatagggcaagcttaggcagaagaaaggactaaagcgcgttgcgccagtgctgctcacctacgagcaagatagtggatgaggtacgaagatgggtaaatgtagaaaataacgtcctgaacaaattgtccataatattacaattatccgcagtgttgcttctcgtcatcgcggatgataattgtcctcggtagttgaacacncctgatttgtatcatagcttaagaattaactcaaaatattttcacttctttacctgagcggtttgattttcgttatgatgacggagcgaaaaagacattattattagcaaaggaagaaaaaacggggacaagcatggcaaagccgatcatcacgctcaatggcctaaaaatcgtcattatgttgggaatgctggtcattattctctgcggtatccgttttgccgccgagatcatcgtgccgtttattctcgcattatttattgctgttattcttaacccgctggtgcaacacatggtccgctggcgtgtgccgcgtgtactggcagtgtcgattttgatgaccatcatcgtgatggctatggtgttgctgttagcttatctgggttccacgctcaacgagttgacgcggacgttaccgcaatatcgcaactctattatgacgccgctgcaagctcttgagccgttgttgcaacgcgtagggattgacgtctcagttgaccaactggcgcattacattgatccgaacgcggcgatgacgttgctcaccaacttattgacgcagttatctaatgccatgtcatcaatatttttattgctgctgacggtgctgtttatgctgctcgaagtgccacaattgcccggaaaatttaagcaaatgatggcgcgtccggttgaagggatggcggcgattcagcgtgcgattgacagtgtgtctcattatctggtgctgaaaacagccatcagcatcatcaccggcctggtcgcatgggcgatgctcgccgccctngatgttcgcttcgcttttgtctggggattgctggcctttgcgcttaattacatccctaatattggttcagttctcgcggcaatcccccctattgctcaggtactggtgtttaatggcttctacgaagcgttgttggtgctggcgggatatctgctgattaatctggtcttcggcaatattctggagccacgcatcatggggcgtgggctgggactttccacattggtggtatttttgtcgttgattttttggggatggttgttaggaccggtgggtatgctgctttccgtgccgttaacaattattgtcaaaattgcgcttgaacaaacagcgggaggtcaaagcatcgccgttctgttaagcgatctcaataaagagtgacggcctccgcagaggccgtcagggttacagagctttcaggattgcatccacgctggctttggcgtcaccaaacagcatgtgggtgttttccttgaagaacagcgggttttgcacaccagcatagccagtgttcatcgaacgtttaaagacaatcacgttctgcgctttccacacttccagcacaggcataccagcaatcggactcttcggatcatcctgcgccgccgggttaaccgtatcgttagcaccaatcaccagtacggtatcggtatcagcaaagtcatcgttgatctcgtccatttccagcacgatgtcatacggtacttttgcttcagccagcaatacgttcatatgtccaggcaaacgccccgcaaccgggtggataccgaaacgcacgttgataccacgagcgcgcagtttctcggtaatttcagcgacaggatattgcgcctgcgcgactgccatgccgtaccccggagtaatgatcactgaatgggagtttttcaacagttccgctgtctcttctgcggtgatttcgcggtgctcacccacttcctgatcatcgccagtagaagagccgtcggtgccgaaaccacccgcaataacgctgataaaggaacggttcatcgccttacacataatgtaagaaaggatagcccccgaggaaccgaccagcgcaccggtcacaatcagcaggtcgttgctgagcataaagcccgcagccgcagccgcccagccggagtacgagttcagcatcgacaccaccaccggcatatctgcaccaccgatggaggcgactaaatgccagccaaataccagcgcaatggcggtcattattagcaatgccagcacttgcaggccgacgctatccgtgcgaacaaatactatcagcagcaggaaggaaacgaccagagctgccaggttcattttgtgacggtttggcagcatcaacggtttagacgaaattttgccacacagtttgccgaacgccaccaccgaacccgtgaacgttaccgccccgatgaagataccgagaaacacttccgtcaggtgaatattgaccagaatcggtgccattcccgcgtcatgatgcagatagctgttaaagccaaccagcactgccgccagacccacgaagctatgcaggatcgccaccagttctggcatttcggtcatttcaactttcttcgccagacggataccaattgccccaccaatgaccatcgccagcaagatccagccaacgttacccgtatccggtccaaaaatggtggcgattagcgcaatcgccatcccggcgataccgaagttgttaccctggcgagacgtttcatgtttcgaaagcccggccagactgaagataaacaggatcgcggcaacaatgtatgcagctgtaactaatcctccagacatatgttaccccttaatttttgcggaacattttcagcatgcgctgagtcacggtgaagccaccgaaaatattaatgctggctataagcaccgcgataaaactaaggaagctaacccagccgccctggccaatctgcaacagtgctccgacaacaataatccctgaaatcgcgttggtgaccgacatcaacggtgtatgcagcgcgtgcgatacgttccacaccacgtaataaccgacaacgcaggccagcgcgaaaacggtgaagtgcccaagaaactctttcggcgcaacgcttgccagccagccgaaaaggatgattgccagcgccatcaacgcgtatttacgccacggtgaacaggcacatttttcctcagttttcacttccggtgccgctttttgtgccacctgcggctgagctgatacctgaatcggcggtgccggccaggtaatttcgcccgcacggatcacagtcacgccgcgaatcaccacatcatcaaaatcaacagtgatgttaccgtttttctctttgcacaacagtttcagcagattaacgaggttagtgccgtaaagctgtgaggattgcgtcggcagacggcccggaagatcggtatagccaatcactttgacaccattttccgtagtgaagatttcacccggcacggtgtattcacagttgccgccgttttgggctgccaggtcgacaatcacactgcccgccttcatggagtcaaccatttcacgggtaattagcttcggcgctggtttgcctggaataagcgcggtggtgacaatgatatcgacctcttttgcctgggcggcaaagagttccatttccgctttgatgaacgcgtccgacatcactttggcatagccatcgccgctgcccgcttcctctttaaaatccagctcgaggaattccgcgcccatactttgaacttgttctttcacttccgggcgggtgtcgaatgcacgcacaatcgcgccgagactgtttgctgcgccaatggcggccagacctgcaacacccgcaccaatcaccatcacttttgccggtggcactttcccggccgcagtaatttgcccggtaaagaagcacccaaattcatgtgccgcttcaacaatggcgcgataaccggcgatattcgccatcgagcttagtgcgtccagcgattgtgcgcgtgagatacgcggcacagagtccatcgccatcacggtcacgttacgttccgcaagtttttgcattaattccggattctgcgcaggccagataaaactcaccagcgttgtcccaggattcagtaacgcaatttcatcatctaacggcgcattgaccttcagaatgatctctgactgccagacgctattcccttctacaatttcagcgcccgcttgcacaaacgctttatcgtcaaaacttgccagttgacccgcgccgctctctaccgcgacggtaaaccccagtttcagcagctgttccactgtttttggcgttgctgcaacacgggtttcattggttaaccgttctcttggtatgccaattcgcatgatattcccttccatcggttttattgatgatggtttgcctgtgtcaggagccacacaagccgctcatgtacgagctaaatgttactccgttaaaataaattagtaacaaacgccctataacgtactgaaaattatgcctgtgatctagcgccaaaaatcagtatttcggcgtgaactcgcaaaatattaacgattcagccgtgatagtgggataaacaccttagaacgccggataaagactgataattgtcttcgacggtcgggtaaaacgagacatcgccccggcacgaatcactacttaacattaaattaacttatacaattcagttgcttcagtagtaatgatgctgatacggctgttttttaagcatagacggtcatttgagcaggattaaaattggcttaaggaatgtgatatgaaaaatgacgcagacagttacaccgtttaaatgcaataatcagccacgtttctcgttaataacaataccagtacctggtttgcgcaaggcgaaggattatttttatgaagcttaagaacaccctcctggcgtcggcactgctttctgctacggcattctccgttaacgcagcaacagaactgacaccggagcaagcggcagcggttaaaccttttgaccgtgtagtggttaccggtcgttttaatgctattggcgaagcggtgaaagccgtttctcgtcgcgcagataaagaaggtgccgcctctttttatgttgtcgacacttctgattttggtaacagcggtaactggcgtgtggtcgctgacctctataaagccgatgctgaaaaagcagaagaaacaagtaatcgcgtaattaacggtgttgtcgaactgccgaaagatcaggctgttctgattgaaccgtttgacacggtcaccgtccagggcttctatcgtagccagccagaagtcaatgatgccatcaccaaagcggcaaaagcgaaaggtgcctactctttctacatcgttcgtcaaatcgatgccaaccagggcggcaaccagcgtattactgcattcatctataaaaaagatgctaagaaacgtatcgtccagagcccggatgtgatcccggcagattccgaagcaggacgtgcagctctggctgccggtggcgaagccgcgaagaaagttgagatcccgggtgttgcgactaccgcatcaccaagttctgaagtcggtcgcttctttgaaacccagtcatcaaaaggcgggcgttacactgtcacgcttccggatggcactaaagtcgaagaactgaacaaagcgacagcagcgatgatggtcccgttcgacagcatcaaattctctggcaactacggcaacatgaccgaagtctcctatcaggttgcgaaacgagccgcgaagaaaggtgctaaatattaccacatcacccgccagtggcaggaacgtggtaataacctgaccgtcagtgcagatctgtataaataactattcagttnctcttataaggcggcttgatgccgcctttcgcatttttagtcacaaatttccccgcgaccattgcatgcagacacatctcttcgtaaaatcccgcgcttcagtggcaaactccatttttatgcgttttgccctaatatttattcttcttatcacgttttaatcactggatatcgatggaaaagaaactgggactgagcgcactcaccgcgctggtattaagctcaatgctgggcgcgggtgttttcagtctgccgcanaatatggcggcagttgccagcccggcagcactgctcatcggctggggtattactggcgctggcattttattgctggcctttgccatgctgatcctcacgcgcattcgtcccgaacttgacggcggtatctttacctatgcccgcgaagggtttggcgagctaatcggcttttgttccgcatggggatactggctgtgcgcagtcatcgccaacgtctcctatctggtgatcattttttccgcgttaagcttttttacggacacgccggaattgcgcctgtttggcgatggtaatacctggcaatcgatagtcggtgcatcggctttattgtggattgttcactttttgatcctgcgcggggtgcaaaccgctgccagcattaacctggtggcgacactggcaaaattgttgccgctgggtctgtttgttgtgctggcgatgatgatgttcaaactggatatcttcaagctcgacttcaccggacttgcacttggcgtacctgtttgggaacaggtgaaaaacaccatgctgatcaccctgtgggttttcattggtgtggaaggtgccgtggttgtttctgcgcgtgcgcgtaataaacgtgatgttggcaaagcgacactgctggcggttctctccgctctgggcgtttacttgctggtaacgctgctttcgctgggagtggtggcacgtcctgaactggctgaaattcgtaacccgtcaatggccggtctgatggtggaaatgatgggaccgtggggcgaaatcatcatcgctgccggtttgatcgtttccgtttgcggcgcgtacttaagctggaccatcatggcggcagaagttccgttcctggctgccactcataaagcattcccacgcatttttgcgcgccagaacgcacaagctgcgccatccgcctcactgtggttgacaaacatctgcgtgcaaatttgtctggtactcatctggctgaccggttccgattacaacacgttgctgaccatcgcctcagaaatgattctggtgccctatttcctggtcggcgcgttcttgctgaaaatcgcaacccgtccactgcataaagcggtaggtgtcggtgcctgcatttatggcttatggttattgtacgcctctggtccaatgcacttgctgttatccgttgttctgtatgcaccggggctgctggttttcctgtatgcgcgcaaaacgcatacacatgataatgtactgaaccgtcaggaaatggtgctgattggcatgctgttaattgcctcagttccggcgacctggatgctggtgggataacgttcatcccatcgttggatagcaaaggagataacgatgggtaaaacccagcccttgccaatattaattactggcggaggtcgtcgcatcggcctcgccctcgcatggcatttcattaatcaaaagcaaccggtgattgtcagctatcggacacactatccagccattgatggactgattaatgcaggtgcgcagtgtattcaggctgatttttcgaccaacgacggtgtgatggcgtttgccgatgaagtactaaaaagcacccatggtctgcgtgctattttgcataacgccagtgcgtggatggcggaaaaaccgggtgcgccactggccgacgtactggcttgcatgatgcagatccacgttaataccccatacctgctcaaccatgcgctggaaagattactgcgtgggcacggacacgccgccagcgatatcattcactttaccgattatgtggtggagcgcggtagcgacaaacatattgcgtatgctgcaagcaaagcggcactggataatatgacccgctcgtttgcccgcaagctggcaccggaagtgaaagtgaattctattgcgccatcgctgatcctgtttaatgaacatgatgatgccgaatatcgacaacaggcgctgaataaatcattgatgaaaaccgcgcctggcgagaaagaagtgatcgacctggtcgattacttacttaccagttgctttgtcaccggacgcagtttcccacttgatggcggtcgtcatctgcgttaatgcagctttatccagcatataatcaacacccatgcgcttatcccccaacacgcaacagaaccaacaaaagcggcgggcaagcgcatcattccggtgaaataccacagcgacaccaggtaaacaaaatagggaataatcgaccacatactaaaaatgatggttgcgcgtaaggcttcaatgccgcgttcgctggcaacaatataatgcgcgataagcgcaaaggtcgggaaaagtggaatcagcccggcgatataataatttttcgtttttgctaaaacaccaatcaacagcactaccagcgcaccgagcgcggctttgattaccagccccatctttttaccttaacacttccataacaagtcatcagtagaatacctgatgaaaacttgtttagaaacgattgatagtaagtaaaaacagcgcggtgtattgtgacgtttttatatctaccgtgaatgttatgaacactatcgtatttgtggaagatgatgcggaagtcggttcactgattgccgcgtacctggcaaaacatgatatgcaggttaccgtagagccgcgcggcgaccaggccgaagaaaccattttgcgagaaaatccggatttggtgttactcgacatcatgctaccaggcaaggacggcatgaccatttgtcgtgatttacgcgcaaagtggtccggaccgattgttcttctaacctctctcgatagcgatatgaaccacatcctggcactggaaatgggtgcctgcgactatattctcaaaacgacgccccctgctgttttgttagcgcgtttacgtttgcatttgcgtcagaatgagcaagccacgctgaccaaaggtcttcaggaaacgtcactgactccctacaaagccctgcatttcggcacgttgaccatcgatcctatcaaccgcgtagtcaccctggctaacactgaaatctcgctctcgacagctgatttcgaattattgtgggaattagctacccatgccgggcaaatcatggaccgcgatgcattgctgaaaaatttacgcggcgtcagttatgacggcctggatcgtagcgtggacgtggctatttcgcggttaagaaaaaaactgctcgataacgccgctgaaccttatcgcattaaaactgtgcgtaacaaaggctatctttttgcgcctcatgcatgggaataagcgatgaaaaaactgtttatccagttttacctgttattgtttgtctgcttccttgtgatgtctctgctggttgggttggtgtacaaatttaccgccgaacgcgcgggcaaacagtcgctggatgatttgatgaacagttcgctgtatctgatgcgcagcgaattgcgtgagatccccccacatgactggggtaagacgctgaaagagatggatttaaatctctctttcgatctgcgagtcgagccactgagtaaataccatcttgatgatatttccatgcaccggctgcgtggcggcgaaattgtcgccctggacgatcagtacacttttttgcagcgtatcccgcgcagccactacgtgctggcagttggtcctgttccttatctttattatctccatcagatgcgattgctggatatcgccctgatcgcttttattgctatttccctcgcctttccggtgtttatctggatgcgtccgcactggcaggatatgttaaaactggaagcagcggcgcaacgatttggcgatgggcatctcaatgaacgtatccactttgatgagggttcgagctttgaacgacttggtatcgcatttaaccagatggcggacaatatcaacgccttgattgccagcaaaaaacagcttattgacggtatcgctcacgaactgcgaacaccgttagtgcgcctgcgttatcgactggagatgagcgataacctgagcgccgccgaatcccaggcgttgaatcgtgatatcagtcaacttgaagctttaattgaagagctgctgacttatgcccgactcgatcgcccacaaaacgagcttcatcttagcgaaccagacctgccgttgtggctgtcaacgcatctggcagatattcaggcagtaacgcccgataaaacggtacggataaaaacgctcatgcaaggccattatgcggcgttggatatgcgcttaatggagcgcgtgctggataatttgctcaataatgccctgcgctactgccattcaacggttgaaaccagcctgctactgtcggggaatagagcgacattaattgttgaggatgatggcccagggattgccccagaaaaccgcgaacatatctttgaaccttttgttcgcctcgatcccagccgggatcgctcaaccggcggctgcgggctggggctggcaattgtccactctatagcactggcaatgggcggtacggttaattgtgacaccagcgaactgggtggtgcccgcttctcgtttagctggccgttatggcataacatcccgcaatttacctctgcttgacactacgcgcacggtggtcaagtcaccaccactgtgctataaattaaggatgttgtaactaannnnggttaatattatggcgcgttacgatctcgtagaccgactcaacactacttttcgccagatggaacaagagctggctgcatttgccgctcatcttgagcaacacaagctattggttgcccgcgtgttctctttgccggaggtaaaaaaagaggatgagcataatccgcttaatcgtattgaggtgaaacaacatctcggcaacgacgcgcagtcgcaggcgttgcgtcatttccgtcatttatttattcaacaacagtccgaaaatcgcagcagcaaagcagctgtccgtctgcctggcgtgttgtgttaccaggtcgataacctttcgcaagcagcgttggtcagtcatattcagcacatcaataaactcaagaccacgttcgagcatatcgtcacggttgaatcagaactccccaccgcggcacgttttgaatgggtgcatcgtcatttgccggggctgatcacccttaatgcttaccgcacgctcaccgttctgcacgatcccgccactttacgctttggttgggctaataaacatatcattaagaatttgcatcgtgatgaagtcctggcacagctggaaaaaagcctgaaatcaccacgcagtgtcgcaccgtggacgcgcgaggagtggcaaagaaaactggagcgagagtatcaggatatcgctgccctgccacagaatgcgaagttaaaaatcaaacgtccggtgaaggtgcagccgattgcccgcgtctggtacaaaggagatcaaaaacaagtccaacacgcctgccctacaccgctgattgcactgattaatcgggataatggtgcgggcgtgccggacgttggtgagttgttaaattacgatgccgacaatgtgcagcaccgttataaacctcaggcgcagccgcttcgtttgatcattccacggctgcacctgtatgttgcagattaacgcccggctttcatactgccgaccatctgttctggccgtacccagctgtcaaactcggcttcgctaagataccccagcgcaagggccgcagcttttaaggtcagcccttctttatgcgcttttttggcgatctccgcggctttgtcataaccaatgtgggtgttaagcgcagtcaccagcatcagcgattcattgagtaattgattgattcgctcacgattcggttcaatacccactgngcagtgtttgttaaaactttccatgccatctgccagcaagcgcaccgattgcaggaaattgtggatcaccattggacggaagacgttcagttcaaagttaccggaagcgccccccatgttgatcgccacgtcgttccccatcacctgacagcagagcatggttaatgcctcacactgtgttgggttcactttccccggcatgattgagctgcccggctcattttccgggattgagatttcaccaattccgcagcgcgggccagaggccagccagcggacatcattggcgattttcatcagtgacgcagccaaccctttcaacgcgccgtgcgcctgaaccagggcatcacaggtcgccagcgcttcaaatttgttcggcgcggtaacaaacggtgcacaggtaatgactgccagttcatctgctacgcgacgcgcatactccggatgggtatttagtccagtacccaccgctgtaccgccaagagccagttccgctacgtgaggcaggctgtattcgatatgtttgagattatgctcgagcatcgctacccagccggaaatctcctgccccagtgttagcggggtggcgtcctgcaagtgggttcgaccgatttttacgatatcggcaaatgcacgcgatttttcactcagcgtctgtgtcagggttttaagctgcggaatgagttgcttgcgcagcgccagcagcgccgcaacgtgcatcgccgtcggaaagacatcgttggaactttggcttttgttcacgtcgtcgttagggtgaactttacgttccatcccgcgcacgccgccgagtaattcactggcccggttagccagcacttcattcatgttcatgttactttgcgtgccggagccggtctgccagatagccagcgggaattcgtcgtcatgctgtcctgccagtacttcatccgccgcctgccgaatggcgctcgctttctcttcagacaacaagcctaaatcttcattaacttttgccgctgcgcgcttggttagcgccagcgcatgaatcagtgaggtgggcattttctccgtcgaaatgcggaaatgctccagcgagcgttgagtttgtgcgccccacagcttatctgccgggacatcaatcgcccccatcgaatctttttcgctgcgtactgtattcatggcctactcctcacctgattaattttttctttctgttttgctttcgttaagtaacttttagctcactcattatttactatttgataacaaatgtttggtctttcgtgccatgtaaaaaaaccgccccgaagggcggctctgtttatttcacacagcgggtgcattgtgtgagttgtatctgctggaagaagtcatttcctttatcatccacaaggataaacgccgggaaatcttccacttcaattttccagatggcttccattcccagttccggatattcaacacattccaggctcttaatacttccctgcgccaatacagcggccggaccaccgatactgccaaggtagaagccaccgtgttttttacaggcatccgtcacctgctggctgcggttgcctttcgccagcatgatcatacttccgcccagcgcttgcagttgatcgacataagaatccatccgtccggcggtcgttgggccaagagaaccggaggcataaccttccggcgttttggccggacccgcgtagtaaatcggatgatctttgatgtactgcggcagcccttcaccgttatccatccgctctttcagtttggcgtgagcaatatcacgaccgacgataatcgtgccgttaagcgataagcgtgtagaaacgggatactgcgacaactgtgcgaggatctctttcatcggacggttaaggtcaacgcgcaccgcttcgccttctcccgctttgcgcagctcttccgggatatatttgcctggattatgttccagtttttcgatccagatcccctgacggttgatcttcgctttgatattacggtcagcagaacaggagacgcccataccgaccgggcaggatgcgccgtgacgtggcaggcgaatcacgcggatgtcgtgagcgaagtatttaccgccaaactgcgcacccagaccaagattttgcgcttcgatcagcaattctttttccaattccacatcgcggaacgcctgaccgtgctcattcccttccgttggcagttcatcatagtatttcgcggaagccagtttcaccgttttaaggttcgtttctgcagaagttccaccaataacgaacgcaatatgatacggaggacaggccgccgtacccagcgtgcgcatcttctcaaccaggtaatttttcagtttccccggcgtcagtaacgctttggtttcctgatagagatacgtcttgtttgccgaaccaccacctttggcgatacagaggaatttgtattcgtcgccatcaacggcataaagatcgatctgcgctggcagattggtgccggtattcacttctttatacatatccagcggcgcgttttgcgagtagngcagattatcttcgatataagtgttatagacaccgcgcgccagcgccgcttcatcaccaccaccggtccatacacgctgcccttttttaccaacaataatcgcggtgccggtatcctgacaggttggcagaacgcctttcgccgcgatgtcggagttacgcaggaattgcagcgccacatatttatcattttcgctggcctccgggtcacgcagaatgtcggccacctgttgttggtgcgccggacgcagcatgaacgacgcatcatgaaacgcctggcgcgccaacagagttaacgcttcgggtgcgactttcaaaatctcctgcccttcaaattcagataagctaacgtgttcgctggttagcaggtaatactcagtatcatcttttttgagtggaaaaggagcctgataatgaaagggtttgtttgacattgttttctcacttactgcctggtttggttatgctctgggcgggtgttccgttgccctgttaaaagcgagtaacaatatcctacgcacttttttaacaaaaactgagactagtacgactttttgcggctccaggttacttcccgtaggattcttgctttaatagcgggattaatttccacattaaaacagggattgatcatgcaaaaactcattaactcagtgcaaaactatgcctggggcagcaaaacggcgttgactgaactttatggtatggaaaatccgtccagccagccgatggccgagctgtggatgggcgcacatccgaaaagcagttcacgagtgcagaatgccgccggagatatcgtttcactgcgtgatgtgattgagagtgataaatcgactctgctcggagaggccgttgccaaacgctttggcgaactgcctttcctgttcaaagtattatgcgcagcacagccactctccattcaggttcatccaaacaaacacaagtctgaaatcggttttgccaaagaaaatgccgcaggtatcccgatggatgccgccgagcgtaactataaagatcctaaccacaagccggagctggtttttgcgctgacgcctttccttgcgatgaacgcgtttcgtgaattttccgagattgtctccctactccagccggtcgcaggtgcacatccggcgattgctcactttttacaacagcctgatgccgaacgtttaagcgaactgttcgccagcctgttgaatatgcagggtgaagaaaaatcccgcgc

SEQ ID NO: 847 - DNA, 12846 bp, Escherichia coli
  Strain O55:H7
  modified_base (6026)..(6029): a, c, g or t
  modified_base (6198)..(6198): a, c, g or t
  modified_base (7817)..(7818): a, c, g or t
  modified_base (8239)..(8239): a, c, g or t
  modified_base (9702)..(9702): a, c, g or t
  modified_base (10437)..(10437): a, c, g or t
  modified_base (10941)..(10941): a, c, g or t
ttaaaatcggcgctcgacagtcagcagggtgaaccgtggcaaacgattcgtttaatttctgaattttacccggatgacagcggcctgttctctccgctgttgctgaatgtggtgaaattgaatcctggcgaagcgatgttcctgttcgctgaaacaccgcacgcttacctgcaaggcgtggcgctggaagtgatggcaaactccgataacgtgctgcgtgcgggtctgacgcctaaatacattgatattccggaactggttgccaatgtgaagttcgaagccaaaccggctaaccagttgttgacccagccggtgaaacaaggtgcagaactggacttcccgattcctgttgatgattttgccttctcgctgcatgaccttagtgataaagaaaccaccattagccagcagagtgccgccattttgttctgcgtcgaaggcgatgcaacgttgtggaaaggttctcagcagttacagcttaaaccgggtgaatcagcgtttattgccgccaacgaatcaccggtgactgtcaaaggccacggccgtttagcacgggtttacaacaagctgtaagagcttactgaaaaaattaacatctcttgctaagcttattaaaggcttataacaccttcaggcggccagtccgcctgatttcattttatggataatcattatgaataaatcgctggtagcggtaggcgtcattgttgcgctaggcgtagtctggacaggcggcgcatggtatacaggcaagaagattgaaacccatctcgaagacatggtcgcgcaggcgaacgcgcaactcaaactgaccgctcctgaatccaacctggaagtgagttatcaaaactatcatcgcggcgtattcagcagtcagctgcaactgttggtgaaacccattgccggaaaagaaaatccgtggattaaaagcggtcagagcgtcatcttcaacgaatcggttgatcatggtcccttcccccttgcccagcttaaaaaactgaacctgatcccgtcgatggcatcaattcaaaccacgctggttaataacgaagtaagcaaaccactgtttgatatggcaaaaggtgaaacgccttttgagattaactcgcgcattggttacagcggtgattccagttccgatatttcgctcaagccactgaattacgagcaaaaggatgaaaaagtcgcctttagcggcggcgagttccagttaaatgcggacagagacggcaaagctatctccctttccggggaggcgcaaagtggtcggatagacgcggttaacgaatacaaccagaaagtacagttgacctttaataatctgaaaaccgacggttccagcacgctggcaagttttggtgagcgcgtaggaaaccaaaaactgtcactggaaaaaatgaccatttcagtggaaggcaaagaactggcactgctggaaggcatggagatcagcggtaaatcggatctggtcaatgacggtaaaacgatcaatagccaactggattactcgctaaacagcctgaaggtacagaatcaggatctgggcagcggcaagctgactttaaaagtcggccaaattgatggcgaagcctggcatcagtttagccagcaatataacgcgcaaactcaggcgctgctggcacagccagaaattgccaacaatcccgaactttatcaggagaaagtgacggaagccttctttagcgccctgccgctgatgttgaaaggcgatccggtgattactatcgcgccgctaagctggaaaaacagtcagggtgaaagtgcgctgaatctgtcgctgttcctgaaagatccggcaacgactaaagaagcgccgcaaacgctggcgcaggaagtagatcgttcggttaaatctctggatgcgaaactgaccattccggtggatatggcaactgagttgatgactcaggtagcgaagctggaaggttatcaggaagatcaagcgaaaaaactggcgaaacagcaagttgaaggtgcatcagcaatggggcagatgttccgtctgaccaccttgcaggacaataccatcaccaccagcctgcaatatactaacggtcagataacgttaaacgggcagaaaatgccactggaagatttcgttggtatgtttgcaatgccggcattaaatgttccggtcgtacccgctattccgcagcagtaattcacagccaaaacgccggagatttttctctccggcgttattttttacttcagcataaagtcatactgaatactcattttcacatcccagtaattcaggcgatcgcccagcgtactgccatcgcgcttttcccgccctttatcggcagcaagaaagaaattcatcccttgtaacggcccttcgctgacccgatagttcataccacctaagatacccgcgccttcaatccgcacatctcgtttactggattcatagccgcgagtcacaatcggtgcaaatgtcagtgtaaattgggagttaaacgatagttgacgcccaattgccaggactgcattccttcacggttacgatcaagacttaatgaaaagggatagccaatgtcggtatccaccacggcaccattcattgcatggcgcaaataaccaccactgccaaatacgcttccccacggcgcattccaggtcaattgtccactaaccaacgccgtttcattgggctggctggtattacgacttaaaccttcgagttgcgcgtaaaagccgagcaactcccctttcaacgtataattcgggtcgagcggtatgcttttctcgagaatactttgtatctgattggaaacatctttctgtaccgatgcccccagagaatagcgactggtatcatcatgccaactggcggctaaaaaagaacgagcgcgatgtttatcgtattttcccgtctggctgttatacaccccttcatcacgaataccggttgttgaatcagtccataaaaatactcgtgaacgccacattccccacagatcaatatttggcgttaaagcccaataacctaatgctccttcagaaactgtcggtaatgtacgttgcgaactgccagccattaacggaatacgataaggtaagctaccataactataatccgtcccgaagcgacctaatttaagcaggctattttcactgggttttatttttactgcctcgagggcaaagccaaaacttttatcaccatcaagataccaccgggtactcatatcagcacgagcacctaatttataaacataatacgctccgccttcaacgccaataatattggaataataaccactattgaaatcgagcaatcctccctgtacccatgcgtaaatatctcttcccgcgccagcactgggcttatcagccctgcgcaattcgtttttcagtctgatgcgtagtcccgcttcatcgtcagccagttgcgccgcgtaagcagaggtaaggccagaggcagccgtcaggcaaataacggccatggccactatttttctcatagttgcacctttgatgttctgattatttttattgaatattaattagtgatatcgctgattaattgctgctgcacttttttacgattatcaatttcaaccacgatttctttgaattttttatccgtgagcggataaaaccagataataacgaatgccagtagcataaatccgcaaggtactaaggcaattgatgtgcggatgcccataattacttccggcgtttgcacctgattggcgatatatccgcttaatcccaaaataaaggcaggaattgaaccaccgattgcctgaccgcatttacgggtaaatgagaatagtgaataggtgagcccttcaattcgcacgccggtcaggtattcaccgtattctacggtatcagcttccagcgcccacatcacggtcatggtaacgccctgaccaattgaggcaatggctaacgcaaccaacgccaccggcagcgaccagacggaaacccagaagaacagcagataaccgcaggttcccagcaaagcgccaatcaggaaggtattctttttaccgatcctcgcgaccatccccggcaccaacggtgccgatgccacagtaccaaccaggttttgcaccagtaccagcacagtgaacagcccggtatcatttaacacatagcgcacgtagaacaacgacgaggcgctgaccgcgaaggtcgaaatcagcacacacagcgcaccgatgcacaacataaacagcgggcgattccgtttcagggtttgcagactgatcttcaatgacggctgcgccacgatacgtaccacattctcacgcgtcgatttgaagcagatgaagtaaagcaccattccggcaatcgccagcacaatcgtccagaaatggtataccgacaccatctcttccgggctggagttcttaatgctcggccctatcagaaatgccaggcagacaaaggtcaatgaagcggcaatcccacgagccgcgcccagacgggcgcgggattgtggttgttgggtcatcgcggtagcaagtgaaccataaggaatattcaccaggctgtagcaaagcccgaggcccatgtaggtcaaatatgcatacaccactttgctaccatggctccagtcggtcggcacccagaataccagcacgctgaagatcattaacggcgcagtaccgaagagtaaaaacgggcggaattttccccagcgggtattcacactgtccaccactcgtccggcaaagacgtcggcgaaggcatcgaatacccgcaccagtaacagcatggtgcccgccgcagcggcaccgacgccagcgacgtcggtgtagtaactcaacaggaagagcgcccccattgcgaaggcgaagttattggcgatgtcaccaaggctgtagccgacgatggtgcgccaggagagttgttgattcattgtttgcctccctgctgcggtttttcaccgaagttcatgccagtccagcgtttttgcagcagaaaagccgccgacttcggtttgcggtcgcgggtgaagatccccttcttgttaccgccaacgcgcaatatgccttgcgaggtcgcaaaatcggcgaaattccatacctgttcaccgacgacggcgctgacgcgatcaaagacgcggtgatacatatccagccatgcacactgatactcttcactccacatgtcggtgtacattgagtgcagcccggctaacgtatccacgccgtattcggtgatgataatcggctgatgcagtttctcctgccaggccagaagttctttttccagtaccttctctgccgtttccaaatcgccgctttggacataccaaccgtaataacggttcaggcacagcacatcaaagagatcgctgatggtatcggtgtgagcgtcgcagaacattacattgacgcaggtgatcggacgcgtcggatcgagtttacgcgttgcttccgccagtggcgcgaaatattcccgtgcaccttgcggacgggtatccggttcgttggcaatactccacatcaccacgcttgggtggtttttgtcacgcgctatcagctctttaatcgcctgtaagtgcgcctgctgagtttccccgttgactgcctcttcgctgtacagttctttcggcttgttgcccgcttcgaaaccaatgcctaaagagaggttaaagccgacagctgcagtttcatcaatcaccacgatgccatgttcatctgcccagtcgagcatctcttcagcgtaagggtaatgcgaggtacggtaggagttggccccaatccagtccattaatgcgtgatcgtgcaccatcagcacgttatcgaatcctttgccgcgcaaatccgcatcttcatgacggccaaagccagtaaagtagaacggtttgtggttgatcaggaactgttcgcccttcactgccactgaccggatgccgacgcgcagcgggtagatatcacactctgtctggcttttggctgtgacgtacagttcatagagataaccttcacccggttgccagaggtgcggattcaccacttgcaaagtcccgctggtgnnnnttgtccagttgcaaccacctgttgatccgcatcacgcagttcaacgctgacatcaccattggccaccacctgccagtcaacagacgcgtggttacagtcttgcgcgacatgcgtcaccacggtgatatcgtccacccaggtgttcggcgtggtgtagagcattacgctncgatggatcccggcgtagttaaagaaatcatggaagtaagactgctttttcttgccgttttcgtcggtaatcaccattcccggcgggatagtctgccagttcagttcgttgttcacacaaactgtgatacgtacacttttcccggcaataacatacggcgtgacatcggcttcaaatggcgtatagccgccctgatgctccatcacttcctgattattgacccacactttgccgtaatgagtgaccgcatcgaaacgcagcacgatacgctggcctgcccaacctttcggtataaagacttcgcgctgataccagacgttgcccacataattacgaatatctgcatcggcgaactgatcgttaaaactgcctggcacagcaattgcccggctttcttgtaacgcgctttcccaccaacgctgatcaattccacagttttcgcgatccagactgaatgcccacaggccgtcgagttttttgatttcacgggttggggtttctacaggacgtaacataagggactcctcattaagataaaaatactggtcaacctttaatctgattagttaaccaattctgtgttgcacacagttatctgtgagaaacccatggaagagaaatggaaataaaaagaactgacaccgcgatcaaaaaaccaaaaactgcaatacccacagcgtgatatagatcgcattaatctttaaaacggcgttgacagaagccataaaataagcaaccgaacgttcgttcgagcatattgggaacgataaactctcatgacatatggctacggtgaatattttagggaggaattccccgctccggcgagattgtattttgtacagggaaattaaagtatgaaacgcgggctcagttgtcaccagcccgcggaaagagagagagaatcaggatgcggttaagataccgccaatcatcgcgcgtaatccctgagcaaacgacgcttcacgcgccaggtcttccgcttcgatatcggccagtacaccgtaggtcagatccagcagtaaacgtgaagtcattgccgtgttgatgtctgggcttatctcgcctttttgctgggcatcacgcatccgctgagcaacaaattcagtgatcgtcatatgcttatttttaagcatggcggcgacctgtgggttacgcatcccttccgccataatttcgaccaccagcgcccgttgcccaaaggcttcatgggtgagagagacaatagactcgaccatatagtcaacaaaatgaatcccttcaatcggttcccggaaacgggccagcgccctctcctggtcctgtaagataatcgcctgaatcaaggcttctttggagatgaaatggtgatagagcgtcccgggactaatggcgcaggatttacagatggctttcatcgaggcactgtgaaatccattttctgaaaaaatctctctggcagcattgaggatccgggtccgtgtcggttgtgcttcagtctgcatgttatccatcattaaaccattatagttagcgtgaataactagtttaccgcgttgtcaggtgagcgcctatcattgctgttgaatagtgcgaaggcacactctattcgtatgcttttcatccagctattggttaanntggccgtgatttggctgccagttgtttagcagagacgttgatgaattgcacacgctatcccggtaaacaacacatacggctgtttaccggttcgttagtgtattaattgagctcctgtaccccaccaccggagacggtgagaatttgtccgcttacccagctggctgcaggcgagcaaaggaacagcgctgcgttagcaatatcttgcggttggcccagacgtctgatcggtgtgtgctgtaacattttttgttcaatttctggtgtaataacggatttcagggcatcggttaatattgcccccggcgcaatgccattcacccgaatatttttttcacccaggtcaaatgccatatttctgaccagatgactggccgcagctttagatgatgcataggaagtcatgtttatatttttattntctgccgccatagaagtgatggtcagaataacgccaccgccatttttttccatttctggcgcaacaagttgtgacagatggaaaaaagaaaacacattcagttcataagcacggcgaaaatccgccattggcatatcaaacggtttaggtccaccgccaccggcgttgttaaccagaatatcaactttacccagcttactgatagcaaagtctgccagtgcagagagttcctgttcggaagtaatatcacaacggcaggcaaatgcctgaccacccagttgttgaatttcgtctacaacatggttagctgcgtcggcgttaatatcactgaccaccacagatgcgccagctgtcgcgaatgtaatggcgatttctttaccaatacctgcacccgcacctgtgatgatggcgcattttccgtcgagtctcaggttgtcagaattaaacacataaacctcctgtgaacttcagtaaaaataaaaggcaccgcctgtgtgccacattttttatcattaaacttgaggaaaggacactaccaggtatagcagataaagagaggattatttcgccgcaatgagccgggcgggaataataagattgcgtgaatgcgtctcttcatgggtgattttttgcatcatgcgatccgcaagtgtggtaccaagttcccgcgcaggcgtgctggcccaggtaacgggtatatcatcaagtgtggttggtgtcgcatcggtaaatgccgccagcgaaacctgttgctcaaagtaacgatcgactccgctttccccgctttgccgccctgctttcagcaaaccaaaccatgcccccatcgcaatagtttcgttatagcaaaccacggcactgatggtcgggttatgacgtaaaagcgccgtgatagcttccgcggcttgcttctggctggaagtgcactccaacacccaatcgctgtgaaacggcaggccaaattttagtagagttgcacaatagccccccacccgttctgcacgggttaatgaggaactttgccctcccagccaggcgatccgctgatgcccattgcgaatgagatgctccgtcaacaactgtgcagcctgcatgttgtccgggcgaaccgtatcaacatcatcaagataactggcacgggaagcgaaaatcaccgggatagctttttcttctgccatccgtcgcaggtcatcgctgcttcctgcagccccggcaattaccacaccatcgacaccctgattcagtaacagtgaaaaccgctgtgccagctgctcgccgtctttaccgccgtgaagcaaaaaaaccatccgtccctgcgcttccagagcttccgtcaatccggccgtcaattcggcgtaaaacggcgcagataaatcacggacgatcaaaccaatgacgccgctttgcccaccgcgcagcgccgacgcctggcgattgcgcacaaatcccagctcttcaatggcggngttaacgcgttctcctgtggcggtagagattcgccctttgccactaagcaccagcgaaacggtacttaccgacacgcccgcagccagcgcaacatcatgaatggttatttttttggcggtagccatgcagatgacctactccctgattttgtgacagataaaacgttttaccttttatttatcttatacccgctattatcgttgcgtaatgtgatttatgcctcactaaaatttgataaaacgttttatcttctcgcgcaatttactgaatccagattgttctctacgaggagtcgttttatgacggcgaaaacagcaccgaaagtcacgctgtgggagttcttccagcagttaggcaaaaccttcatgttacccgtggcattattgtcgttctgcggcattatgctcggcattggtagttcccttagtagtcacgatgtcatcaccctgctcccggtcctgggcaaccccgtgttgcaggctatctttacctggatgagtaagattggctcgtttgcttttagtttcctgccagtcatgttctgtatcgccatcccgctgggtctggcacgagaaaacaaaggcgtagcggcattcgctggcttcgtcggttatgcggtaatgaacctcgcggtaaacttctggttgaccaataaaggcattctgccaaccacggatgccgccgttctgaaagccaataacatccagagcattcttgggatccagtcgatcganaccgggatcctcggtgcggtgatcgccggtattatcgtctggatgctgcatgagcgattccataatatccgcctgccggatgcgctggcattcttcggcggtacgcgcttcgtaccaatcatctcctcgctggtgatgggccttgtcggcctggtgattccattagtctggccgattttcgccatgggtattagcggcttaggccatatgatcaatagcgcgggtgatttcggaccgatgctgtttggtaccggtgaacgtctgctgttgccgtttggtctgcatcacattctggtggcattaattcgctttaccgacgcaggtggcacgcaggaagtctgcggtcaaaccgtcagcggcgcattgaccatcttccaggcgcaattgagttgcccgaccactcacggtttttctgaaagcgccacgcgtttcctttcgcaaggcaaaatgcctgcgtttctcggcggtctgccaggtgcagcgttagcgatgtatcactgcgcncgcccggaaaatcgccataaaattaaagggctgctgatttctggcctgatcgcctgtgtcgttggcggcacgaccgaaccgctggaattcctgttcctgttcgtagcgccagttctgtatgtcatccacgcgctgttaaccggcctcggcttcaccgtcatgtctgtgctcggcgtcaccatcggtaataccgacggcaatatcatcgacttcgtggtgttcggtattttgcatggtctgtcaaccaagtggtacatggtgccagtggtggtggcaatctggtttgtcgtttactacgtcatcttccgtttcgctatcacccgcttcaatctgaaaaccccggggcgcgatagcgaagtggccagttcaatcgaaaaagccgttgccggtgcgccgggtaaatcaggttacaacgttccggcaatcctcgaagccttaggcggtgccgacaatattgttagcctcgataactgcattacccgtctgcgtttgtctgtgaaagatatgtcgcttgttaatgtgcaggcactgaaggacaatcgggcaattggcgtagtacaacttaatcaacataacctgcaggttgttatcgggccacaagttcagtcagtaaaagatgaaatggccggtctgatgcatactgtccaggcataaggataagatatgttcgatttttcaaaggtcgtggatcgtcatggcacatggtgtacgcagtgggattatgtcgctgaccgtttcggcactgctgacctgttacctttcacgatttcagacatggattttgccactgccccctgcattatcgaggcgctgaatcagcgcctgatgcacggcgtgtttggctacagccgctggaagaacgatgagtttctcgcggctattgcccactggttttccacccagcattacaccgccatcgatcctcagtcggtggtgtatggcccttctgttatctatatggtctcagaactgattcgtcagtggtctgaaacaggtgaaggcgtggtgatccacacacccgcctatgacgcattttacaaggccattgaaggtaatcagcgcacagtaatgcccgttgctttagagaagcaggctgacggctggttttgcgatatgggcaagctggaagccgtgttggcgaaaccagaatgtaaaattatgctcctgtgtagcccacagaatcctaccggaaaagtgtggacgtgcgatgagctggagatcatggctgacctgtgcgagcgtcatggtgtgcgggttatttccgatgaaatccatatggatatggtttggggcgagcagccgcatattccctggagtaatgtggcgcggggagactgggcgttgctgacgtcgggatcgaaaagtttcaatattcccgcgctgaccggtgcttacgggattatagaaaatagcagcagccgtgatgcctatttatcggcactgaaaggacgtgatgggctttcttccccttcggtactggcgttaactgcccatatcgccgcctatcagcaaggtgcaccgtggctggatgccttacgcgtctatctgaaagataacctgacgtatatcgcagataaaatgaacgccgcgtttcctgaactcaactggcagatcccgcaatccacttatctggcctggcttgatttacgtccgttgaatattgacgacaacgcgttgcaaaaagcacttatcgaacaagaaaaagtcgcgatcatgccggggtatacctacggtgaagaaggtcgtggttttgtccgactcaatgccggctgcccacgttcgaaactggaaaaaggtgtggctggattaattaacgccatccgcgctgttcgctaaccccaattgcgcaacgtaaaaaatcgttgcgcaatcgtggatttttaccctgctttgtttttataatgg

SEQ ID NO: 848 - DNA, 2215 bp, Escherichia coli
  Strain O55:H7
acttttatatccagaaaaagagtgcgaccatgattgataccaccctgccattaactgatatccatcgccaccttgatggcaacattcgtccccagaccattcttgaacttggccgccagtataatatctcgcttcctgcacaatccctggaaacactgattccccacgttcaggtcattgccaacgaacccgatctggtgagctttctgaccaaacttgactggggcgttaaagttctcgcctctcttgatgcttgtcgccgcgtggcatttgaaaacattgaagatgcagcccgtaacggcctgcactatgtcgagctgcgtttttcaccaggctacatggcaatggcacatcagctgcctgttgcaggtgttgttgaagcggtgatcgatggcgtacgtgaaggttgccgcacctttggtgtgcaggcgaagcttatcggcattatgagccgaaccttcggcgatgccgcctgtcagcaagagctggaggcctttttagcccaccgtgaccagattaccgcacttgatttagccggtgatgaacttggtttcccgggaagtctgtttctttctcacttcaaccgcgcgcgtgatgcgggctggcatattaccgtccatgcaggcgaagctgccgggccggaaagcatctggcaggcgattcgtgaactgggggcagagcgcattggacatggcgtaaaagccattgaagatcgggcgctgatggattttctcgccgagcaacaaattggtattgaatcctgtctgacctccaatattcagaccagcaccgtggcagagctggctgcacatccgctgaaaacgttccttgagcatggcattcgtgccagcattaacactgacgatcccggcgtacagggagtggatatcattcacgaatataccgttgccgcgccagctgctgggttatcccgcgagcaaatccgccaggcacagattaatggtctggaaatggctttcctcaacgcagaggaaaaacgcgcactgcgagaaaaagtcgcagcgaagtaacaaaaatggatggtgcaaattgcaccatccatttttcatgcaaggcacaaagtcgcgcgatgtttggcggattcgatgcccagctcaatcaactccattacctggattgcctggcttgccggaaccggattttcaccatcgccatttaacgcatcacgaatcgccgcatagtaagccggataattcccaggcaccgtcaacagcgtttcttcgacacgttcctcaccttccacgcgggtaagtacgccatcacgcatatcgtagccccagtcttcctgcggcagacgctcgccatttttcagacgttcttcctgtggatcgaggccatatttcacataactgcctcgggatccatgcacgatataccgtgctgactcagcggctgccagcatggtaccgtgtaaaatgactcgccgctgtggataggacaagatggcgtggaaataatcggtcgactgcgctccgggccgtaactgtgccaaatctaccgtcatgctgaccggtaaaccaaatagcgtaatggcctgatcaagaagatgtggtgctaaatcgtaccagataccgctgcctgggccgccctgttcacgccaacgatcgcgcacctgcggacggaagcggtcaaaatgagactcaaagtaagcaacttcacccagcacgccttccgcgagcaaaccttttagcgtcaagaaatcgctatcccaacgacggttatggaatacagacagaacacgccccaggctttttgccagcgcatccagctctcgcgcttgtgacagtgtcacggtaaagggtttatcaacgaccacatgtttacccgcctcaagcgctgctttggctaacgggaaatgggtatcgttgggtgtaggaatgacaatcaggtctatgttgggatcgttaaacagatgcttcggctcagagacaaccgtaaccgttggccagtcggcttttacttttgtttcatcactgctggagattaccgccagttccagcccgggtgtgcccgcaatcaggggcgcatggaaggttttgctcgcataaccatacccaatcaacccaacacggatgttgtcgctcatgtcattgcctctcattgaagtatgatggctatttgacactatcctttaccctcgctcaacagtttaataacctgccagcaataagggatgttgtttaacttaagtcaa

SEQ ID NO: 849 - DNA, 1320 bp, Escherichia coli
  Strain O55:H7
tttttccaacgacaaaagctaaatatcgcaaaaacctcagtagaaatcttgctggagctattattgctaagtaacatttaccccctgaagttaatggatcaatcaacagagatgtgagttgtaatgaatcgtcttattgaattaacaggttggatcgttcttgtcgtttcagtcattcttcttggcgtggcgagtcacattgacaactatcagccacctgaacagagtactacggtacaacacaagtaagccctgcgcttgtagagcgacatgctgcccgtcagggtgcatgttttcacttgtcggatattaaaccaggaatttattatcttgttcggtgttgttggtgattgtcagggatagtaaagcgcgttactcttttcatagcagtttttcatccctgaatatttgccatcagcgcattcttattattgtaataacacaagcgttcacttttggtgaaattttatcatcactaataatacctacccctttggtattaattattttatggaccttttatgactgttcaggactacttattaaaatttcgcaaaatcagttcactagaaagtctggaaaaactctacgaccatcttaattacaccctgacggacgatcaggaactgatcaatatgtatcgtgctgccgatcaccgtcgcgcagagctggtttctggcgggcgtttgtttgacctcggccaggtaccgaagtccgtctggcactatgttcaataaagaaagtagcgatcggttataaaagccttataataacgcccctaaaattagatttgcctgtttgcgtcgctattctggagaacctatgaccaccacaacgccacaacgtattggaggctggttgcttggcccgttggcctggcttttagtcgctctgttaagtacgacgctggcgttgttgctgtataccgctgcgttatcttctccgcaaacatttcaaacgctcggcgcacaagcactgacgacacaaatcttatggggcgtttcttttattaccgctatcgccatgtggtattacacactgtggttgaccatcgctttctttaaacgtcggcgttgtgttcctaaacactatattatctggctgcttatttccgtattgctggcggtaaaagcgttcgctttttcacccgtggaagatggcatagccgttcgccagttgctgtttactttgttggcaaccgcattgatcgtcccctatttcaaacgctcgtcgcgggtgaaagcgacgtttgtgaatccgtaataaccttacagttaacctgttgtcgcctgctctggattaacggataataggcggctt

SEQ ID NO: 850 - DNA, 3038 bp, Escherichia coli
  Strain O55:H7
  modified_base (573)..(573): a, c, g or t
  modified_base (586)..(586): a, c, g or t
  modified_base (626)..(626): a, c, g or t
  modified_base (1738)..(1738): a, c, g or t
  modified_base (2953)..(2953): a, c, g or t
  modified_base (3033)..(3034): a, c, g or t
aggccgaaaaatgactgactacctgttactgtttgtcggaactgtactggtcaataactttgtactggtcaagtttctcggtctctgtccgtttatgggggtttccaaaaagctggaaaccgcgatgggcatggggctggcaacaacgtttgtgatgacgctggcgtctatttgcgcctggcttatcgatacgtggattttgatcccacttaatctgatttacctgcgcaccctggcatttattctggtgattgctgtggtcgtgcagttcaccgagatggtggtgcgcaaaaccagcccggtgctttaccgtttgctggggatttttttgccgcttatcaccaccaactgtgccgtgctcggcgtggcgttgctgaatatcaatctcgggcacaatttcttgcagtcggcgctgtacggtttttccgccgctgtcggtttttcgctggtgatggttctcttcgcagccatccgcgaacgccttgctgtggctgatgtcccggcaccttttcgcggtaatgccattgcgttaattaccgcaggtcttatgtctctggcctttatgggctttantggtttggtgaanttgtaatgaatgctatctggattgccgttgccgccgtgancctgctgggcctggcgtttggcgccattctgggttatgcctcccgccgttttgcggtggaagacgatccggtcgttgagaaaattgacgaaatcttaccgcagagccagtgtggtcagtgcggttatcccggctgtcgcccctacgcggaagccatcagctgtaacggtgaaaaaatcaaccgttgcgcccctggtggcgaagctgtgatgctaaaaattgccgagttgcttaatgtcgagccgcagccgctggatggcgaagcgcaagagctaacgcctgcgcggatggtggcggttattgatgaaaataactgtattggctgcactaaatgtattcaggcgtgtccggtagacgccatcgttggcgctacccgtgccatgcatacggtaatgagtgatctctgtacgggctgcaatttatgtgttgatccgtgcccgacgcactgcatctcgttgcaaccggtcgcagaaacacctgactcctggaaatgggatctgaacaccattcccgtgcgtatcattcccgtggaacaccatgcttaagttattctctgcattcagaaaaaataaaatctgggatttcaacggcggcatccatccaccggagatgaaaacccagtccaacggtacacccctgcgccaggtaccactggcgcagcgttttgtcattccactgaaacagcatattggcgctgaaggtgagttgtgcgttagcgtcggcgataaagtattgcgcggccagccgcttacccgtggtcgcggcaaaatgctgcctgttcacgcgcccacctcgggtaccgttacggctattgcgccccactctacggctcatccttcagctttagctgaattaagcgtgattattgatgccgatggtgaagactgctggatcccacgagacggctgggccgattatcgctctcgccgtcgcgaagagttaatcgagcgcattcatcagtttggtgttgccgggctgggtggtgcaggattcccgacaggcgttaaattgcagggcggcggagataagattgagacgttgattatcaacgctgctgagtgcgagccatacattaccgccgatgaccgtttgatgcaggattgcgcggctcangtcgtagagggtattcgcattcttgcgcatattctgcagccacgcgaaattcttatcggcattgaagataacaaaccgcaggcgatttccatgctgcgcgcggtgctggcggactctcacgatatttctatgcgggtgattccaaccaaatatccttctggcggtgctaaacaattaacctacattctgaccgggaagcaggttccacatggcgggcgttcatccgatatcggcgtattaatgcaaaacgtcggcactgcttatgcagtgaaacgtgccgttattgatggcgagccgattaccgagcgtgtcgtaaccctgactggcgaagcaatcgctcgcccgggcaacgtctgggcacggctggggacgccagtgcgtcatttattgaatgacgccggattctgcccctctgccgatcaaatggtgattatgggcggcccgctaatgggctttaccttgccatggctggatgtcccggtcgtaaagattaccaactgtctgttggctccctctgccaatgagcttggcgaaccacaggaagaacaaagctgcatccggtgtagcgcctgtgctgacgcctgccctgcggatcttttgccgcaacagttgtactggttcagcaaaggtcagcaacacgataaagctaccacgcataacattgccgactgcattgaatgtggggcttgcgcgtgggtttgcccgagcaatattcccctggtgcaatatttccgtcaggaaaaagctgaaattgcggctattcgtcaggaagaaaagcgcgccgcagaagccaaagcgcgtttcgaagcgcgccaggctcgtctggagcgcgaaaaagcggctcgccttgaacgacataagagcgcagccgttcaacctgcagccaaagataaagatgcgattgctgccgctctggcgcgggtgaaagagaaacaggcccaggctacacagcctattgtgattaaagcgggcgaacgcccggataacagtgcaattattgcagcacgggaagcccgtaaagcgcaagccagagcgaaacaggcagaactgcagcaaactaacgacgcagcaaccgttactgatccacgtaaaactgccgttgaagcagctatcgcccgcgccaaagcgcgcaagctggaacagcaacaggcaaatgcggaaccagaacaacaggtcgatccgcgcaaagctgccgtcgaagccgctattgcccgngccaaagcacgcaagctggaacagcaacaggctaatgcggaaccagaacaacaggtcgatccgcgcaaagccgccgtcgnngccg

SEQ ID NO: 851 - DNA, 2371 bp, Escherichia coli
  Strain O55:H7
  modified_base (9)..(10): a, c, g or t
  modified_base (26)..(26): a, c, g or t
ggaacagcnncaggctaatgcggaancagaagaaccggtcgatccgcgcaaagccgccgtcgaagccgctattacccgtgccaaagcgcgcaaactggaacagcaacaggctaatgcggagccagaagaacaggttgatccgcgcaaagctgccgtcgcagcggctattgcacgcgccaaagcacgcaagctggaacagcaacaggctaatgcagaaccagaagaacaggttgatccgcgcaaagcggcagttgccgcggctattgcccgcgttcaggccaaaaaagccgtccagcaaaaggttgtaaacgaggactaaatggtattcagaatagctagctccccttatacccataaccagcgccagacatcgcgcattatgctgttggtgttgctcgcagccgtgccaggaatcgcagcgcaactgtggttttttggttggggtactctcgttcagatcctgttggcatcggttagtgctctgttagccgaagctctcgtactcaaactacgcaagcagtcggtagccgccacgttgaaagataactcagcattgctgacaggcttattgctggcggtaagtattccccccctcgcgccatggtggatggtcgtgctgggtacggtgtttgcggttatcatcgctaaacagttgtatggcggtctggggcaaaacccgtttaatccggcaatgattggttatgtggtcttactgatctccttcccggtgcagatgaccagctggttaccgccacatgaaattgcggtcaacatccctggttttatcgacgccatacaggttattttcagcgggcataccgccagtggtggtgatatgaacacactacgcttaggtattgatggcattagtcaggcgacaccgctggatacatttaaaacctctgtccgtgccggtcattcggttgaacagattatgcaatatccgatctacagcggtattctggcgggcgctggttggcaatgggtaaatctcgcctggctggctggcggcgtatggttgctatggcagaaagcgattcgctggcatattcccctcagcttcttagtaacgctggcgttatgcgcaacgttgggctggttgttctcaccagaaacactggcagcaccgcaaattcatctgctgtctggagcgaccatgctcggcgcattctttattttgactgacccggttaccgcttctacgaccaatcgtggtcgtcttattttcggcgcgcttgcgggcttattagtctggttgatccgcagtttcggcggctatcctgacggcgtggcttttgccgtcctgctggcgaacatcacggttcctctgatcgattactacacgcgtccgcgcgtctacggccatcgcaaagggtaaaccatgctgaaaactatccgaaaacacggcattacgttggcgctatttgcagcgggttcaacagggttaactgcggccatcaaccagatgaccaaaacgacgattgctgaacaggccagtctgcaacaaaaggctttatttgatcaggtgctgccagccgaacgctataacaatgcgctggcacagagttgctatctggtaactgcgccagagttaggtaaaggtgagcatcgggtttacatcgccaaacaggatgacaaaccggtagccgccgttctggaagcaaccgcgccagatggctattccggtgcgattcagctgctggtgggagccgattttaacggcacggtacttggcacgcgcgtgacagagcaccacgaaacgccagggcttggcgataaaatcgaactgcgcctttctgactggatcacccattttgcgggtaaaaaaatcagtggtgcggatgatgcgcactgggcggtgaagaaagatggtggtaatttcgaccagttcaccggcgcgacgattactccccgcgcggtggttaatgcggtaaaacgcgccggattgtacgctcagacgttaccggaacaactttctcaacttcctgcctgtggagaataaagcgtgagcgaaattaaagacgttattgttcaggggttgtggaaaaacaactctgcgctggtccagttgctcggcctttgtcctctgttggctgtcacgtccactgccactaacgctctgggtttaggacttgcgactacgctggtactgacgctgaccaacctgaccatttcgacgctgcgtcactggacgccagccgagatccgcattcccatttacgtgatgatcatcgcctcggtggtcagcgctgtacagatgctgatcaacgcctacgcctttggcctgtatcaatcattagggatttttattccgctgattgtcactaactgtatcgttgtgggccgcgctgaagccttcgctgccaaaaaa

SEQ ID NO: 852 - DNA, 11627 bp, Escherichia coli
  Strain O55:H7
  modified_base (594)..(594): a, c, g or t
  modified_base (4608)..(4608): a, c, g or t
  modified_base (4953)..(4953): a, c, g or t
  modified_base (6045)..(6048): a, c, g or t
  modified_base (7899)..(7899): a, c, g or t
  modified_base (8725)..(8725): a, c, g or t
  modified_base (9746)..(9746): a, c, g or t
  modified_base (9752)..(9752): a, c, g or t
  modified_base (9756)..(9757): a, c, g or t
ctttcggcactggacggcttttcaattggtatgggcgcaacctgcgccatgttcgtgctgggttcactacgcgaaattatcggcaatggcacattgtttgacggtgcagatgcgctgttaggtagctgggcaaaagtattacgcgtggagattttccacaccgactcccctttcctgctggcgatgctgccaccaggtgcatttattggcctgggactgatgctggcaggaaaatacctgattgatgaaagaatgaaaaagcgccgtactgaagcagctgccgaacgtgcattgccaaacggtgaaacagggaatgtctgatgaacaaagcaaaacgcctggagatcctcactcgcctgcgtgagaacaatcctcatcccaccactgagcttaatttcagttcgccttttgaattgctgattgccgtactgctttccgctcaggcaaccgatgtcagtgttaataaggcgacggcgaaactctacccggtggcgaatacgcctgcagcgatgcttgaactgggcgttgaaggggtgaaaacctatatcaaaacgattgggctttataacagcaaagcagaaaatatcatcaaancctgccgtatcttactggagcagcataatggcgaggttccggaggatcgtgctgcgcttgaagccctgcccggcgtaggtcgtaaaacagccaacgtcgtattaaacactgcattcggctggccgactattgctgtcgacacgcacattttccgcgtttgtaatcgtactcaatttgcgccggggaaaaacgtcgaacaggtagaagaaaagctactgaaagtggttccggcagagtttaaagtcgactgccaccattggttgatcctgcacgggcgttatacctgcattgcccgcaagccccgctgtggctcttgtattattgaagatctttgtgaatacaaagagaaagttgacatctgaagaaaaggggtaacaccgattaccccattgataacctttctttatcctcttttaaaacatctttttaacgtcaatgatgccattgcttagcgttatcatcaggtaatccgtttgcggataaccaaaaatgcaggttaattgtttttttaatagcgaaattttctattcattcgtgatcaagatcacgatgctgtggcaatgtaaaaacattgcaagaatcaggttaaaatcatttaaatttacacacgcaacaaatattgacctacaaaacattacactggctatttttaagaaactggactatctcactaggaaaaacgctaaatagcagaacatatcgccgtcaagccatcatccccctctcaatgcagtgaaaaaatctgccgttacgttttttgaaaaatttaacgctggataacatttcccggaatggttgaattccccgcctcagttatatgtaacagattattacaaaggacttgtctgaaagtgcaagatagtgaacattacctgccgtttcccctcccactataacaattgcgcgtatgttttttagacataacgcgagaaagcacccccgttaatatgggatgtaaaaaaagaggtaaaagtgtccactgcaaaccaaaaaccaactgaaagcgtcagtttgaacgctttcaaacaaccgaaggcgttctatctcatcttctcgattgagttatgggaacgttttggttattacggcctacaaggaattatggctgtttacctggttaaacaactgggtatgtctgaagcggattcaatcacccttttctcttcctttagtgccctggtttatggtctggtcgctatcggcggctggttaggtgacaaggtactgggtactaaacgcgtaattatgctcggcgctattgtgctggcgattggttatgctctggttgcctggtctggtcacgacgccggtatcgtttatatgggtatggcggctattgcggtcggtaacggcctgtttaaagctaacccgtcttctctgctttctacatgctatgagaaaaacgacccgcgtctggacggtgcattcaccatgtactacatgtccgtcaacatcggctctttcttctctatgatcgccaccccgtggctggccgcgaaatacggctggagtgttgcgtttgcgttgagcgttgtaggcctgctgatcactatcgttaacttcgccttctgccaacgctgggttaaacagtacggttcaaaaccagacttcgagcctatcaactaccgtaacctgctgctgaccattattggtgttgtggcactgatcgctatcgccacctggctgctgcacaatcaggaagttgcgcgtatggcgctgggcgttgttgccttcggtatcgtggttatcttcggtaaagaagccttcgcgatgaaaggtgctgcgcgtcgtaaaatgatcgttgccttcatcctgatgctcgaagccattatcttcttcgtgctgtacagccagatgccaacgtcactgaacttctttgcgattcgtaacgttgaacataccattctgggcctggccgtagaacctgagcagtatcaggcactgaacccgttctggatcatcattggtagcccgattctggccgctatctataacaagatgggcgataccctgccgatgccaaccaagtttgcaatcggtatggtgatgtgttctggtgcgttcctgattctgccgctgggtgcgaaattcgcgtctgacgcaggtatcgtgtctgtaagctggctggtcgcgagctatggcctgcagagtatcggggaactgatgatctctggtctgggtctggcaatggttgcacaactcgttccgcagcgtctgatgggcttcattatgggtagctggttcctgaccactgccggtgcaaacctgattggtggttatgttgcgggtatgatggctgtgccggataacgttaccgatccgctgatgtcactggaagtctatggtcgcgtattcttgcagattggtgtcgctactgccgttattgcagtactgatgctgctgaccgcgccgaaactgcaccgcatgacgcaggatgacgctgcagacaaagcggcgaaagcagccgtagcgtaaaattcagggaaactcttttacaagccgctaacttttcgttagcggctttttttttgttcagcaacgcactaccatactttaaaccacagacaaaaggagttaccgatgaaattgttctacaaaccgggcgcctgctctctcgcttcccatatcaccctgcgtgagagcggaaaggattttacgctcgtcagtgtggatttaatgaaaaaacgtctcgaaaacggtgacgattactttgccgttaaccctaagggacaggtacctgcattgctgctggatgacggtactttgctgacggaaggtgtagcgattatgcagtatcttgccgacagcgtccccgaccgccagttgctggcaccggtaaacagtatttcccgctataaaaccatcgaatggctgaattacatcgccaccgagctgcataaaggtttcacacctctgtttcgccctgatacaccggaagagtacaaaccgacagttcgcgcgcagctggagaagaaactgcaatatgtgaacgaggcactgaaggatgagcactggatctgcgggcaaagatttacaattgctgatgcctatctgtttacggtactgcgctgggcatacgcggtgaaactgaatctggaagggttagagcacattgcggcatttatgcaacgtatggctgaacgtccggaagtacaagacgcgctgtcagcggaaggcttaaagtaatagccgtcggcccacagttcgttgtgggccgaaatgagatatttcagagctttgttgcgctgaagtaatgttctggtttggcaatacgatcctgagcagcaaccacttgcaactcatattcctgcattgctttggtggtcaccatgatttcgtagactgcagcggtcacatgttccagggcctcctgcagcgttgccccctgaagcagtttcaccagcagtaaaccgctcgtcacatcaccaacacctaccggctggcgcataccaaaatccaccagtggacggctgatatgccaggcttcatcggcggtgaccagcaacatttcaaaacggtcacggctgtagccagctcgcgccaggtgtttaaccaatacaatttgtggcccttgcgcaatgagttcgcgcgctgccagaaccgcttcttcgacgttatttaccggatgctcacagagtatttccagctcaacaagattcggcgcaatgatatcgctggcaggcaaaccgtgccgcacatgaaactctgcgacacccggtgcaacgatacagcctttttctggatgacccattaccggatcgcaaaaatatttcgcctgcggattcgctgctttcacctgacggacgataccgaggatatgttcaccctgctccgccgatcccagatagccacttaatacggcatcacaggtgtctaatttatcaatggcggcaatgccttgcacaatttcggttaaatggctgggcggcatcacgcagccagtccatttgccgtattgggtgtgattagaaaattgaacggtgttcagcggccagacgttcgcgcccaggcggngcatcggaaactctgccgcactgttacccgcatgaccataaacaacgtgagactggatagcgagaatatttttcatcatgttccctgtataaaaaccagggggagtgatttctcactccccctttccacttaatgcattatttccagcaaatcagacagtaattctttttgccgcgacgcagtaaggtaaaacgaccaaacagacgatcttcttctttaaagaagtattcaggatcggactgtttttcaccgttaatggtgatggcattggaggcgatagttttacgcgcctgaccacgggaaggttgcagttcagaatcgaccagcgcctgcatcaggtctgcncccttttccatctcaaccatcggtacgccgtcctgcgccagctgttcgaagtccgcttcactcagcgcactcaaagaaccgctgaacaggcattcggtaatacgttttgccgcctgtaaaccttcttcaccgtgaaccagacgagtcacctgctccgccagtacatactgggcgcgcggtgctttaccgctgtttttatcttcttcttccagggcgttgatctcttcaatgctcataaaggtgaagaacttcaggaagcggtaaacgtcggcatccgcagtgttgatccagaactggtagaatttgtacgggctggttttcttcggatccaaccagactgcgccgccttcagttttaccaaatttggtgccatctgctttggtgatcagcggaacggtcaggccaaacacctgattctgatgcagacgacgggtcaggtcgataccagaagtgatgttaccccactgatcagaaccaccaatttgcagcaccacaccgtactgtttgttcagacaggcgaagtcataaccctgcaacaggttgtaggaaaactcagtgaacgaaatcccctgatcttcacggttgagacgctgcttaaccgcttctttgttgatcatctggttaacggagaagtgtttgccaatatcgcgcaggaaggtcagcacattcatattgccgaaccagtcatagttgttcgccgcgatagcagagttttctccacagtcgaaatcgaggaacggggcaacctgcttgcggattttgtccacccactcctgaacagtttcttcggtgttcagcttacgctcggcagctttgaagctcgggtcgccaatcagacccgtcgcgccgcctaccagcgcaaccggcttgtggcccgcctgctggaagcgtttcaggcataacaatggaacaagatgccccaaatgcaagctgtcagcggtaggatcgaagccgcaatagagcgcgatcgggccttgcgccagtcgctctgctaacgcttcctcgtccgtcacctgggctaccagcccccgctcttgcaattgtttaatcaagttactgcttgccatcaaaatctccatgtatataacgacnnnnacctttgccggtacacgacttttcgccagatgcgaaagagacatagaataaagtgccagaatcaggagtaccagcgattaaagcaagatttttgcatcttttcagggtgcaagacgatcaatcttccacgcatcattttcacgctggtacaaaaagcggtcatgcaggcgatgctcaccgccctgccagaactcaatctgttcaaggctgacgcgaaaaccgccccaaaagctcggcaatggcacttcgccttgttgaaacttctgcttcagctccaggaatttactttcaaggataccgcgggcagaaatgcgactggactgcttcgaaacccatgaaccaatctggctatcacgcgggcggctatgaaaatatttcatcacttcgagagtcgaaagtcgttctgctttaccgatcaccatcacctggcgttcaagggtatgccacgggaacagcaggctaacgcgcggattattttcaatttgatgtgctttacggctaccgaggttggtgtaaaacaccatgcctttttcgtcgtaatgtttgagtaaaacgatgcgctgataaggctgaccatgttcatccacggtagcgaccaccatcgcggtagggtccgccagtttggcttcacaagcctgagagagccaacgttcaaaaagggttaatggatcggcgggaagatcgcggcggcgtaacccgcctttggtgtattcacggcgcagatgcgcgatttgctgcaattcgtcgttatcagacatggttttctttacggattgtcagtgggtgacgctattgtgcgccgcccctggaaaaatctcaacgctgtggattttgtaactgacagttattcaagacgatgcggtcgcgtttatagacagtcgcttcctcacctttcgaccagaaaacatagatcccgtcggagtaacgcgcgccagaggctgaaaggccctgtttgagatgcagtagttgattatcgtaaacaaaactgacttcctggcgcggattattcagtttgaccgtcaacggtttttcatcacactggtattccagcgtatcggtttgcattcgctcaaccagttgattaaaggcgctacagccggagagaaggaccggcaaaatgataattaacagttttttcatagtcatatcccgaagactttcctggtccggagggcaaataccctccttaatcttccaagtgtaacggcagacacgataagaaaaaattcagttaattctgatatcacgagttggcggggaaaatagcccccagaaccgtctcctggcttgcgccagtgacggaaggcagatttcctggtaatcccgccagcgtccgccaggcaagccaagcgaaagccaatgcttccatgtcatcgccactaatgccaacggcatcggtggtggtgacttctgtgcctggcagtaatgccgccagacgcgccatgagtagcggattacgactacctccaccacataccatcaatcgttcgcagccaccgctcaacaaaacttgttcagaaatggtcacggcggtgagttctgccagtgtggcctgaacatcacggggatcaacacccggaaaatggcgtaaatggcgctccagccagccgtagttaaagtattcgcgtccggtgcttttcggtgcaggttgcgagaaatatgggtcgctgagcatattttgcagcagtgggagaataactttacccgcccgtgcccactcggcatctttatcgtaaggtttaccggcctgacgccagatccaggcatccatcagcatgttaccaggaccggtatcgtagccgccaaccggctgcccaggaatgagcagtgacagattggcgatgccgccantattgagcaccattcgtcgctcagttgggtgagccagcaaggcatgatggaacgcaggtaccagcggtgcgccttgtcctcccaaggcaatatcgcgacggcgaaaatcaccgacaaccgtaattccggtgcgtgccacaatttgattgttatcgccaatctgtaaagtgtgtggtgccacgcccgtcggttcatgccagacggtttgaccgtgacagccgatcgcaactatatctctcgcctgcaggttttgttccttaagcaaggcattgaccgcatcagcaaaaagtcgcccgagttgagtatcaagctgtccaaactgcgaaagtgtaagctgttggccctggcaaatatccagtacagcctgtttcagagacaccgggatcggccagctcaaacttgccagctgtgcgacccggtgttcatcaattgtcgccaacacaacatcaacaccatcaaggctggtgcctgacataacgccaataaagcggcccgatttcatagttcatcctttttcaatctgacgtttgcgcacactcaaacataaacttttcgtgaataccatgcggaatgaccgatttttaccgttggtagtaaaacattatcttcaaatcaataatcatcatgaatgttttgtttataattggttgatcctactttcattatgatttgctcatatttggtagaacatgtaaccatggattcacatatgccatatactttgaccatgagggatgcttgctgtggcgtttcatggtgaacaggagatttttcaatgattaaacgcgtattggttgtttcaatggtaggtctgtctcttgtcggntgtgttaataacgacaccctgtcaggggatgtttataccgcttctgaagcgaaacaagtacagaatgtcagctatggaaccatcgttaacgtacgtccggtacagattcagggcggtgatgattccaacgttatcggtgcaattggcggtgctgttcttggtggtttcctgggaaatactgttggtggcggaaccgggcgttctctggctactgcagcaggcgctgttgcaggtggcgtagctggtcagggcgtacagagtgcaatgaacaaaacgcaaggtgtcgagctggaaattcgtaaagacgatggtaataccatcatggtggtacagaaacaaggcaacactcgtttctctccgggccaacgtgtcgtactggccagcaatggcagtcaggtgaccgtttctccgcgctaaataagtttgcgtgtggtcaggttactgaccacacgcccccttcatttcaccctttggcctgtaactcaatgatattatgctcaagttttgcgatgagcgtaatcagttgttccagttcctctgcggagatgccatgtaaaatttccgcgcgggttttgttaataacagcttccatttcgctgatcagcggctctgccttttccgtcagtttaatacgtttagcccgacgatcgctggcacaagtttgacgcgaaattaaccctttttcttccagttggtccagagtacggaccagtgatggctgctcgatgccaatcgcttttgccagttgaatttgcgactggtctggaggtaactgatggatattgtgtaacgtaacccaatgggtttgtgttaactccagcggtttcaggcgatggtctatcagagcacgccatatgcgcaccaaccgtgccagatcagaacctagtggcgattccaatttcatctccttataattagcttgctaagatattatgcggcttttagaatagtgtgcagcaattgtattgctaaaacaaatgtattgctgcatttggttaccgtcagacatatttttcagaanttgcgngtanntttttcgcacttaaagaatatttattaatctaacgcaatatattcggtcgtaaaggaatctactttgtgaagtttatgctcaatgcaacaggattgcccttacaagatctggtgttcggtgcgtccgtctactttcctccgtttttcaaagccttcgcgtttggattcgtcatctggcttgtcgtacaccgcctgcttcgtggctggatctacgccggtgacatctggcatcccttgttaatggatttatcgctgtttgcgatttgcgtttgccttgctctggcaatactgattgcgtggtaactatgtcaattaaaacaattaagtatttctcaacaatcattgtagcggtagttgcggttcttgccggatggtggctgtggaattattacatgcaatctccgtggacacgcgacgggaaaatacgcgcagaacaggtttctatcaccccacaggtgtcgggacgtattgttgagctgaatataaaagacaaccagctggttaacgcgggggatcttctgctcacgatcgataaaacgccctttcagatcgccgagctgaatgcacaggctcagctggcgaaagcgcaatctgacctcgcaaaagccaataacgaagcgaatcgtcgtcgtcatctctcacaaaattttatttctgccgaagaactcgataccgctaacctcaatgttaaagcgatgcaggccagtgttgatgccgcacaggcgacgctgaaacagacacaatggcaactggcgcaaacggaaattcgcgccccggtgagtggatgggtgactaatctcactacccgcatcggcgattacgctgacaccgggaaaccgctgtttgcccttgtcgacagccactcgttttacgtcattggttattttgaagaaaccaagttgcgccatatccgcgaaggtgcaccagcacaaattaccctctatagtgataacaaaacgttacagggtcacgtttccagtatcggtcgggcgatttatgatcagagcgttgaaagtgactcaagccttattccggatgtgaaacctaacgtcccctgggttcgtctcgcccaacgcgttcccgtccgctttgcgctggataaagttccagacgatgtcacgctggtgtcgggcaccacctgtagcattgccgtaggtcaataatgaacgcatcgtcatggtccttgcgcaatttgccctggttcagggccacgctggcgcaatggcgttatgcgttacgcaataccattgccatgtgtctggcgctgacggttgcctattatttgaatctggatgaaccctattgggcgatgacctcggctgcagtggttagctttcccaccgttggcggtgtcatcagcaaaagcctcggacgcatcgctggcagtttactgggagccattgcggcactgcttcttgccgggcatacgctcaatgagccgtggttttttctattgagcatgtcggcgtggcttggcttttgtacctgggcctgtgcgcacttcacgaataacgtcgcgtatgcatttcaactggcgggctacacggctgccatcatcgcctttccgatggttaatattactgaggccagccagctgtgggatatcgctcaggcgcgcgtttgcgaggtgattgtcggtattttgtgcggcggcatgatgatgatgatcctgcctagcagttccgatgctacagcccttttaaccgcattgaaaaacatgcacgcccgattactggaacatgccagtttactctggcagcctgaaacaaccgatgccattcgtgcagcacatgaaggggtgattgggcagatactgaccatgaatttgctgcgtatccaggctttctggagccactatcgttttcgccag

SEQ ID NO: 853 - DNA, 5709 bp, Escherichia coli
  Strain O55:H7
  modified_base (3677)..(3677): a, c, g or t
  modified_base (3861)..(3861): a, c, g or t
gcgccttaatgcgctgctccaccagcaattacgtatgaccagtgtcatctccagcctgcgacgtatgttgctcaactggccctcaccgccaggtgccacgcgagaaattctcgaacagttgctgacggcgctcgccagttcgcaaacagatgtttacaccgtcgcacgtattatcgccccgctacgcccgaccaacgtcgccgactatcggcacgtcgccttctggcagcgactacgttatttttgccgcctttatctgcaaagtagtcaggaattacatcgtctgcaaagcgatgtagatgatcatgccagactcccacggacatccggcctggctcgtcataccgataacgccgaagctatgtggagcggactgcgtacattttgtacgttgatgatgattggcgcatggagtattgcttcgcaatgggatgccggtgccaatgcattaacgctggcagcgattagctgcgtactctactccgccgtcgcagcaccgtttaagtcgttgtcactgctgatgcgcacgctggtgttactttcgctattcagctttgtggtcaaatttggtctgatggtccagattagcgatctgtggcaatttttactgtttctctttccactgctggcgacaatgcagcttcttaaattgcagatgcccaaatttgccgcattgtgggggcaactgattgtttttatgggttcttttatcgccgtcactaatcccccggtgtataattttgctgattttcttaacgataatctggcaaaaatcgttggcgtcgcgttggcgtggttagcgttcgccattctgcgtccaggatcggatgctcgcaaaagccgccgccatattcgcgcgctgcgccgggattttgtcgatcaactaagccgccatccaacactgagtgaaagcgaatttgaatcgctcacttatcatcacgtcagtcagttgagtaacagccaggatgcgctggctcgccgttggttattacgctggggtgtagtgctgctgaactgttctcatgttgtctggcaattacgcgactgggaatcgcgttccgatccgttatcgcgagtacgggataactgtatttcactgttgcggggagtgatgagtgagcgtggcgttcagcaaaaatcactggcggccacacttgaagaattacagcggatttgcgacagccttgcccgccatcatcaacctgccgcccgtgagctggcggcaattgtctggcggctgtactgctcgctttcgcaacttgagcaagcaccaccgcaaggtacgctggcctcttaattacttaattacaccacaggcatagcgttcaccgccaccgcccagcggtttaggttgatcggacatattatcgccgccaacgtggaccatcagcgctttgtctttgatttcatccagtgatttcagacgaggcgcgatgacggcatcggtagctttgccgtcattattgacgaccagtgcaggcagatcgcctaaatgcccggcaccttctggcccttcatgtttaccggtattttgtggatcaagatgcccgcctgcggattccgcggcgctggctttgccatctttggtggctggctggcagcttcctttggcatgaatatggaagccatgttcaccgggaggtaatgctttcagatcgggcgaaaactccagacctttatcggtttcagtaatggtgacgctaccaattgactgcccaaccccttgcgacgtgacgaggttcatctcgactttttcactggcagcttgtgcgccggtcgcaacaaccagcgccagaatggccagactaaaacgtttcataggacctccgttcattgtgcattcctgaataagtgtaaaccagtgacacatttttgaacggcggctattcctaaaagtgcttacggtacgtcgtaccccagtgccgctttacggatacgaaaccattgttgacgggtcattttcagtgtttctgcttcgacagctgcccgtacgcgctcaattttacctgagccgataattggcagcggctgcgacggtaaacgtaatacccaggcgtaaaccacctgttcaatcgagcccgcgtttaactcctccgccaccacagccagttcatcacgcagcggctggaaataatcatcattaaacagacgaccaccaccaaggcaggaccacgccatcggacgaacacgcagttgttgcagttggtcgagcgtgccatccagcagtaacggctgatgtaccggggatatttccacctgattagtggcaagggtaaacggcagacgtgattgcaacagggcaaattgcgcaggcgtgaagttggatacgccaaaatgacgcactttgccgctctgatgcagatgtttgaacgcgtccgccacttcatcggcatccattaacgggtccgggcggtggattaacagcagatccagatgatcggtcgcaagattaattagcgactgttcggcgctcttaatgatgtgatcgcggtcagtgatgtaatgaccaatgacgttttcttcacgcgcggtcgtcgcgataccgcatttactgacgatttccatccgctcacgcaggtgaggtgccagtttcagcgcctcgccaaacgccgcttcgcactgatagccaccataaatatcagcatggtccacggtggtcacgccgagatccagatgctcttcaataaaactgaccagctggcgggcggacatgttccagtccatcaatcgccagtagcccatcacaaaacgggaaaactccgggccttgcggcgcaatagtaatacgctgaaccataatcgcttcctcttatcagatatgagaggagtatacgcaagattaggctcaaaagagtgatggttgctccggttcgtctgatgacgctggcttatttgcacgtaatttgcgcattaatcgctgccgacaaaggcgcagcacctcttgtttttcgccatcgctcattttattccagttaaaacgctcatcccggcttcgaaaacagccgcgacaaaacccgcgttcgtcagactggcaaattccccggcacgggctctggacgggaaagaactctaattgctccgccacttcgccctcctcaaataagattattaccattattgaagctgttaatgcccaaagtagcaactttgcttgcactagaccgactggtctactacactccaacgcatgaacaaacacaccgaacatgatactcgcgaacatctcctggcgacgggcgagcaactttgcctgcaacgtggattcaccgggatggggctaagcgaattactaaaaaccgctgaagtgccgaaagggtccttctatcactactttcgctctaaagaagcgtttggcgttgccatgcttgagcgccattacgccacatatcaccaacgactgactgagttgctgcaatccggcgaaggtaactaccgcgaccgcatactggcttattaccagcaaacactgaaccagttttgccaacatggaaccatcagtggttgcctgacagtaaaactctctgccgaagtgtgcgatctgtcagaagatatgcgtagcgcgatggataaaggcgctcgcggcgtgatcgccctgctctcgcaggctctggaaaatggccgtgatagccattgtttaaccttttgtggcgaaccgctgcaacaggcacaagtgctttncgcactatggctgggtgcgaatctgcaggccaaaatttcgcgcaattccgagccactggaaaacgcgctggcacatgtaaaaaccattattgcgacgcctgccgtttagcaggcattttttatcaccagacgaccgggagcctttatgtcatctgaaaaactgtattccccactgaaagtgggngcaataactgcggcaaaccgtatttttatggcaccgctgacgcgtctgcgcagtattgaaccgggtgacatccctaccccgttgatggcggaatactatcgccaacgtgccagtgccggtttgattattagcgaagccacgcaaatttctgcccaggcaaaagggtatgctggtgcacctggcatccatagtccggaacaaattgccgcatggaaaaaaattaccgctggcgttcatgctgaaaatgggcatatggccgtacagctgtggcacaccggacgcatttctcacgccagcctgcaacctggcggccaggcaccagtagcgccttcagcacttagcgcgggaacacgtacttctctgcgcgatgaaaatggtcaggcgatccgtgttgaaacatccatgccgcgtgcgcttgaactggaagagattccaagtatcgtcaatgatttccgtcaggctattgctaacgcgcgtgaagccggttttgatctggtagagctccactctgctcatggttatttgctgcatcagttcctttctccttcttcaaaccatcgtaccgatcagtacggcggcagcgtggaaaatcgcgcacgtttggtactggaagtggtcgatgccgggattgaagaatggggtgccgatcgcattggcattcgcgtttcgccaatcggtactttccagaacacggataacggcccgaatgaagaagccgatgcactgtatctgattgaacaactgggtaaacgcggcattgcttatctgcatatgtcagaaccagattgggcggggggtgaaccgtatactgatgcgttccgcgaaaaagtacgcgcccgtttccacggtccgattatcggcgcaggtgcatacacagtagaaaaagctgaaacgctgatcggcaaagggttaattgatgcggtggcatttggtcgtgactggattgcgaacccggatctggtcgcccgcttgcagcgcaaagctgagcttaacccacagcgtgctgaaagtttctatggtggcggtgcggaaggctacactgattacccgacgttgtaatccaacattgcgagcggcgtaaagccgccgctatactaaaacaacattttgaatctgttagccattttgaggataaaaagatgcgtcttcttcataccatgctgcgcgttggcgatctgcaacgctccatcgatttttataccaaagtgctgggcatgaaactgctgcgtaccagcgaaaacccggaatacaaatactcactggcgtttgttggctacggcccggaaaccgaagaagcggtgattgaactgacctacaactggggcgtggataaatacgaactcggcactgcttatggtcacatcgcgcttagcgtagataatgccgctgaagcgtgcgaaaaaatccgtcaaaacgggggtaacgtgacccgtgaagcgggtccggtaaaaggcggtactacggttatcgcgtttgtggaagatccggacggttacaaaattgagttaatcgaagagaaagacgccggtcgcggtctgggcaactaatctcctgccgggcgcgaactcatcgcgcccgcatctttactgcatcgacaagtaatatttgtcataatgcgcgctgcaatttatccgtattaagagaatcagatgtccgataacgctcaacttaccggtctgtgcgaccgttttcgtggcttttatcctgttgtgatcgatgttgaaacagctggatttaacgccaaaaccgatgcgctgcttgagattgccgccatcaccctgaaaatggatgaacaaggctggctgatgccggacaccacattacatttccacgtcgaaccatttgtcg

SEQ ID NO: 854 - DNA, 2565 bp, Escherichia coli
  Strain O55:H7
  modified_base (1038)..(1041): a, c, g or t
  modified_base (1944)..(1947): a, c, g or t
atttgcaaccagaagcccttgccttcaacggcattgacccgaacgatcccgatcgcggcgcggtcagcgaatacgaggcgctgcacgaaatttttaaagttgtacgtaaaggtattaaagcgagcggctgtaaccgcgccattatggtggcgcacaacgccaatttcgatcacagctttatgatggccgccgcagaacgcgcctcactgaaacgtaacccgttccaccctttcgccacttttgacactgctgcactggccgggctggcactcggacaaaccgtattgtcaaaggcttgccagaccgctggcatggacttcgacagcacccaggcgcactccgcgctgtacgacaccgaacgcactgcggtgctgttttgtgaaatcgtcaaccgctggaaacgtctgggaggctggccgctacctgccgccgaagaggtgtaatcgagtcgatgcctgatgacatgcaatgattcaggcatctatagtgaggctattccacgcatcatgcatgatattcacggggaatagcgttaatggcagataatccaaacccttcatcgcccctgccggacgtgttttcaccggcgacccgcgactggtttcttcgcgcctttaaacagccgaccgctgtccagtcgcaaacctggcatgtggcggcgcgaggcgaacatgcgctggtgattgcaccgactggctccgggaaaacgctggcagcatttctctacgccctcgatcgactcttccgcgaaggcggcgaagatacccgcgaggcgcataaacgtaaaacctcacgcatcctctatatttcaccgataaaagccctgggcaccgacgttcagcgcaacttgcagatcccgttgaagagtattgccgatgaacggcggcggcgcggcgaaacggaagtcaatcttcgcgtggggatccgtactggcgatacgcctgcacaggaacgcagcaaactcacccgtaatccgccggatattctgatcaccacacccgaatcactctatctgatgctgacctcccgcgcgcgcgnnnngctacgcggcgtcgaaacggtaattattgatgaagtccacgcggtagcgggcagtaaacgtggtgcgcatctggcgttaagtctggagcggctcgatgcgctgctccacacctcagcacagcgaattggcctttctgccactgtgcgctcagccagcgatgtggcagcatttcttggtggcgatcgcccggttacggtagtcaacccgcccgcaatgcgtcatccgcagatacggattgtcgtaccagtcgccaatatggatgatgtctcatcggtcgccagcggcactggcgaagacagccatgccggccgggaaggctccatctggccatatattgaaacgggtatccttgatgaagtgttgcgccatcgctcgaccattgtctttactaattcgcgggggctggcggaaaaactgacggcacgattaaatgagctttacgccgcacgcttacagcgttccccgtctatcgccgctgatgcggcccatttcgagtcgacctctggcgcaacctctaaccgtgtacaaagtagcgacgtttttattgcccgctcacaccacggctccgtctctaaagaacaacgagcaatcaccgagcaggcgctgaaatcgggtgagttacgctgcgtggtcgcaacttccagtctcgaactggggattgatatgggcgctgtggagctggtgattcaggtggcaacgccgctttctgttgccagtgggttacaacgcattggacgtgccggacaccaggtaggaggtatctccaaagggctttttttcccccgaaccaggcgtgacttagtcgattccgcagtcattgtagagtgtatgttcgcaggcaggctggaaaacctgacacctccgcataatccactcgacgtccttgcgcagcacaccgttgnnnncgcggcgatggatgcattacaggtagacgaatggtactcccgcgtacgccgtgccgcaccgtggaaagatctgccaagacgtgtttttgacgccacgctggatatgctttccggacgctatccctctggcgatttttctgcttttcgccccaaactggtctggacagggagaccgggatattgaccgcccgacctggcgctcagctgttggcggttaccagcggcggcaccattccggatcgtggcatgtatagcgtgttattacccgaaggggaagaacaggccggttcgcgacgggtgggtgaactggatgaggagatggtatatgagtcgcgggtgaacgatattatcactctcggcgcaacctcatggcggatccagcaaatcacccgcgatcaggtgattgtgactcctgctccgggtcgttctgcccggctccccttctggcgtggtgaaggtaacggacgtccggctgaattaggcgagatgatcggcgattttcttcatttgctggcggatggagcgttcttttccgggactattcccccgtggctggctgaagaaaatacgatcgccaatattcaggggttgattgacgagcagcgcaacgcgacgggt

SEQ ID NO: 855 - DNA, 313 bp, Escherichia coli
  Strain O55:H7
  modified_base (182)..(182): a, c, g or t
ggggagtcgtcatctggtcctcgaacggtgccgtgatgaaattggcgactggcgtattattttgcactctccctatggaagacgggtgcatgaaccctgggcgctggcgattgccgggcgaatacatgcgctttggggcgctgacgcgtctgtggtcgccagtgatgacggcattgttgcgngcattcctgacactgatggtaaattgcccgacgccgcgatttttttgtttgaaccagaaaagttgctgcaaattgtccgcgaggcggtaggcagttcggcacttttcgccgcccgttttcgcgaatgcgcc

SEQ ID NO: 856 - DNA, 11875 bp, Escherichia coli
  Strain O55:H7
  modified_base (7758)..(7758): a, c, g or t
  modified_base (8772)..(8772): a, c, g or t
  modified_base (11243)..(11243): a, c, g or t
tgccgggccgcacgccgggccatcgcaccccgctttggcaacaacggctgcgcgccagtcagttgctggaaatcgctcagggatatccggattttccggccattctcgaaaccctacgcgaatgtctgcaagatgtttatgatcttcccgcactggaacgtttgatgcgtcgcctgaacggaggcgaaattcaaatatccgatgtaacgactactacgccctcgcctttcgccacaagtttattgttcggctatgtcgcggaatttatgtaccagagcgacgccccgctggcagaacgccgggcatccgtactgtcgctggacagcgagttactgcgcaatctactcggacaggtcgatccgggggaattactcgacccgcaggtcattcgccaggtggaagaagagttgcaacgactggctcctggcagaagagcgaaaggtgaagaaggattgttcgacctgctgcgcgaactggggccaatgaccgttgaagacctggcgcaacggcatacaggcagcagtgaagagattgcctcgtatctggaaaatcttcttacagtaaaacgcatcttcccgacgatgattagtggacaggagcgtcttgcctgtatggatgatgccgccaggctgcgcgatgccctcggcgtacgattaccagagtcactgccagagatttatttgcatagagtcagttacccgcttcgcgacctctttctacgctatctccgggctcatgctctggtcacggctgaacaactggctcatgagtttagtctcggtattgccattgtcgaagagcagcttcagcaactgcgcgaacagggtctggtgatgaatctgcaacaagacatctgggtgagcgatgaagtatttcgtcgtctgcgtttgcgctcgctgcaagccgccagagaagcgacgcgtcccgttgcagccacgacctatgcgcgattgctgctggaacgtcagggcgtattacccgccaccgatggtagcccggcgctctttgcctcaacatcgccaggcgtttatgagggggtggatggcgtgatgcgggtgatcgaacagcttgccggagtcggcttacccgcctcactctgggaaagccagatcttgcctgcccgcgtacacgactattcgccagaagtgctcgatgaattactggcaaccggtgcggttatctggtcggagcaaaaaaaactgggtgaagatgacggcctggtggcactgcatctacaggaatatgctgcagaatcgttcactcccgccgaagcggatcaggcgaatcgttcggcgctgcaacaagcgatagtcgctgttctggctgacggaggagcctggtttgcacaacaaatcagccaacggatacgcgacaaaatcggcgaatcggttgatccctcggcactgcaagaggcgttatgggcgctggtctggcaaggcgtcatcaccagcgatatttgggcaccgttacgcgccctcacccgcagcagttccaacgcacgcacctcaactcgccgcagtcaccgggctcgtcgtgggcgtcctgtctatgcacaacccgtctcgccgcgggtatcttacaacacaccaaatctggctggacgctggtcgttattgcaggtggagccactaaacgataccgaaaggatgctggcgctggcggaaaatatgctcgaccgctacggcatcatcagtcgtcaggcggtgatagccgaaaatatccctggcgggtttccatcgatgcaaacgctttgtcgaagtatggaagattccgggcgaattatgcgaggtcgttttgtagaaggtctgggtggcgcgcaattcgctgaacgtctgactattgaccgcttgcgcgacctggcgacacaagccgcgcaaacgcgccactatacaccagtggcgctctccgccaacgatccggctaatgtgtggggaaatcttctgccctggcctgcacatccggcaacgctggtaccaacgcgtcgggcgggtgcgctggtggtcgtttctggcggcaaattgttactctatctggcgcaaggtggcaaaaaaatgctggtctggcaggaaaaagaggaattactcgccccagaggttttccacgcgctgactaccgcactgcgtcgcgaaccacggctgcgctttacgctaacagaagtgaatgatctaccggtctggcaaacgccgatgtttacgctgctgcgtgaagcgggattttcaagttcgccacaagggctggattggggatagagaaaggactgacggatgcccgttcgcatccgtcagtattgcaggacggattattccgcgtccggctcttcagacttgtatttagcggcagtttctttgatcagctgctgcagttcgccacgctgatacatttcgatcacgatatcacaaccgcctaccagctcgccgtcaacccacagttgcgggaaggtcggccagttagcatatttcggcagctccgcacgaatgtccggattctgcagaatatcaacataggcaaaacgttcgccacatgcggcaagcgcctggactgcctgggcagagaaaccgcagctcggcagtttcggtgaacctttcatgtacagcaggatcgggttttcagcaatctggcgttggattttttcgatagtggtgctcattgtcttgcttcctcaaacttctttacggcagtaatctgacattgtagcgggtcagtgcggcatcggaaaataacattttcatcacgcttttgctattttatccctttgctctatttgttgcatttcaaatattcgtttcttccctgatgcacggcaaactggcgtatttatgaccatttttagctttcactgctgcatttttttgcgctcgccaacgaaacgtattttttaacaataaaagctattaactttctcttcttctatgcattagaatcatcaagttttgtaaatcagacgcaggcatgatagacctgccttaacagagggacgctcagtggcgcggataaaccgtatttcgatcacgctctgtgctttactttttaccaccctgcctttaacgcctatggcccatgcttcaaagcaagccagggagagttctgctaccactcatatcaccaaaaaagcagataaaaagaaaagcacggcaaccaccaaaaagacccagaaaacagcgaaaaaagccgccagtaaaagtacgaccaaaagcaaaaccgcttcttccgttaaaaaatcttccattaccgcttctaaaaacgccaaaactcgcagcaaacataccgtcaataaaacggcctcagccagctttaccgaaaagtgtaccaaacgtaagggctataaatcgcattgtgtgaaagtcaaaaatgcagcgtcaggaacccttgccgacgcacacaaagcgaaggtgcaaaaagccacaaaagtggcaatgaataaactgatgcagcaaattggtaagccatatcgttggggtggcagctcaccgcgtaccggttttgattgcagcggcctggtttattacgcttataaagatttggtgaaaattcgtattccgcgtacggcgaatgaaatgtatcacctgcgcgatgcagcgccaatcgaacgtagtgaactgaaaaacggcgacctggtctttttccgtactcagggacgcggtacagccgatcatgtcggcgtgtatgtcggcaacggcaaatttattcagtcaccgcgcacaggtcaggaaattcaaatcacttctctcagtgaagactactggcagcgccactatgttggcgctcgccgggtaatgaccccaaaaacacttcgctaaaactttaccctgttgttacggcaacagggtaagttcatcttttgtctcaccttttaatttgctaccctatccatacgcacaataaggctattgtacgtatgcaaattaataataaaggagagtagcaatgtcattcgaattacctgcactaccatatgctaaagatgctctggcaccgcacatttctgcggaaactatcgagtatcactacggcaagcatcatcagacttatgtcactaacctgaacaacctgattaaaggtaccgcgtttgaaggtaaatcactggaagagattattcgcagctctgaaggtggcgtattcaacaacgcagctcaggtctggaaccatactttctactggaactgcctggcaccgaacgccggtggcgaaccgactggaaaagtcgctgaagctatcgccgcatcttttggcagctttgccgatttcaaagctcagtttactgatgcagcgatcaaaaactttggttctggctggacctggctggtgaaaaacagcgatggcaaactggctatcgtttcaacctctaacgcgggtactccgctgaccaccgatgcgactccgctgctaaccgttgatgtctgggaacacgcatattacatcgactatcgcaatgcacgtcctggctatcttgagcacttctgggcgctggtgaactgggaattcgtagcgaaaaatctcgctgcataataactgatggcaaatgcagtattgcctgatgcgcttcgcttaccatgccaacgcggatgaggcgttaacagcgcattcggcaagataaatcgcacgttgtcagcaactgtaacgcagaaggttatccttctgcgtttttgtttaattagctgttagcaacgcaaactgtttcaggttgttttctggctgacataaacaccagcaataatgccagtcccgcgacaatcgcccccatcaccggcacaaagctgtatcccagcccagcggaaattaccgcaccaccagcagctgctcccagcgcatttccaagattaaaggcaccaatattgactgatgaagacagacctggcgcttcactggcgacacgcatcacgcgcatctgtaacggcggtacgaccgcaaaggttgcagcgccccacaccaccatgctaatagctgcgccgaactcattgcgggccaggaacgggattgccagcataatcaccatcagcagcaacaaaaagcctttcaacgtgccgttaactgaacgatctgccagtttgccgccgagatagttaccgatagagaatccgacaccaatcagcaccagcattgccgtgacgaacaccggtgttgcgtgggtaatactttgcagtaccggagagatataggtgtagagagtaaacattgcaccagctcccagtaccgtcgtcagcaatgcagacagcacctgcggacgcattaataccgccagctcttttttcacttcaggtcgtgcccctgcaccacctttaggtaatgagaagaacagacttaccattgaaatcactcccagccccgccgttgccagaaatgacatccgccagccgatggtttcacccaaccaggtcgccgccggcacgccaccgatatttgccagggttaaccccataaacatagtggcaactgcgctggcctgtttatgttttggcaccacgcttgcggccacgactgaacccaaaccaaaaaatgctccgtgattcaggctggtcaaaatgcgtgaaagcatcagggtcatataatccggcgcgatggcggaaagtacgttgccgagcgtgaaaattgccatcaggaaaatcaacgcactgcggcgggcacgatgagaaagtagaagcgtcatcagcggcgcgccaaccattacgccaactgcataggcactgattaacattccggcagcgggaatcgagacatccacaccgcgcgcaatgacgggcaacaagcccattggcgagaactccgttgtcccgataccaaacgcgccaatcgccagcgccagcaacggatagttaattttcatgccttatctccacctcttcgcgtcattacgcgatattcattaaagtggcgaaagcatgacagcaatcacaaaaaaatgaaaataacaaaaagagaaaacacttttgccattttgctaacaaacaggaaggagatgcgagggagaacgcgctccctcgagaggaaatcagtgcagcgcggcagtcaaacccacggccacgatcaaaccgaggacgataatcgttgttaccagtgaaaatttaaggtcggtgctcatcaagttttctccttttttattaccacacaaaaagtgatattacgcatttttacacactgtgatgaaaaaatctcccgtcatttataatgataagtgtttttaccacttccccttttcgtcaagatcggccaaaattccacgcttacactatttgcgtactggccattgaccccttcctgacgctccgtgtcgtttttccggcgtaccgcaacacttttgttgtgcgtaaggtgtgtaaaggcaaacgtttaccttgcgattttgcaggagctgaagttaggggctggagtgaaatggaatggcaacaataaaagatgtagcgaaacgagcaaacgtttccactacaactgtgtcacacgtgatcaacaaaacacgtttcgtcgctgaagaaacgcgcaacgccgtgtgggcagcgatcaaagaattacactactcccctagcgcggtggcgcgtagcctgaaggttaaccacaccaagtctatcggtttgctggcgaccagcagcgaagcggcctattttgccgagatcattgaagcagttgaaaaaaattgcttccagaaaggttacaccctgattctgggtaatgcgtggaacaatcttgagaaacagcgggcttatctgtcgatgatggcgcaaaaacgcgtcgatggtctgctggtgatgtgttctgagtacccagagccgttgctggcgatgctggaagagtatcgccatatcccaatggtggtgatggactggggtgaagcaaaagctgacttcaccgatgcggtcattgataacgcgttcgaaggcggctacatggccgggcgttatctgattgaacgcggtcaccgcgaaatcggcgttatccccggcccgctggaacgtaacactggcgcaggccgccttgccggttttatgaaggcgatggaagaagcaatgatcaaggtgccggaaagctggattgtgcagggtgactttgaacctgaatccggttatcgcgccatgcagcaaatcctgtcgcagccgcatcgccctactgccgtcttctgtggtggcgatatcatggcaatgggcgcactttgtgctgctgatgaaatggggctgcgcgtcccgcaggatgtttcgctgatcggttatgataacgtgcgcaacgcccgctattttacgccggcgctgacaacaatccatcagccaaaagattcgttgggtgaaacagcgttcaacatgttgttggatcgtatagtcaacaaacgtgaagaaccgcagtccattgaagtgcatccgcgcttgattgaacgccgctccgtggctgacggcccgttccgcgactatcgtcgttaatcacccgttgcgggagtctcttccggctcccgcagccactccttattcagcgtctcactatcgccgagatactcaagcaaccaggttaacgcaggcgacatatcattttgctgccatgtcagacaacatgccgaatccggaaaggggttttccagttctaatgctacccacttcccctcattaagccacggtttggcgaaatgtgttggcaccatccctatgcataatcctgccgagatacaggttgccgatgattcccagtcaggcacgacaactcttttttggttatccagcaaccaggtaatacgcttaggtagcgttcgcgaggtgtcttcgcgcaccaacgacggccagttgngcaacgtatcatcgctgaacgggccatccatcaacgccagcgggtgatggctggcaacaacgcaactccagcttagcatccccatatcccggaaggcataacgaccgcctaccggaatcgcgcgtgttgcgccaatcgccagttccacgcgcccgtcggaaagcgcatcccagacaccgttgaacacttcctgaaagacaagaagttcgacatcatcaaaatggcgataaaaatcaacgatcatctgccgtgtacgttctggcctgacaatattatccactgcgatagctaactgaccgcgccagccgttcgctatctgctgacattgctggcgggtgatctgcatttttttgacaacagagagcccttctttgagaaaccacgctccggcagcggtcagctccacatcacggtgccgtcgttcaaacagcggcaccgccagccactcttccagctgacgcacggtatagctgaccgcagaaggaacgcgatgcagctcctgtgccgcagcgctaaaactaccattacgcgctaccgcatcaacaacttcgagtgaatattctgaccacatagtctgcctgcaaaatttttgaaaccagtcatcaaatattaccgtttcacaacactaatttcactccctacactttgcggcggtgtttaattgagagatttagagaatatacatgcaacctgggaaaagatttttagtctggctggcgggtttgagcgtactcggttttctggcaaccgatatgtatctgcctgctttcgccgccatacaggccgacctgcaaacgcctgcgtctgctgtcagtgccagccttagtctgttccttgccggttttgccgcagcccagcttctgtgggggccgctctccgatcgttatggtcgtaaaccggtattattaatcggcctgacaatttttgcgttaggtagtctggggatgctgtgggtagaaaacgccgctatgctgctggtattgcgttttgtacaggctgtgggtgtctgcgccncggcggttatctggcaagcgttagtgacggattattatccttcacagaaagttaaccgaatttttgcgaccatcatgccgctggtgggtctatctccggccctggctcctctgttaggaagctggctgctggtccatttttcctggcaggcgattttcgccaccctttttgccattaccgtggtgctgattctgcctattttctggctcaaacccacgacgaaggcccgtaacaatagtcaggatggtctgacctttaccgacctgctacgttctaaaacctatcgcggcaacgtgctgatatacgcggcctgttcagccagtttttttgcatggctgaccggttcaccgttcatccttagtgaaatgggctacagcccggcagttattggtttaagttatgtcccgcaaactatcgcgtttctgattggtggttatggctgtcgcgccgcgctgcagaaatggcaaggcaagcagttattaccgtggttgctggtgctgtttgctgtcagcgtcattgcgacctgggctgcgggcttcattagccatgtgtcgctggtcgaaatcctgatcccattctgtgtgatggcgattgctaatggcgcgatctaccctattgttgtcgcccaggctctgcgtcccttcccacacgcaactggtcgcgccgcagcgttgcagaacactctgcaactgggtctgtgcttcctcgcaagtctggtagtttcctggctgatcagtatcagcacgccattgctcaccaccaccagcgtgatgttatcaacagtagtgctggtcgcgctgggttacatgatgcaacgttgtgaagaagttggctgccagaatcatggcaatgccgaagtcgctcatagcgaatcacactgatctatatcgatatacttatacttaggctgctaacaaaattttgttgtatgattgaaattagcggcctatactaatttcgagttgttaaagctacgataaatattatgtttttacggggacaggatcgttcccgactcactatggatggtcatttcggcaagggttcctcctttccctctgttctacgtcggattatagactcgcggttttttctgcgagatttctcacaaagcccaaaaagcgtctacgctgttttaaggttctgatcaccgaccagtgatggagaaactatgagttcatcgtgtatagaagaagtcagtgtaccggatgacaactggtaccgtatcgccaacgaattacttagccgtgccggtatagccattaacggttctgccccggcggatattcgtgtgaaaaaccccgatttttttaaacgcgttctgcaagaaggctctttggggttaggcgaaagttatatggatggctggtgggaatgtgaccgactggatatgttttttagcaaagtcttacgcgcaggtctcgagaaccaactcccccatcatttcaaagacacgctgcgtattgccggcgcccgtctcttcaatctgcagagtaaaaaacgtgcctggatagtcggcaaagagcattacgatttgggtaatgacttgttcagccgcatgcttgatcccttcatgcaatattcctgcgcttactggaaagatgccgataatctggaatctgcccagcaggcgaagctcaaaatgatttgtgaaaaattgcagttaaaacctgggatgcgcgtactggatattggctgcggctggggcggactggcacactacatggcatctaattatgacgtaagcgtggtgggcgtcaccatttctgccgaacagcaaaaaatggctcaggaacgctgtgaaggcctggatgtcaccattttgctgcaagattatcgtgacctgaacgaccagtttgatcgtattgtttctgtggggatgttcgagcacgtcggaccgaaaaattacgatacctattttacggtggtggatcgtaatttgaaaccggaaggcatattcctgctccatactatcggttcgaaaaaaaccgatctgaatgttgatccctggattaataaatatattttcccgaacggttgcctgccctctgtacgccagattgctcagtccagcgaatcccactttgtgatggaagactggcataacttcggtgctgattacgatactacgttgatggcgtggtatgaacgattcgtcgccgcatggccagaaattgcggataactacagtgaacgctttaaacggatgtttacctattatctgaatgcctgcgcaggtgctttccgcgcccgtgatattcagctctggcaggtggtgttctcacgcggtgttgaaaacggccttcgagtcgctcgctaaaggctattctatcgccccctctccgggggcgatttcagatcaggcttctgtacctggttgattcatggcattttctcgtgccgccagcacacgttctaccgtatctaccactgcctgagtttgtggatcgatttcaatgttgacgcgtgcnccaagttttttcttcccaagagtcgtgcgttccagagtttccggaattaaatggacgcaaaaacgcgttggcgtgacttcgccgacggtcaggctaataccgtcgatgccaataaatcctttgtacaggatatatttcatcaactgactatcctggactttaaaccagatctggcgattattttccgaggttaatattttcgccacttcagcggtggtcataatatgacctgacattaagtgtccgccaatttcatcactgaatttcgccgcacgctcaacgtttacccaatcccccactttaaaatcgccaagattggtaatgcgcaacgtttctttcatcaggtcaaaactgacatggttgccgttaatttccgtcacggtcaggcagcaaccgttatgcgccacggaggcaccggtttccagaccgtccagcatgtggtcgggtaactccaccacatgtgtgcgaaaatttggtttctcgtcaatcgacaccagttttgcggtgccctgtacaatccccgtaaacatacttacaactcctgaaatcagttaagacattctgttcagcacaatagcaggtggaaaacgcccttaccagtgaaggggtaagaatggctattttttcactgg

SEQ ID NO: 857 - DNA, 10177 bp, Escherichia coli
  Strain O55:H7
  modified_base (1206)..(1206): a, c, g or t
  modified_base (6259)..(6259): a, c, g or t
  modified_base (6536)..(6536): a, c, g or t
  modified_base (10175)..(10176): a, c, g or t
aatcctcgctacaatagactgaatttcccctgcttcttctttttgctgcctattcaggcggctttttagtctctcatataactacaaataaaaggtgttcacgtgcagaagtatatcagtgaagcgcgtctgttattagcattagcaatcccggtgattctcgcgcaaatcgcccaaactgcgatgggttttgtcgataccgtgatggcgggcggctatagtgccaccgacatggcggcggtcgctatcggtacttctatctggcttccggcgatcctctttggtcacggactgctgctggcattaacgccggttatcgcgcaattaaatggttccggtcgacgtgagcgcattgcgcatcaggtgcgacagggcttctggctggcgggttttgtttccgttctcattatgctggtgctgtggaatgcaggttacattatccgctccatggaaaacatcgatccggctctggcggacaaagccgtgggttatctgcgtgcgttgctgtggggcgcgccgggctatcttttcttccaggttgcccgtaaccaatgtgaaggtctggcaaaaaccaagccgggtatggtaatgggctttatcggcctgctggtgaacattccggtgaactatatctttatttatggtcatttcggtatgcctgagctcggtggcgttggttgtggcgtggctactgcggcggtgtattgggtcatgttccttgccatggtttcttacattaaacgcgcccgctcgatgcgcgatattcgtaacgaaaaaggcaccgcgaaacccgatcctgcggttatgaaacgactgattcaactcggtttgccgattgcgctggcactattctttgaagtgacactgtttgccgtcgtggctctgttagtgtctccgctcggtattgttgatgtcgcaggacaccagattgccctgaactttagttcactaatgttcgtgcttccaatgtcgctggcggcagcggtaactatccgcgtaggttatcgtctgggtcagggctcaacgctggatgcgcaaaccgctgcgcggaccgggcttatggtgggtgtctgtatggcaaccctgacggccatattcacggtttcactgcgggagcaaatcgccatgttgtacaacgacaatcccgaggttgtaacgctggcggcgcatttgatgttgctggcggcggtatatcagatttctgantcaatccaggtgattggcagtgggattttgcgtggttataaagatacgcgttccattttctatatcacctttacggcttactgggtgctgggcttgccaagcggctatattctggcactgaccgatctggtcgttgaacctatggggccagcaggcttctggataggctttattattggcctgacgtcggcagccattatgatgatgctgcgtatgcggttcctgcaacgtctgccgtcagccatcattctgcaacgagcatcccgctaataaagacaaggcgcaaccttcacggggtgcgcctgtgtttttacgcaggctggagcgttgcgccaatcccgtcttcgtctggctgtagtttcagtgcgttacacagagtttgccgactggcatctgttatctgaacgcgtatatccccgttaacttcccctttcacattgatgaagtcaggtgaaatttctttcgcactggtttgcaggcaaatcgctccctctccgcgcaggcgtttcactttcagctgcacatgcgttgccgcaccagtgatcagccacagttttccgccattcagattgatgttaccaatactgaaagtgacactgtcaccttttaccgtactgccgtcgagaatcaatacaccgccctgctgtacagtaatcgttgattgttgcagatctgcgccatagccaataatcattgaagcgccgtccagtaatgcaacactcccggtcagttcaaccggtgcgcgatcttcctctacgacaaaattttcgtccgcgctggtgggtgacaacaggatcactgttccaccttgtattaccgcattttccagcgtaccggcatgcacttcagcccgaccacccacattaacggacaggttttgcgtcttaccgtaactgtagagctgaagaccatccgtccccagacgatagatggctccattctcaacaatagtgtcagagtcttcaccaccgagattattcatggtgccatcagcaagcaacgtatcattggctttccccgccagcataaaaacgccgccctgattaatctcacaattgctggcttccccacctggatacaccaacaattcaccaccttcatctaccacgaccgctgaggttgtcccattaaccaacaggccgccctcttgatcgagaatgattttttccgcgcgatgtccttccagtacacgcaggttaccgccattttccagcaacaaaccgcaggcataaccctgatcaacgctgaattcaccttcgggatggcggccattaaccgtagcgagcgtagagagactaattgcgcctccctcggactgaacaatatctgtggcaatggcaccgtcgctgaccgatagcgtgccattgttaccgtactgtgtgcatttggcgatcccaccggttgccactttcaaccagccagcccccgtgaccacggtattttcggctcttccgccagcttcaacaatcaactcgccttcagtaagttgcgtcgcgccaatgacctcgccggtcttaacaatttgcacattcccgtcgctcatcaagtttttcgcatcagatcccatgatttattcctttgctgcatctgtgtgcctttattgctacctaagtgtaaaggctacggaggatttatccacgacagatttgagatggtggcaaacaactctgtttaaactctgatacacgaattattgggttgtatcagatgtaaatgcgatcctgaataaaaatcgcccttgcaaatcaacaaaatatagccaatttgcttaaaagctctgcaaacggtcgaaatagcgcagaaaattacgttttgcctcttgccaccttcccactctgccgctaatattcgtccccgttgtcacctacaacgttgcgttcatagctcagttggttagagcaccaccttgacatggtgggggtcgttggttcgagtccaattgaacgcaccatcctgcgtccgtagctcagttggttagagcaccaccttgacatggtgggggtcggtggttcgagtccactcggacgcaccagattttcttaatctggtcttctcctttttccctctgcttcttctctgtatccaatacgttaaaagatttacactgtcttcgtatgcgttatcagaaggagaatcgctatggcaactttgttacaacttcattttgcttttaatggcccatttggcgacgcaatggctgagcagcttaaaccacttgcagagtcgattaatcaggaacctggttttctgtggaaggtatggacagaaagtgaaaagaaccacgaagccggtgggatctaccttttcactgatgaaaaaagcgcccttgcctatctggaaaaacacactgcccgactgaaaaaactcggcgttgaggaagttgtcgccaaagttttcgatgtcaatgagccactgagtcaaatcaatcaggcaaaactcgcctgacagaatttaatcaagggcggttagcgcccttttcatccctgtctgaaatttctcaaattctaaaaatctcaaccaaacttatctgataacactaaattcgaaagaatgcgtacaggtaagtaacaatgaaaaaaattgcaattgtgggtgccgggcctacggggatctacaccttattctcgcttctacagcaacaaactccactttctatttctatcttcgagcaggctgacgaggccggtgtcgggatgccatacagtgatgaggaaaactcaaaaatgatgctggcaaatattgccagtattgaaataccgccgatttattgtacgtatctcgaatggctacaaaagcaagaagccagtcatctccagcgttatggcgttaaaaaagaaaccttgcacgatcgtcagtttttaccgcgaattctgctgggcgaatatttccgcgatcaatttttacgattagtagaccaggcacgaaagcaaaaatttgcagtggctgtttatgaatcatgccaggttaccgatctgcaaattacaaatgctggcgtcatgctcgctacaaatcaggatttacccagcgagacgtttgatttagcggtgatcgccacgggtcacgtctggcctgatgaagaagaagcaacccgaacgtattttccaagcccgtggtcaggcttgatggaagcaaaggtcgatgcgtgtaacgtgggtattatgggaacatccttgagcggactggatgcggcaatggcagtggctattcagcatggttcgttcattgaagatgataaacaacacgtcgtttttcaccgcgataacgcaagtgaaaagctaaatattacgttaatgtcgcgcacgggtattttacccgaagccgatttctattgccctattccctacgagcccttacacatcgtcactgatcaggcattaaatgctgagattcaaaaaggcgaatatggccttttggatcgggtatttagattgatagtagaggaaatcaagtttgctgatccagactggagtcaacgcatagccttagagagcctgaatgtcgattcctttgctcaagcctggtttgccgagcgcaaacaacgcgaccaatttgactgggcagaaaaaaatctccaggaagtcgaacgcaataaacgagaaaaacatactgttccctggcgttatgtcattctgcgcctgcatgaagccgtacaggaaattgttccacatctgaatgaacacgaccataaacggttcagtaaaggccttgcccgggttttcatcgataattatgcggcaatcccttcagagtctattcgtcgcctacttgccttacgtgaagcgggaatcattcatattctcgctctcggtgaagactacaaaatggaaattaacgagtcgcgcaccgtcctgaaaacggaagacaacagctactcgtttgacgtttttattgatgcccgcgggcagcgtccgcttaaagtgaaagatattcctttccctggactacgcgaacaattacagaaaacaggggatgaaatccctgatgttggtgaagattatacgttacagcaacccgaagatattcgtgggcgcgtagcgttcggcgcgttgccctggttgatgcacgaccagcctttcgttcaaggacttacggcatgtgcagaaattggtgaggcgatggctcgggcggtcgtaaagcctgcatcccgtgctcgtcggcgtctttcgtttgattaaaggtaaagctatcagcactcaacaaactgatgctgttcattaagacgatagcggactccggctcgaatattgttttcaccttcaatggcgacggcgaagcgaactctttcgccgtcatgatatgccagtgcggcgctgccccctggcccgagaataattgagtcgaccacgcccgtgctcactaccgttgaattttcaccgctggcaatgatgtgtacattgtcgccgctgttggcaattctggcgtttgcgccaaagctggcgatttgcaccaggtcaccattactggcgacatgacaccgtttacccaatgtacaaacgcgtactcgcattccggtattcgcaatccgactgctatctccagcgctgcttatccgcgaagaattgccggttactgcaacccgtgcgcgctcaccggagctgccaatgtgactgttaaagccgacacttccaatccgcacgctataacccatactggcaatttgtgcagcatacccagcggttgcgattctggcgttatcctcacaacagccgatgcgagcatgatcgtcgctgcgggcaaactgactgcaaaatgctctctctccggggtctgtggccagtttttgcatagaggaaacttcctgatgcgcgaagttttcatccgccagccattttttccacgcatactcaaccagactctccgcccagtccgtatatccttcctcaatcagtgcatgatgaatatcggcataactaccgccgcgtgggaaatggcgcaggaaccagcgatacatcaccgctccgatacgccattctcgcaggtctgctcgtgtaatgatcattcgttagtgccggtgatagccatcgaccatgcttttaaaggtttcgtgtggcgnacgccccgtggtgcaaagataaagatgaccgaagataaaaaagaggcttataaatgccagagcaaaatgcgcctgcaataaccagtatcttacgccaggaaacacatctcccacggcttgcggatagagacacagcagccccgtcaatagtaacaacggcagcaatccatacatgacaccaacataggcaacctgctgtaagggattaaatttagactgggttgttgccgggaaaggatgttcttccccctgcataatgccaaacaaataaaatcgngtttgttttgccgcccgctccagccaaccctgacgacgaatgcgatagtggtggccattacccccaacgccattgatcagaacaaagccgagccagcatgccagtaacaaaaatccgcaaacttcatgcaccgcaaccagacttttaaccgcagttgcgcccaccagcgcaaagtgatttatcagcccacttgccagcaacaatacaaagagtaacgcattcgaccagtgccataatctgaccgctttgctgtaaagataaatcctctcaccatgatcggtggctgatttcttcacgccacgagcacgaagcaaggcgtgcagccccagcaccaaccacatcccaaccagcaatactccggcaatgatcaaccacaccggccaaaattcgggagtgaactgtggcacatagttcgctaactggctctgaaactgttcagcatgttgcgacgggttcatacattttcctttttaatcaaatgttgaccgaaccggcgatacagatgcggtttcccggcaccaggtagctgatattgatagtatttattatcctgcaaccacgcctgaatttcagggctatcttcgcgaccaaagatcaatgcgtgttccgggcaagcgctgacgcaaatgggcggaaagccttttgccagtcgggactcagcgcagaaatcacatttatctgccactttagtgacagggttaaggtagcgaacctggtacggacaagcgccaatgcaataactgcagccgatgcactgcgatttttctacccgcacgatcccctgctcatcacgccacgacgcccctgtcgggcatacgtcgatgcacggagcatcttcgcagtgctgacatgactggcgaaaaaagtgatactgcgtttcgttgtcgttatcggtgactggaatgtgtgctatcgataaacggcttccctgagcgggggcgtggttagttttacggcatgcgcgggcgcaaatattacagccattgcaccgtgactcgtcatgaatcatggcataccgaacttccttttcttgcctcgtgttcgctaacagagaagacgcagaaccagtaaaaaagattactgttcccatccccagaacaaatttgcgtcgagtgaaggacatctgattatcccctaatgcagtggctgcaactgtccaccctatccatgacatctccctgaaatttcaggggttctgaaactgctctacctcgaaccattcgcataagccataagccttgccataggtcataaatcgctcgctaaacaagtacaacaccgccgtcgatgactctacctgccgtatatcggcatattcaggtgcaacatccattgcggcgatcgcggcttcaatctgcgcttcctggaagtaatatggcgcttgcatcagcatggcgactttgtaaggacgaggatacgtctggcactcaaaacgaacggcgtgtgcaatggcgcgacaaatgtcctgctccacaacttgcaaagacatcgccgcgtagttttcactcatggcctgcgttgagtaatagtaatcatcctgacttcccgtcatacaagcgatatccgcgtagtctccgttctgcttgatgttttccagcaaaactgacagttcctcttctgcaactgaatagggtggcgagagaaacacggcgcgcgccaccagctgcccagccacagaatgctggcgaatgaactctgccaggatttcagccggttctggttcggttaccgtatcaacggggtgacgcatcccctgcaaccattgccgcttcgcctcgtcaacttcgctgactttcgctaacggcaattcatcctgatggttcatcttacccattccttacgcaggcagtagattgtgtgctgccagatcggcggcaatatcttccagccccagacgctgcaatgtttcgcgggtcggacaaccaagctgtgggtcccagcccatttctttgtagaacatcgtgagcgaggcatgcatatcatcacgatccattttgtcagtaccttcagtaaagaccgggatctgcggatccttgtcgaatacccaggaacagataagatcgtgttcattacgcatatctttggtttgcatcagtttcaccgtgtaggcacgatgcaatgtaaagatacgctctgcagctaaatctaatttttcctgagtcatctcttcgccagtgatcgctttgaagaatttggcttcaagcgccagatcgccccggtaattacggcttttcagcggcgaaacggtcattggccagacccagttgcacagggtgacggcgttatgcaaacagacccgcaacagcgaccacttagcatatttaatttttgcgtcattgattggcgtgtagtttttggtttcatcgtaagcatcttcagaaccaaaaagttctttcgccacttcacgttgcagtttcaatggcaagccggaaccaataaagttgatatgggtatgcgtcatgcagtcacggttgaacatacagttaacaatggaaccgacctgcgctgacgcttcattggcatggtgaaccggatagccaaacggcgaccagagtttatttttcgcgtagccccagtactcttcacccaaattccagcgttctgcgatggcatatgaaccatcagccaggtgactcagctcacccacacgatgcgccagacggtagtaaaaatctttaatgaagttaacgtctcccgcttccagttgatcccagcgaatttctgcatactcttcagcaggcagaacacgcttgaacacacctttgctgtaacaataagtaaagtcgcgatgcaactgcccgtagttacaccataggccgtagtcatcgaacaaattcagaccaaccaggttaccaatcacacgaccatcgtctttatcttcaaaatctttcggcccgttcgggaagatggtggtatggacaaagtttgctacacaagtgttaccacctgtgctgggcacgccaaactctttcacccgaggaatattcatttgggtcatacaacggatcgggcaagagtggcagccgctcatttttactgtgtatttctctgctgccggacctaagtcaaaaacggatttataggtacgaaagccgaccgtattctgattgcctggcggaatttcacccgtttcaattggaccgccttcagccgcgccccaaaacagccctttacgtgctgtccagcgtgacttgggatctgaatactctgcccacgattgcggcgtacttggcacgacatggttgttattcgcaccgataagttcagtcatcatgtaatcattgagacgcttcatctcctgacgatcggcaatgttgacccctttcgtcccttcaaccgcaatcgctttcaggtttttcgaacccattattgcgccagttcccgcaccgccgctgtggttacggctattcaacatgccagagagaggaacaaggttttccccagcctgaccaatagccgccacacaggtttccggactggtcaagcgacaaatttcttccgtcgttgcgcgcgtcccttttccccataagaaatctgctttttccaggctaactttgtcatctttaatcttcagccataccggtgatttcgccttcccttcgataataatgacgtcgtatccagcgaatttcatttgcnnt

SEQ ID NO: 858 - DNA, 1259 bp, Escherichia coli
  Strain O55:H7
gccacccatatgggcatcgacgactaaatttcctttggtaaaaatagaaagtgaggtgatatttacgcgagaactacagggggcaccagatccagttaatgggccggtagcaaagactaatttattcgcttcatcgaaaggtttcgtgcctggcggtacttcgtcatacataattttgtagccgaagcccatgccaccgacaaaacttttaaacttactggaatcttcgagggtaatatttcctgtcgtgagattgactcttaatatattacctgtccaaccgttagtcatgattttttcctttgcaagattcacacagtaatatctttccactcgataatttttaacgcccctgttgggcaggcgtttgcgcattcaccgcataacacacatttcgaggattttttactttcggtatttacggtggccatcatccacgggcatgccgtagtacaggcgctacagccaatacaacgtttatgatcgacggtaatacagccttctttctgctgccaggtaatcgcaccaatcgggcagacgttcatgcattgcggctctttgcattgacggcaggtgtccgcggtatagttgagatcgccatacaggccgccgccagagccaaccccgttgtcgccaaagaaataattgcgatggattttgatacgggagaagaatgtccctactgagccatcgttgaagttggtacaagagatttcacagcggtggcaacccgtgcatcgcgctcgctgggtcaccagcacccctttgggtgtatttatcaaccctactgtgccgctatcaatatcttcctgtttgcaacccaaaagtgacagtaacgcaggggcaattgttagaccagcaaggccttttcctgatatacgcaagaattctaatcgcgttaagccaatatctaatagtggacgatcaaccgggttcatttatttcgcatcctcttcgcaaacacagtgctgacaattcagcagcctgatattaagcattcaactaatacgctgctgactctgtccccaacaccagatattttccctaacccgatagtgtatgagaaaagatttaacgccgataaactaatcctttatggttaggagaaaaaataatgtggttattctgggctcttaacattgatcattatcaattaaaattacaaagcaagaaattataagtgaactgatatttattatcatttgaaatgaatttaacttaagcgacaattatttgtgacggtcattgcagaaaataaa

SEQ ID NO: 859 - DNA, 23914 bp, Escherichia coli
  Strain O55:H7
  modified_base (8)..(9): a, c, g or t
  modified_base (3569)..(3569): a, c, g or t
  modified_base (3654)..(3654): a, c, g or t
  modified_base (3862)..(3862): a, c, g or t
  modified_base (8446)..(8446): a, c, g or t
  modified_base (9974)..(9974): a, c, g or t
  modified_base (11339)..(11339): a, c, g or t
  modified_base (11710)..(11713): a, c, g or t
  modified_base (14898)..(14898): a, c, g or t
  modified_base (14900)..(14900): a, c, g or t
  modified_base (14902)..(14905): a, c, g or t
  modified_base (17380)..(17383): a, c, g or t
  modified_base (20311)..(20311): a, c, g or t
  modified_base (22019)..(22019): a, c, g or t
  modified_base (23326)..(23326): a, c, g or t
  modified_base (23429)..(23432): a, c, g or t
atcgttannaattaaaacacatatcgaaattcgtataatttcagcagttgttatttagaatgattaactggaccgcaactgaagcaagaatatcaggatgaagcttatcgcctcatcctgaatggtcattttaccagtgcgttaatgacggtttccatcgcctgcttttccagctcactgcgctgaatgcgtttattggctaatgctgtacgtaatacgcctgcgataacaatatgctttggttcctgccccagatcgcgcatttccagcacaactttaccgacaactctgcacatttctcggtacagttcatcctcttttgtccgatttcccattctttatacctatttatcatgccaactatcagcatatatcaatctaaccaattaaacaaaaatcaaacaaaatcagacaaataacgcgataaattattttaactgtagcaattgagcgatgatgtatttatacaccggatgaactttcacttatcttcacagtgacaaccccggcaccagacgttgcgcaaacagcgaagtttttgcgtaaccttttccctggaacgttaaatctttgataacaatttattgtctaacaagttgtatattttttgaaacgctgtttttgttttccttttggattaatttcagcgtataatgcgcgccaattgactcttgaatggtttcagcactttggactgtagaactcaacgactcaaaaacaggcactcacgttgggctgagacacaagcacacattcctctgcacgctttttcgatgtcacctatccttagagcgaggcaccaccactttcgtaataccggattcgctttccggcagtgcgcccagaaagcaagtttctcccatccttctcaacttaaagactaagactgtcatgaaaaagaccaaaattgtttgcaccatcggaccgaaaaccgaatctgaagagatgttagctaaaatgctggacgctggcatgaacgttatgcgtctgaacttctctcatggtgactatgcagaacacggtcagcgcattcagaatctgcgcaacgtgatgagcaaaactggtaaaaccgccgctatcctgcttgataccaaaggtccggaaatccgcaccatgaaactggaaggcggtaacgacgtttctctgaaagctggtcagacctttactttcactactgataaatctgttatcggcaacagcgaaatggttgcggtaacgtatgaaggtttcacaactgacctgtctgttggcaacaccgtactggttgacgatggtctgatcggtatggaagttactgccattgaaggtaacaaagttatctgtaaagtgctgaacaacggcgacctgggtgaaaacaaaggtgtgaacctgcctggcgtttccattgccctgccagcactggctgaaaaagacaaacaggacctgatctttggttgcgaacaaggcgtagactttgtcgctgcttcctttattcgtaagcgttctgacgttatcgaaatccgtgagcacctgaaagcgcacggcggcgaaaacatccacatcatctccaaaatcgaaaaccaggaaggcctcaacaacttcgacgaaatcctcgaagcctctgacggcatcatggttgcgcgtggcgacctgggtgtagaaatcccggtagaagaagttatcttcgcccagaagatgatgatcgaaaaatgtatccgtgcacgtaaagtcgttatcactgcgacccagatgctggattccatgatcaaaaacccacgcccgactcgcgcagaagccggtgacgttgcaaacgccatcctcgacggtactgacgcagtgatgctgtctggtgaatccgcaaaaggtaaatacccgctggaagcggtttctatcatggcgaccatctgcgaacgtaccgaccgcgtgatgaacagccgtctcgagttcaacaatgacaaccgtaaactgcgcattaccgaagcggtatgccgtggtgccgttgaaactgctgaaaaactggatgctccgctgatcgtggttgctacccagggcggtaaatctgctcgcgcagtacgtaaatacttcccggatgccaccatcctggcactgaccaccaacgaaaaaacggctcatcagttggtactgagcaaaggcgttgtgccgcagctggttaaagagatcacttctactgatgatttctaccgtctgggtaaagaactggctctgcagagcggtctggcacacaaaggtgacgttgtagttatggtttctggtgcactggtaccgagcggcactactaacaccgcatctgttcacgtcctgtaatattgcttttgtgaattaatttgtatatcgaagcgccctgatgggcgctttttttatttaatcgataaccagaagcaataaaaaatcaaatcggatttcactatataatctcactttatctaagatgaatccgatggaagcatcctgttttctctcaatttttttatctaaaacccagcgttcgatgcttctttgagcgaacgatcaaaaataagtgccttcccatcaaaaaaatattctcaacataaaaaactttgtgtaatacttgtaacgctacatggagattaactcaatctagagggtattaataatgaaagctactaaactggtactgggcgcggtaatcctgggttctactctgctggcaggttgctccagcaacgctaaaatcgatcagctgtcttctgacgttcagactctgaacgctaaagttgaccagctgagcaacgacgtgaacgcaatgcgttccgacgttcaggctgctaaagatgacgcagctcgtgctaaccagcgtctggacaacatggctactaaataccgcaagtaatagtacctgtgaagtgaaaaatggcgcacattgtgcgccatttttttgtctgctatttaccactactgcgtcgcgcgtaacatattcccttgctctggttcaccattctgcgctgactctactgaaggcgcattgctggctgtgggagttgctccactgctcaccgcaaccggataccctgcccgacgatacaacgctttatcgactaacttctgatctacagccttattgtctttaaattgcgtaaagcctgctggcagtgtgtatcgcattgtctgaacgttctgctgttcttctgccgatagtggtcgatgtacttcaacataacgcatcccgttaggctccacggaatatttcaccggttcgttgatcactttcaccggcgttcccgtccgcacgctggagaacaaggctttaatatccggtgcattcatgcgaatacaccctgaactgacgcgcaaaccgacgctgtccggcgcactggtgccatgaatgaggtattcgccattaccatgcgcgaggcgcagtgcgtaacgtcctagcgggttatttggtccggcaggaacgactggcggtaatttaatgccacgctccagcgaacgttgacgaatgcctgccgtaggcgtccaggttgggttagggattttctgccccacacgcgtttccatcactggcgtttccagcccctgcaagccaatacctatcggataaacctgcncgatattttctcccggcggataataataaaggcgcagctctgcaaggttaacgataatcccctgacgcggcgcatcaggtaatancagttgcgaaggaatagttatcgtcgtaccgggttttggcaccggggcgatagtgttattggcttcaaggatcaacattgccgcagtatcaaaacgtcgggcgatggcctgaaggtttttatccccttcctgcaccgtatacgtttgattttgcccaaccagtcggcttccggttggtggtagcggataatcaaccgcccaggcagcntggatggcactaaaagcgccgataagcgtgagtgtaagcaaagacgcgcgtttcattgtaaacctcctgtatttgccggagactcacgctgaaacgtcggatggcgcttatgttcacctgaaaccgaaacactcctgtgcaggtcagtgtaaacattgaccatccggcaatgtgagccaaccggatgaaagctgtccctttagtttagctaagtgcagcggctttggcgcgaattgcgcgaatcatcgcttccagaccttgtgaacgagatggggtgagatgttgggtgagtgccattttttcaaaccacggacgcacatcgaaattgacaacatcctgcggcgtcatctgatcgtagagaataaagacgaccgcaataagccctttcacaatcgccgcatcgctgtcgccctgcaattcaataattccctgcgcattctgacgcatgacaatccacacctgactctggcagccctgaatgctattttgtgggcttctgtcttcgtcgcgtaattctggcagacgctggcccagctcaataatgtagagatatttctcttcccagttggcgcagcgtaaaaaattacgcagcaacttttctttatccggcaataaagccatagtgcctccctgttatcccagcagacggtgaatacgttgcagtccggtcaccagacgatccacttcttcatgggtgttatacatggccagcgacgcccgacacatagcagggacgttataataggccattaatggcatagcgcagtgatgtccggtacgcacagcaatgccgtaattatcgagaaaactgccaacatcataggcgtggtgtttaccgagattaaaagcaataacgccaagcctgttttgtgggccatagagagtgagatccggtacagattccagctgtgatagcgcgtaatgcatcagattctgttcatactcggctatgttattaagcccctgcgccgaaacatactccagcgccgcgccaagaccaatgatgcccccggtattgggtgtaccggcttcaaaccgccacggtgctttggtccaggtagtgccttcactcaggctgacggtggcgatcatagaaccgcccccttcccacggcggcatctcctgtagcaaggcttctttgacataaagaatgccaatcccggtggggccatacagtttatgcccggaaaacacgtaaaaatcgcaatccagcgcctgaacatccaccggatgatgcatcaccgcctgagcgccatccaccagcacttttgcgccatgctggtgcgcaagcgtgatcatttccgccagtggattttctgtgccaagcacgttggagacatgagtaattgccagcaggcgagttttctcatcaaacagcgtaggcagcgtctccagttgcaacgtaccgtcgggattgagcgggatcacacgcagctctgcgccaacgcgtgcgcaaagcatctgccagggaacaatgttagcgtggtgctccatctgacttatgatgatgttatcgcccgcccgcacgttgctgttgccccagctattggcgaccagattgatcccttccgtcgtgccgcggacgaacaccagctcttccgccgaacgggcattaataaacagcgatgcccgcttgcgcacgttctccattttctcggtcgcctgggcgcttaaggtatgaataccgcgatgcaccgccgcgtagccatgacgataaaactcggcctcggcgtcaatcacctggctcggtttctgcgcactggcggcgctgtcgagataagccagcggcaaaccgtttacctcacgcgaaagcaccggaaagtcggcccgcactttgtcgacggaaaaagtcatcttgcacctcctggcagccgttgaccgattcgggtcagcacctgctgtttaagcccctcatcacgcagtgcttccgtcagttcggcagcaaaggcgtaaatgatcatctgctgggcatcctgctgattgatcccgcgcgagcgcagatagaacatctgttcatcatcaatacgccccaccgtcgcgccgtggctgcatttcacatcatctgcatagatttccagctgcggtttcgtatccacttccgccagtttgcccatcagcagattattgttggtcatctgaccatccgttttgatggcgtgctgcgcgacgttgatcaaaccgttaaataccgcgcggcctttgtcgctgacgatagttttgtgcaactgtcggctgttacaaaaacctttattgtgttccagccaggtacgggtatcacacacctcgtttttcaccggcatcgccaggctattgatccgcagcgtgcagttttcgccattgagttgcgtactggtgttgtgtcgtaacactgcgccacccagcaggaaactgtggctaaatgcggtggcatcgtcagccagcaacaaatcgttatgggcaaagtggtgactgagcgggttttcaaacgccagcttgatatgctgcaagtgggcattcgctgcgacgttgatagagaaccgtgccccggtaaaatgacgagcatcattaaggctgacaaaatgttcgatcaccgttgcttcggcaccttccgccagctccagatgatgtcggtaatgggcagtgttcaccacttcacctgccacgccctgggtgatatgcattaacagcaatggctttgccggccgttgaccgcgcttcacggcgatatgcgtcacgctttgtgccaggctttccgtcaaatgcagaaacacttccgcctgaatagcatcgggtaacccctgacggtcgtcgttaatgctcacttcatacccgctgccttcagtcgcatcgctcagcgcaggcacgtaacgtccatcgacaaataccagccgcacagcgtctaacgttaacgctaaggcatctcgctgctgtggggatatctctcccgcaatgctgacaaactgactattggtcagcccttccagcggcgtatatttccagttttcatgtttacgtgtcggcagtccggtacgcagcaattgttgtaaatgctgctgtgcttgcggggagcgttttgtcccttcagcttcaaacaagtgatgccactgttgcagcgcgttactgctgttcggtaagccagccataaccctgctcctccagttgtttgaccaacgtgaaatcgccggatttcacaattcgtccctgatatagcacatgaacgtaatcaggcttgatgtagtcgagaatgcgttggtagtgcgtaacaatgatgaatgagcgcttgccatcacgcagcgagttcacgccatcggcgaccacttttaatgcgtcgatatccagcccggagtccgattcatcaagaatgcataactccggttccagcaccgccatttgcaaaatatcgttgcgctttttctcgccgccggaaaaaccaacgtttaccgaacgggttaataaatcttccggcatcttcaggagagcgattttctcttccatcaaatcctgaaaatcaaagcggtcgagcgtttcctggccgcgatagctgcgcaccgcattaagtgccgtttgcaggaaaaactggttactgacacctggaatctccaccggatactggaaggccataaagatgccttcgcctgcacgatcttccggcgacagtgcaagcaaatctttgcctttgaactcaaccgtgccgcccgtcacttcataatcttctcgcccggcaagcgttgccgataaggtacttttgcccgaaccgtttggccccataatggcgtgaacttcgccgggacgaacgtcgaggcttaatccacgcaggatagctttatcttccacgctgacgtgtaaatctttaatacttaacatgtttattccttatccgacgctgtgttcaagactgatggcgaggagtttttgtgcttcaacggcaaattccagcggcagttctgagaacacgtctttgcagaaaccgttaacaatcatcgagatggcgtcttcttcgctgatcccgcgttgcaggcagtaaaacagttgatcttcaccaatacgtgatgtcgttgcctcgtgctccagttgtgcgctgttattgcgacattcgacatacgggaaggtatgcgccccacaattagcgccaatcagcattgagtcgcactgagtgaaattgcgcgcattggttgccgtcggcatgattttcactaagccgcgataactgttctggctatgtccggcagagatccctttcgagataatggtcgatttggtgtttttaccgatgtggatcatcttggtgccggtatccgcttgctgatgaccgctggtcagcgccactgagtaaaactcaccaatggagttatcgccgcgcaaaatgcagctgggatatttccacgtaatcgctgacccggtttctgattgcgtccatgacattttgctgttttcgccttcgcacaaagcacgcttggtgacgaagttgagaataccgccggtgttgttatcgccagggaaccagttttgtaccgtggaatatttcacctcggcgtttttatggatgatgacttccaccactgccgcgtgcaactgatagctgtcacgcaccggagcggaacagcnttcaatgtagctgacgtagctgtcttcgtcggccaccagaatggtgcgctcaaactgtccggttttttccgcgttaatgcgaaaataggtggaaagttccatcgggcagcgcacgcctttaggcacataaataaacgtaccgtcagaggctaccgccgcattaagcgcggcaaagaagttgtcattccccggcaccacggtgccgagatatttacgcaccagttccgggtgatcgtggatcgcctcaccaaaggaacagaaaataattccctgctccgccagtttttcgcgataagtagtggcaaccgaaactgagtcgaaaatggcatccaccgccacctctttgccttcccgcacgggaacacccaactgctcaaacgccgcctccacctctttacttaaaaaggcgttcgcgccagtttgctgcaccgcgccaggttcagacgcgcaagtgtcgtcacaattaccgcacgatggtgccgagtagtagctgtaatcctgataattcagcttgtcgtagtgcgctttcaaccagtgcggttcttccatctccagccatgcgcgataggcgtttagacgaaactccagcatccactccggctcattacgcttcgccgaaattgcgcgcaccacctcttcgtttatcccctttgccagctcatcggtggctaactgggtgaagaatccttctttataattcagcgggccgccggtccaggttttgacatcgtcagttgcttcagtattacgagacatagtaccgcctataccccaaagctttcgccacagccacattcattctgggctttagggttgtgaaatttgaatatctgattaagtccttcacgaacgaaatcgacttccgtgccatcaataaacggcatcgcttgcagcgggacaaacagcttcgcgccgtcgtgttcaaacagcagatcgtctttgtccggctcgctaacactgtcgagcacatagccaaagcccgcgcagcccgtttgcttcacacctaagcgcacgccgaccatacccggctgctttgccaccagctcgcggatgtggacagcggctgcgggtgtcagcgttaagccttgccaggcgaaatcctgtggattaaaggttcctgaatgcatgtccatcgatttacctcacttcatcgctttcagcgtataacagcatgttagtgataatgattatcagttcaacccagcaaacgcaggggctttaccgtaaaacatgctttttgcctgcttttaataagcatagaccctgatgtgtgggttaacaggcacgctaagaattaggtatctcattgttagataatgattattatctaaggagcattaaggctgtgatgaaaaagaaaaagttgtattgaaaatgactatttaagagataggtaaaaaagtgcagcgttcagaaataagaaaacccttaagtctgtgcgacacaggcttaagggtttctaccccatccggcgcttatctccggcactctcagtggcttagctcttgaaggggcgataagaataatntcataaagctaagccgccgttttaacacaaactgcgattagtattatttttgaacaatatcaggcgggtagataagcagtattaagaaggtcatcgaacctggacggaggttaatccaggtcgatttggcgaacttgcggcattaagtcaggatcaatgcacgcccagacgccaggcaaagtagatttcttcttttaattcagcagaagagagagtaagcaggtcagcaaattcaagttctagttgtttcagacgtttaagatattgggcaggtgaaagattgctctggtcacggcgtaaaaattcaatggccagctgggtgggatcaagttgagtagacatagcatcctcgcttttagacaagacctgcacagtataccaccgtttactgtgcagataatgaccaaaagcaatatgcgtcacacttttctggtgacaacgtcacaaaatggcggtcgtcaatcgtgacgaacagcacaaacgccctttctcatcggagatttcaatctgccagacctggtgacgcgaaccgagatgcaacggtttgcatacgccgcgcacccgcccttctcgtgccgagcggacgtggttagcattgatttccagaccaaccactttttgctcaccttcggtacataaataaccggcaacggaaccgatactttcggccagtaccacggatgcacctccatgtagcaacccgaaaggctgctttgtccgcgagtctactggcattgtcgcttcaagggtgtcatcaccaatatgttcaaagcgaatatccagtaaccccaccatgtttccttcacccatggcattcagtgcttccagggggatttttcgtttccatatcatttaataatctccagtaaagcctgcacaggatggcgtacccccgtgccttcaacccgtttgacctgactacggcaggaatatccggtcgccagacagcggttacgcggcagtcgctgcatagcctgatgccaggataactcatagatcccgagcgaatttttatggtttttcgcttcatgtccgtaagtccctgccatgccgcagcaacccacgctgacattttccagtttcgcgccaaaacgggcaaatatcgcggcccattgtgctggcgcacccggcaaggcggtaacttcggtacagtgaccaaagaaataccatgattcaccgctgactgtagccactggctgtgactcaagtgcgcttgccagccattcattcgccagtaagacgttaaactcgccacgctcctcgcccagcgccagtttatattcatcgcgataacaaagtaccagcgccggatcgacgcccaccattggcatacccagcttcgccatacggttgaggaaatccgcngtctttttcgccgtcttcgcaaaacgattaagaaaacctttaatatgctgggctttgccatttggcgaaaatggcagtaacacaggctggaaacctaatttttcgaccagacggacaaaatccgccaccacttgcgcatcgtaatagctggtaaaggggtcctgcaccaccaacactgtgcgcgctttctgctctgcattgagagattcaagctgttccagcgtcatgtttgccgagcgatgccccaccatttgttgttgtagcgaggggaccgacagcagcggcaaatcaaccatgccgatatgtttttccgagagtttgcgcaccagcggctggttaatgaagaagttaaaggttttcggcgcgcgtgnnnncagcggcgcgtagctctcgaccgtagcgacgaggtggtcgcgcagcgggcgtaaataacgggtgtgatagagctgcagaaaacgagagcgaaactccggcacatcaattttgatggggcactgggtcgaacaagctttacaggccagacagcccgacatcgcctctttgacttcgtgtgagaagtcatattcgcctttattcgcatgccagctattgcgcgtgcgggcaattaacgtccgcaagctgacgccggattcaggcagttcttgttccagtttgagtggatcaacgccgcgatccgccaacaaacgcagccattcacgcaccagcgttgcgcgccctttcggtgaatgaatccggttctgggtgatcttcatcgacggacacatcggactacgggcatcaaagttgaagcataaaccgttgccgttacactccatcgcaccgcgccactgctggcgtaccgcaatggggatctgccgatcgaatgtaccgcgcttcaccgcgtccactttcatcatcggcgcatcgagaccttctggcgggcaaatcttccctgggttgagtcggttatgcgggtcaaatgccgctttcactttgcgcagttctgcaaaaagttcctcaccgaaaaacgccgggctgtattcagcgcgaaaacctttgccgtgctcgccccacaacaaaccaccgtatttcgcagtcagcgccaccacgtcatcagagatttgcttcatcaaaatctcttgttgcggatcgcacatatccagtgccggacggacatgcaagacacctgcgtcgacgtgaccgaacataccgtagcttaagccgtggctgtcgagcagcgcgcgaaattcagcaatataatcggccagatgttccggcggtacgcaggtatcctcagcaaacggaattggcttagcggcacctttggcattgccaagcagaccaacggcttttttgcgcattgcatagatacgttcaacccccgccagctcacggcacatttgccagccgatgacacctgcttgatgactggcgatcagctcatccaaccgcgcacagagtgcatttacccgctcgtcaatcagcgcctcatcatcaccagcaaattccacaatgttcagcccgagcatctctttgtcaggcacatcggtaatcaactcgctgacggaatgccagacaatatcttcccgcgccagattcagcacttttgagtccaccgtctctaccgaaagcgcccgcgcctcaaccataaacggcgcgttacgcagcgcagagtcaaaagagtcatatttgacattcaccagacggcgcactttaggcaagcgcgtaatatccagccgcgcttcggtaataaaggccagcgtcccttctgaacccgtcagaatgcgcgtcaggtcgaactcggtcatctcatcgttaaagacatgacgcagatcgtaaccggtaagaaagcggttaagtttggggaagttgtcgatgattaactggcgttgctgacggcaacgttgataaaccgtgttataaattcgcccgattgtggtattggatttacccagcgtttccgccagctcgacgggtaaaggttgcgtatcgagaatatcgccccccaacaataccgcacgtaggccaagtacgtgatctgacgttttgccatagaccagcgatccctgaccggatgcatcggtattgatcatcccgccgagcgttgcccggttgctggtcgaaagttctggtgcaaaaaagtagccgaacggtttcaggtactgattgagttggtcttttatcaccccggcctcaacgcgcacccagccctcttcagggttaatttcgatgatgcggttcatatggcgggacatatcaacaataataccctggttgagcgcctgaccgttagtgccggtgccgccgccgcggggggtaaagatcagcgatgaatagcgttcctgcgcggcaagacgggcgatcagcgccacatctgcggttgaacgcggaaataccaccgcatcggggagaagttggtaaatactgttgtcggtcgacattgtcagacgatcagcataacttgtcgccgtatcgccggtaaaaccttgttgctccagctcttgcaaaaaattaagcaccagttgaacgacgccgggtgcctgggaaatctgtggaatcattatattgaccctttcctgcggtctgtgatgtaggtcgatacactgttctttcaggcggctgcaatagcgcacagaaaggtgatgtttatttactctatggatttcgagttgcaggaaggcggcaagcgagtgaactccaggagcttacaacagtaagtaactggggtgaacgaacgtagccgcagcatatgcaacttgaaatacgacgagtaaatcgtttgcgtgttgcctgagttgttgtaccacatttttttctaacacgcccatcagaattaagggcagaatcggcctgttaaaaaccgctgaaattgctcatcattatgcaggtgagtttcgcgtgttcacgtcgcgtcgacgatttgacgcacaaaaaaggtgaaaagtagttatggtaaatgttcgtcagcccagggatgtcgcacaaattctgctttcggtgctgtttttagccatcatgattgtggcatgtctgtggattgttcaaccctttattctcggctttgcatgggccggtacggtggttatcgccacctggccggtattgttacgtttgcaaaagatcatgtttggccgccgctctctcgccgttctggtgatgacgctgttattagtgatggtgtttatcatccctattgctttgctggttaacagtatcgtcgacggcagcggcccgctaattaaagccatttccagcggtgacatgacgttacccgatctggcgtggcttaataccattccggtgattggcgcgaagctgtatgcaggctggcacaacttgctggatatgggggggacggcgatcatggcgaaagtccgcccttatattggcaccaccactacctggttcgttgggcaagcggcgcatatcgggcgctttatggtgcattgtgcgctgatgcttctcttcagtgccctgctgtactggcgcggtgaacaggtggcacaaggcattcgccattttgcgacccgtctggcaggcgttcgtggagatgccgccgtactgctggcggcacaggctntncnnnnggtggcgctgggtgtggtggtgacggcgttagtacaggcagtgcttggcggtatcggcctcgccgtatccggcgtaccttatgcaactttgctaacggtgttaatgatcctttcctgccttgtccagcttggcccgttgccggtactgattccggcgattatctggctctactggactggcgataccacctggggaacggtattgttagtgtggagcggtgtggttggcacgctggataacgtcatccgcccaatgttaattcgcatgggtgccgatttaccgctgatcctgatcctctctggcgttattggtggtttgattgctttcgggatgatcggtctgtttattggtccggttctgttagccgtttcctggcgtctgtttgccgcgtgggtggaagaggtcccaccgccgacggatcaaccggaagaaattctcgaagaacttggcgaaatccagaaaccgaataagtaatttctcatcaggcggctctgccgcctgattgttaaccaccgctaattgatatttgcttgctcttccccatattttcctgcttaccgccattcagctggtagtacctgtcgcaaattctttacagtttttaaactaatgagacgaatctgatcgacgcaaaaagtccgtatgcctactattagctcacggttataaatcaacatattgatttataagcatggaaatcccctgagtgaaacaacgaattgctgtgtgtagtctttgcccatctcccacgatgggcttttttttaacatttttccgcttcgctacctcgcccctcactctttccaataatgttgcacaagatactgtgactctcttcaagccgtcagcaggctgataatgttatttatattttattgtttatttcatgcagccattacacgatgaacgcttatgaactccaggcactccgccatatttttgccatgactattgatgaatgcgcgacctggattgcccagaccggtgacagtgaaagctggcgtcaatgggaaaatggcaggtgtgccattcctgattgtgtagtcgagcaactgttggctatgcgtcagcaaagaaaaaaacatcttcatgcgatcatagagaaaataaataaccgcatcggcaacaacaccatgcgttttttccccgacttaaccgcgtttcaacaagtctaccctgatggcaattttattgactggaagatctatcaatcggtagccgctgaattatatgcacacgatctggagcggctttgttaatttctccacaaaaaggaattgtcgttgttacaacaataatgaacggatactgacacaacatcgctacactttttaaagcacctttgctaagtagaacctatgaaaaatccctattaccctaccgcacttgggttgtattttaattacctggtgcatggtatgggcgtcattttgatgagcctgaatatggcctcgctggagacactttggcagtctaatgccgcgggtgtctcgatagttatctcatcgctgggcattggtcgattaagtgtcttgctttttgcaggattattatccgatcgctttggtcgccgcccttttatcatgctcgggatgtgctgctatatggccttcttttttggcatcctgcagaccaataacatcattatcgcttatgtttttggctttctggcgggaatggcaaacagttttctcgatgcaggcacttatcccagtttgatggaagcttttccacgctcacctgggacagccaatattttaattaaagcatttgtttccagcggacaatttttattaccgctaatcattagcctgttagtgtgggctgaactgtggttcggttggtcctttatgattgctgcaggcattatgtttattaacgctctgtttttataccgttgtacgttcccaccccatccgggtcgtcgcttacctgtcataaagaaaaccaccagctctacggaacatcgctgttcaattatcgatttagccagttataccttatatggctatatctcaatggcaacgttttatctggttagccagtggctggcacagtacggacaatttgttgcaggcatgtcatacactatgtcgatcaaactactcagtatctacaccgtgggttcgctgctttgtgtatttattaccgctccactcattcgtaataccgttcgcccaacaacattactgatgctgtacacctttatctcatttattgctctgtttaccgtctgcctgcatcccacattttatgtggtgataatattttcttttgtcattggttttacttctgctggaggtgttgtgcaaattggcctgacgttaatggctgaacgtttcccttacgctaaaggtaaagctacagggatctattacagtgcgggcagtattgcgacctttactattccgttgattacggctcatctgtcccaaagaagtattgccgatattatgtggttcgatactgccatnnnngccatcggttttttactggcactgtttatcggcttacgcagccgcaaaaaaacgcggcatcactcgctaaaggaaaatgtcgctccgggtgggtaatgcaatattcttttcaggtcatgcaagatcttacggataaataactctttctgcgctaactaaggaaaatcgcgatcaaaaacaaactatgacatgcaatattcctggaaacataaactttatgccatgtacccagggaaaatcatcttcagtatagtaattatgtaaaccgtcggagaacaatacgtacggtaacgaaattatctttcagcaaggagctgtgaaaatgtctcaaaataaggctttcagcacgccatttatcctggctgttctttgtatttacttcagctacttcctgcacggcattagtgttattacgcttgcccaaaatatgtcatctctggcggaaaagttttccactgacaacgcgggcattgcctacttaatttccggtatcggtttggggcgattgatcagtattttattcttcggtgtgatctccgataagtttggtcgtcgggcggtgatattaatggcagtaataatgtatctgctattcttctttggtattcccgcttgcccgaatttaactctcgcctacggtctggcagtgtgcgtaggtatcgctaactcagcgctggatacgggtggctaccccgcgctcatggaatgctttccgaaagcctctggttcggcggtcatactggttaaagcgatggtgtcatttgggcaaatgttctacccaatgctggtgagctatatgttgctcaataatatctggtacggctatgggctgattattccgggtattctgtttgtactgatcacgctgatgctgttgaaaagcaaattccccagccagttggtggacgccagcgtagctaatgaattaccgcaaatgaacagcaaaccgttagtctggctggaaggtgtttcatcggtactgttcggtgtagccgcattctcgaccttttatgtgattgtggtgtggatgcccaaatatgcgatggcttttgctggtatgtcagaagctgaggcattaaaaaccatctcttattacagtatgggctcgttggtctgtgtctttatttttgccgcactactgaaaaaaatggtccggcccatctgggctaatgtatttaactctgcactggcaacaataacagcagccattatctacctgtacccttctccactggtgtgtaatgccggcgcctttgttatcggtttctcagcagctggcggcattttacagctcggtgtttcggtcatgtcagagtttttcccaaaaagcaaagccaaagtcaccagtatttatatgatgatgggtggactggctaactttgttattccgctgattaccggttatctgtcgaacatcggcctgcaatatatcattgttctcgattttactttcgcgctgctggccctgattaccgcaattattgtttttatccgctattaccgcgtttttattattcctgagaatgatgtgcggtttggcgagcgcaaatttagcacccggttaaacacaattaagcatagaggttaaaggagttaattatggatgttaccgcaaaatacgaattgattgggttgatggcttatcctatccgccacagtttatcgcctgaaatgcagaataaagccttagaaaaagcgggattgccatttacctatatggccttcgaagtggataacgatagctttcccggagcaattgaaggattaaaagctctaaaaatgcgcggaactggtgtatcaatgccgaacaaacaactggcgtgtgaatatgttgatgaattaacgccagcagccaaactggtgggtgccatcaacaccatcgttaatgatgatggctacctgcgcggctataacaccgacggcacgggccatattcgcgccattaaagagagcggttttgatatcaaaggcaaaacaatggtgctgttaggggccggaggtgcctcaacggcgattggcgcgcagggggcaattgaaggtttaaaagaaattaaactctttaaccgtcgggataagttcttcgataaagccctcgccttcgcgcagcgggttaacgaaaacaccgattgtgtcgtcacggttaccgatctcgccgatcagcaagcctttgctgaagccctggcttccgccgacattttaaccaatggcacaaaagtgggtatgaaaccccttgagaataaatcattggttaatgatatcagtctgttacatccgggactgctggtcactgaatgcgtgtataacccgcatatgacgaagttattgcagcaggcgcaacaagctggttgcaaaacgattgatggatacggcatgttgttgtggcaaggggctgaacagttcacgttatggactggcaaagatttccctctggaatatgttaaacaggtcatggggttcggtgcctgacaggctgaccgcgtgcagaaagggtaaaaaatgaaaaccgtaactgtaaaagatctcgtcattggtacgggcgcacctaaaatcatcgtctcgctgatggcgaaagatatcgcccgagtgaaatccgaagctctcgcctatcgtgaagcggactttgatattctggaatggcgtgtggaccactttgccgacctctccaatgtggagtctgtcatggcggcggcaaaaattctccgtgaaaccatgccagaaaaaccgctgctgtttaccttccgcagtgccaaagaaggcggcgagcaggcgatttccaccgaggcttatattgctctcaatcgtgcagccatcgacagcggcctggttgatatgatcgatctggagttatttaccggcgatgatcaggttaaagaaaccgtcgcctacgcccacgcgcatgatgtgaaagttgtcatgtccaaccatganttccataaaacgccggaagccgaagaaatcattgcccgtctgcgcaaaatgcagtccttcgacgccgatattcctaagattgcgctgatgccgcaaagtaccagcgatgtgctggcgttgcttgccgcgaccctggagatgcaggagcagtatgccgatcgtccaatcatcacgatgtcaatggcaaaaactggcgtaatttctcgtctggctggtgaagtatttggctcggcggcaacttttggtgcggtaaaaaaagcctctgcgccagggcaaatctcggtaaatgatttgcgcacagtattaactattttacatcaggcataagcaataatatttcggcgggaatatcctcccccgccgaactaaaaaaatatattcaaccgtatttaataaaaatatttcgtgagtctctgtgcgctaattatccatctggcgtagggaaaatcacacctgaatcaggaattaacaatgaaacctgtaaaaccacctcgtattaatggacgagtgccggtcctgtcggcacaggaagcggtgaattatattcccgacgaagcaacactttgtgtgttaggcgctggcggcggtattctggaagccaccacgttaattactgctcttgctgataaatataaacagactcaaacgccacgtaatttatcgattattagtccaacagggcttggcgatcgcgccgaccgcggtattagtccgctggcgcaagaaggtctggtgaaatgggcattatgcggtcactggggacaatcgccgcgtatttctgatctcgcagaacaaaataaaattattgcttataactatccacaaggtgtacttacacaaaccttacgcgccgccgcagcccaccagcctggtattattagtgatattggcatcgggacatttgtcgatccacgccagcaaggcggcaaactgaatgaagtcactaaagaagacctgattaaactggtcgagtttgataacaaagaatatctctattacaaagcgattgcgccagatattgctttcattcgcgctaccacctgcgacagtgaaggctacgccacttttgaagatgaggtgatgtatctcgacgcattggttattgcccaggcggtgcacaataacggcggtattgtgatgatgcaggtgcagaaaatggttaagaaagccacactgcatcctaaatctgtccgtattccgggttatctggtggatattgtggtggtcgatccggatcaaagccaactatatggcggtgcgccggttaaccgctttatttctggtgacttcacccttgatgacagcaccaaacttagcctgcccctaaaccaacgtaaattagttgcacggcgtgcattattcgaaatgcgtaaaggcgcggtggggaatgtcggcgtcggtattgctgacggcattggcctggtcgcccgggaagaaggttgtgctgatgactttattctgacggtagaaacaggtccgattggtggaattacttcacagggtatcacctttggcgcgaacgtgaatacccgtgccattctggatatgacgtcccagtttgatttttatcacggtggtggtctggatgtttgttatttgagttttgctgaagtcgaccagcacggtaacgtcggcgtgcataaattcaatggcaaaatcatgggtaccggtggatttattgatatcagtgccacctcgaagaaaattnttttctgcggcacgttaactgcgggcagtttaaaaacagaaattgccgatggcaaattgaatatcgtccaggaaggacggatgaagaaatttattcgggaactaccggaaattacttttagcggaaaaatcgctctcgagcgagggctggatgttcgttatatcactgagcgcgccgtattcacgctgaaagaagacggactgcatttaatcgaaatcgcccctggcgtcgatttacaaaaagatattctcgacaaaatggatttcaccccagtgatttcgccagaactcaaactgatggacgaaagattatttatcgatgcggcgatgggttttgtcctgcctgaagcggctcattaacaggagtatcacgatggatttttctttaactgaagaacaagaactgctgctggccagtattcgcgaactgattacgactaactttccggaagagtatttccgcacctgcgatcaaaacgggacatatccgcgtgagtttatgcgggcactggcggataacggtatttccatgcttggcgtgccggaagaatttggtggtatccctgctgattacgtcacccaaatgctggcgctgatggaagtgtcaaaatgcggtgctccggcatttttaattaccaacggtcaatgtattcacagtatgcgccgtttcggttctgcagagcagctacgtaaaacggcagaaagcaccctggaaacgggtgatcccgcctatgccctggcgttgacggaaccaggtgctggctcagataacaacagtgccactaccacttacacgcgtaaaaacggcaaggtttacatcaacggacagaaaacctttattaccggtgcgaaagagtacccgtatatgctggtgctggcgcgcgatccgcaaccgaaagatcccaaaaaagccttcaccctgtggtgggtcgactccagtaagcccggcattaagattaacccgctgcataaaatcggctggcatatgctcagcacctgcgaagtctatctcgacaacgtggaagttgaagagagcgacatggtgggcgaagaaggaatgggtttcctcaatgtgatgtacaactttgagatggagcgcctgatcaacgccgcgcgcagcaccggctttgccgagtgtgcctttgaagatgccgctcgctatgccaaccagcgtatcgcttttggtaaacccattggtcataaccagatgatccaggaaaaactggcgctgatggcgattaagattgacaacatgcgcaacatggtgctgaaagtggcatggcaagccgatcagcatcaatcactgcncaccagcgcggcgctggcaaaactgtactgtgcacgtaccgcaatggaagtcattgatgatgcgattcaaatcatgggcggtctgggctataccgatgaggcnnnngtctcccgcttctggcgtgatgtccgttgtgaacgtattggcggcggtacagacgaaattatgatttacgtagcaggtcggcagatcctgaaagactatcagaacaaataatctgcaggcggcgcagcttcttaacaaactgcgccgccagatttatccggcaagacttaccggttgaggaaattcagataggatttcttgttccgcaaaacagtttttaaattgcctgcggtaatcgctgggcgaacagccgacatggcgcaaaaacagtttggcaaagtgatcgacattttcataacccacacgccaggagatctctgcctgtgataattcagtattagtgagtgaccattttgcttccgtcatacgccgttgaataacatagttaataggggaaatacgatactctttggtaaattcatggcaaatataactgacgctggcacgaaattttttcgataactgttctaaagtgatttttt

SEQ ID NO: 860 - DNA, 23151 bp, Escherichia coli
  Strain O55:H7
  modified_base (748)..(749): a, c, g or t
  modified_base (756)..(756): a, c, g or t
  modified_base (5326)..(5326): a, c, g or t
  modified_base (7616)..(7616): a, c, g or t
  modified_base (9102)..(9102): a, c, g or t
  modified_base (9104)..(9105): a, c, g or t
  modified_base (12365)..(12365): a, c, g or t
  modified_base (13107)..(13107): a, c, g or t
  modified_base (16509)..(16509): a, c, g or t
  modified_base (16530)..(16530): a, c, g or t
  modified_base (16903)..(16903): a, c, g or t
  modified_base (20424)..(20424): a, c, g or t
  modified_base (20979)..(20979): a, c, g or t
  modified_base (20982)..(20982): a, c, g or t
  modified_base (21168)..(21168): a, c, g or t
tattattcagatagaaaagaatatcttttatcagaacatcttttttaatatacccctgctccgaacgataagcatttttaaagttttcgtagtaaagaattgctaatgtataggcaaatgcatcccataacgaagatgtttggctatttttactttgcggcaaaatcacacttagctcattaaataaggttttaatgacttcttttccctgccccgcggcaattaccggacaagaatgcggttgcagtagatgattttcctcagccccctgaaactgaaagccgtacagcgcacaagtacacgtcgttgccggatcgttaacgtcagaggccaccgcatgcagcctgccgcgttctatcaccactatatcatctgcatgcgcgacatataacgaagaatcgatggtaaaccttgccacccctttcttgacgtaaatcagctcggtttcattgtcatgaacgtgatgtccagactcccattttggatcatcgctaaatgcaaaacgtgaaagccgtggcgttttaccagcgacaaacagcgtttcactggcattatcaaaacagcgttgatacatgacaacctccctattccatgagcaagcaaaaacaatatatgccggataaaatacggcgtgtattgcggttatacaaccgcgtttagcgagagctaaacaagattatttacactgaatgcaagattgtacggtcatggaataactatattgccgcaaattgcacttttgttttanngatcgcnttttttttgcaagattgttggcaaggaaaacagcttgctccgtcgaaaaccccgcaccgctatcgcacactattttcaggccatttttaccttccatcggagatggttccgtatgcgactcacaggagaaatcatgaaaataataacctgctttaagctggtgcctgaagaacaggacattgttgtcactccagaatacaccctgaatttcgacaatgccgacgccaaaatcagccagttcgatctcaatgccattgaagctgcaagccagcttgcaacagatgacgatgagatagccgcgctgaccgttggcggctcattgttgcagaactcgaaagtgcgcaaagacgtgctatcccgcgggccgcacagcctgtacatggtgcaggatgcacaacttgagcatgcactgcctctcgataccgcaaaagcgctggcggcagcagttgaaaagatcggcttcgatttactgatctttggtaaaggttccggcgacctttatgcccagcaggttggcttgctggtcggagaaattctgcaacttccggtgattaatgcagtgagtgctattcagcgtcagggcaatacactggtgattgaacgcacgcttgaagatgacgttgaagttattgaactctctgttccagccgtgctctgcgtcacctccgatattaacgtgccacgcattccttcgatgaaagccattctcggcgcgggtaaaaaaccggtaaatcagtggcaggcaagtgatattggctggagccagagcgcaccacttgctgaactgaccggcattcgcgtaccgccgcaaacagaacgtaagcacatcattctcgataacgattcgccggaggccattgccgagctggcggaacatctgaagaaagccctgaactgaagcctacggagaagaaacgatgagtcaattaaacagcgtctgggtctttagcgataatcctgaacgttatgctgaactgtttggcggcgctcagcaatggggccaacaggtgtatgccattgtacaaaataccgaccaggcgcaggcagttatgccttatggtccaaaatgtatttatgttcttgagcaaaacgacgcgctgcaacgcactgaaaattacgccgaaagcattgctgctctgctgaaagataaacaccccgctatgttgctactggccgcgacgaaacgtggtaaagcgctggcagcacggttaagtgtgcaactgaatgcggcgctggtgaacgatgccacggcggtggatattgtcgatggtcacatttgcgccgaacaccggatgtatggcgggttagcgttcgctcaggaaaagatcaacagctcgctggcgatcattacccttgcacccggtgttcaggaaccgtgcaccagtgatacctctcatcagtgcccgacagaaacggtaccttacgttgctccgcgtcatgaaattctctgtcgcgaacgccgtgcgaaagccgcaagcagcgtggacctgagcaaaacaaaacgtgtggttggcgtcggtcgtggtctggcagcgcaggatgacctgaaaatggtccacgaactggcggcggtgctgaatgctgaagtcggctgttcacgtccaattgccgaaggcgagaactggatggagcgtgaacgttatatcggtgtctccggcgtgttgctgaaatccgatctctacctgacgctagggatctccgggcagatccagcatatggttggcggcaacggcgcaaaagtgattgtcgccatcaataaagataaaaatgcgccaatcttcaactatgccgactacggtctggtgggcgatatctacaaagtcgtccctgccctgattagccagttgagccgctaattcccctttcaaccacatctcccgctgtaaacgcagcgggaagggagcataacgcatgtcggatgacaaatttgatgccattgtggtcggtgcgggcgttgctggtagcgttgccgcactggtcatggcgcgagccgggctggatatcctggtgatagaacgcggcgacagtgccggatgtaaaaacatgaccggcgggcgtctttatgcccacacacttgaagcaatcattccaggctttgcagcatcagcgccggtagaacgcaaggtcacacgcgagaaaatctccttcttaaccgaagagagcgccgttaccctcgattttcaccgcgagcaaccagatgttccgcaacacgcatcttataccgtattgcgtaatcgtctggacccgtggttgatggaacaagccgagcaggcgggcgcacagtttatcccgggagttcgcgtcgatgcgttggttcgtgaaggaaacaaggtcactggagtccaggccggggatgatattctcgaagccaatgtggtgattttagccgatggcgttaactcgatgcttggccgctcgctgggaatggttcccgcttccgatccgcatcattacgctgttggtgttaaagaggttattggcctcacaccagaacagatcaacgatcgctttaatattacgggcgaggaaggtgccgcctggctgtttgccggttccccttctgacggcctgatgggcgggggatttctctataccaacaaggattccatatccttggggctggtttgtggattggctgatatcgcccatgcgcaaaaaagcgtgccgcaaatgctggaagattttaaacaacaccccgccattcgcccgctgattagcggcggcaaactgcttgaatattccgcgcatatggtgccagaaggcggtctggcgatggtaccgcaactggttaacgatggcgtgatgatcgttggtgacgccgcaggcttctgcctgaatttgggttttacggtccgcggcatggatttagccattgcatcggctcaggctgccgccacaacagtgatcgccgccaaagaacgcgcggatttctccgccagcagtctggcgcaatacaaacgtgagctggaacaaagctgcgtcatgcgtgatatgcagcattttcgcaagatcccggcgctgatggaaaacccgcgcctgtttagccaatacccacgaatggtagccgacatcatgaacgagatgttcaccattgacggtaagcctaaccagccggtacgcaaaatgatcatgggacacgcgaagaaaattgggctgatcaacttgctgaaagatggcattaagggagcaaccgcgctatgagccagaacgctacggttaacgtcgacatcaaattaggcgtcaataaattccatgttgatgagggccacccgcatatcattttggcggcaaatcccgatatcaatgaattccgtaaattaatgaaagcctgccctgccggactttataagcaggatgacgcaggaaacattcattttgattccgccggttgtctggagtgcggcacctgtcgggtgctgtgcggtaacactattctcgaacagtggcaatatcccgcaggcaccttcggtattgattttcgctacggctaatcatgcatcccacaggcccgcatctcgggcctgatgttctgtttcgagagtccaaaatgaaagtgacattaacgtttaacgaacaacgtcgtgcggcgtatcgtcagcaagggctatggggcgatgcttcgctggccgattactggcagcagaccgctcgtgcgatgccagacaaaattgccgtggtcgataatcatggagcatcgtacacctatagcgcgctcgatcacgccgcgagctgtctggcaaactggatgttagcgaagggtattgagtcaggcgatcgcatcgcatttcaactgccaggctggtgtgaatttaccgttatctatcttgcctgcctgaaaatcggtgcggtttccgtaccgctgttgccttcctggcgggaagcagaactggtatgggtgcttaataagtgtcaggcaaaaatgttctttacaccgacgttgtttaaacaaacgcgtccggtagatttaatcctgccgctgcaaaatcagcttccacaactacaacaaattgtcggcgtggacaaactggctcccgccacctcttccctctcattaagtcagattatcgccgacaataccccactgaccacggcgataacgacccacggcgatgaattagctgcggtgctgtttacctccggaaccgagggtctgccaaagggcgtgatgcttacgcataacaatattctcgccagtgagcgggcttattgcgcgcggctgaatctaacctggcaggatgtctttatgatgcctgcgccacttggtcacgcaacgggctttctgcatggcgtaacggcaccattcttaattggcgctcgcagcgtgttgttagatattttcactcctgatgcgtgtctcgcgctgcttgagcagcagcgttgctcctgtatgctcggcgcaacgccgtttgtctatgatcttttgaatttactagagaaacaacccgcagacctttcagcgctgcgcttctttctttgcggcggtaccacaatccccaaaaaagtggcgcgtgaatgccagcagcgcggcattaaattattaagtgtttatggttccacagaaagttcgccncatgcggtggtgaatctcgatgatcctttgtcgcgctttatgcacaccgatggttacgctgccgcaggtgtagagattaaagtggtcgatgacgcacgcaagaccttaccgccaggttgcgaaggtgaagaagcctcgcgtggccccaatgtgtttatgggatattttgatgaacctgaattaaccgcccgtgccctggatgaagaaggctggtattacagcggcgatctctgccgtatggatgaggctggctatataaaaattaccggacgcaaaaaagatattattgtccgcggcggcgaaaatattagcagccgtgaagtggaagatattttattgcagcatcctaaaattcacgatgcctgtgtggttgcaatgcccgatgaacgtttaggtgaacgatcatgcgcttatgtcgtgctgaaagcgccgcatcattcattatcgctggaagaggtggtggctttttttagccgtaaacgggtcgcaaaatataaatatcctgaacatatcgtggtaatcgaaaaactaccgcgcactgcctcaggtaaaatacaaaagtttttgttacggaaagatattatgcggcgattaacgcaggatgtctgtgaagagattgaataagtttcatcttcggggatcacataaacccggcgacaaaacgccgccggggatttattttatttcttcagttcagccaggcttaaccaggtttgcaccacggtgtccgggttcagagacaggctatcgatcccctcttccatcaaccatacggcaaagtcttcgtggtcggacggaccctgaccgcaaatcccgacatatttgccctgtttcttcgcggcacgaatcgccatcgacagcagtgctttcaccgcatcgttgcgctcatcgaacagttcagacaccacgccggagtcacgatccagaccgagcgccagctgcgtcatgtcgtttgagccaattgagaagccgtcgaaatattcgaggaactgctcggccagcaaggcgttggacgggatttcacacatcatgatgattttcagcccgttctcaccacgcttcagcccctgacgcgccagttcctcaaccaccgctttcgcctgatctacggtacgcacgaacgggatcatgatctcaacgttggtcagccccatgtcgttgcgcacacgtttcactgcttcacactccagcgcgaaacagtcgcggaagctgtcggaaacatagcgtcccgcgccacggaagccgagcatcgggttctcttcatctggctcataacgctcaccaccgaccaggttggcatattcgttcgatttaaaatcagagagacggacaatgacgcgcttcggataaaacgcggcacccagcgtcgcgatcccttcagtcagacgaccaacgtaaaattcacgcggagaatcaaaacctttcatcatctcgcggatttcgttttgcaactgcggttcctgatcgtcaaactcaagcagtgcgcgtgggtggacgccaatcatacggttgatgataaattccagacgtgcaaggcccacgccttcgttcggcaggcaggcgaagtcgaaagcacggtccgggttaccgacgttcatcatcactttcaacggcagatccggcatcgtttctacgctggagcttttcacgctaaattccagcaactccgcatagacgtaaccggtatcaccttcggcacaagaaacagtgacgttctcaccgtctttcatccgttctgttgcatcaccacagcccactaccgccggaatgcccagttcacgagcgatgatcgccgcgtgacaggtacgaccgccacggttggtgacgatggcagatgctttcttcatgatcggttcccagtccgggtcggtcatgtcagtgaccagcacgtcaccaggttcgatgcggttcatttcgctgatatcatggatgactttcaccggacccgcaccgatgcgatgaccgatagcacggccttcggcgataatcttaccctgtgaatgcagcgtataacgctccatgacctgaccgcgtgagcgcacggtttccggacgcgcctgcacaatgaacagtttaccagtgtggccatctttcgcccactcaatatccatcgggcgaccgtagtgtttctcaatttgtacggcctgttttgccagttcctgcacttcttcgttggtcagcgagaagatgtcacgctgttcctgcggtacgtcttcgattttaacctgcttgccgtgctcctgggtcggcgcgtaaaccatgcggatttttttcgaccccatggtgcggngcacgatagccgggcgattcgccgccagtgtcggtttatgcacgtaaaactcatccgggttaaccgcaccctgcacgaccatctcaccaaggccccatgcggaagtgataaacaccacctggtcaaagccggattcggtatcaatggagaacatcacgccagaagatgcgaggtcagagcgcaccatccgttgaacaccggcggagagcgccacaccacggtgatcgtaaccctggtgcacacgataagagatggcgcgatcgttaaacagagaagcaaatacatgtttcactgccacgagaacggcgtcaaaaccctgaacgttgaggaaggtttcctgctgaccggcaaaagaagcgtccggcatatcttctgcggtggcggaggagcgcaccgcaaaagaggcgttttcgtcatcggcggaaagctgtgcataggcttcgcggatggcgttttccagctcaggctggaagggagtgtcgataatccactggcggatttgcgcgcccgctttcgcaagctgagtaacatcgtcaatatccgttttatccagcagttcataaatgcgctggtttacgccgctttggtccagaaactggttaaacgcgtcggcggttgtggcgaaaccattcggaacggaaacacccattccggaaaggttagtaatcatttcacccagggaggcatttttgcccccaaccctgtctacatcattcatgccgagttggttataccaaagcaccagcggtgacgagccattgttggacatcgaacaatccttttgtgataaatgaacggtttgagaaacacatttctgcgcatttatctttgcatatttaaccggatgaaaaaaacggtgaatcgttcaagcaaatatatttttttactttttaagactgatcccagcgttgcgcaaatctgctcttttcgacaatttccacataaaccatcggtataaacgaaaccataaaaatgaaatgctgttttcataaaaaataaaattgaaggttcattttataaaccagacataacgttctacgcttctgtgcgtttttaatttatgctttcatagaattatgtctgcatcacgggaagaacaaaatggataatgctgttgatcgccacgttttttatatttctgatggtacggcaataactgcggaggtattaggacacgcagtaatgtcacaatttcccgtcactatcagcagcatcacgctgccgtttgtcgaaaatgagagccgtgcacgggcagtgaaggatcagattgacgcaatttatcaccagacaggcgtgcgtccgctggtcttctactccatcgtgttgccggaaattcgcgccatcatcttgcaaagtgaaggtttttgccaggatatcgttcaggcgctggttgccccgctacaacaagagatgaaactggatccaacgccgattgctcatcgtacccatggccttaaccctaataatctcaataaatatgatgcgngnnttgcggcgattgattacaccctcgcccacgatgacggcatttcgttgcgcaatctggatcaggctcaggtgatcctgctcggtgtttctcgctgtggtaaaacccccaccagtctgtatctggcaatgcaatttggtatccgcgcggcaaactacccctttattgccgacgatatggataatctggtgctacccgcgtcgctcaaaccgcttcagcataaattgttcggcctgactatcgacccggaacgtctggcggcgattcgcgaggaacgtcgggagaacagtcgctatgcctcgcttcgtcagtgcaggatggaagtcgcggaagtggaagccttgtaccgtaaaaatcagatcccgtggattaacagtaccaattattcggtagaagagattgccaccaagatcctcgatatcatgggccttagtcgccgaatgtactagagaactagtgcattagcttatttttttgttatcatgctaaccacccggcgaggtgtgacacacctcgcacttgaaatcagcagcgattggtttatcgtgatgcgcatcacttcccggcagtcctgccgtagaagcaacaaatttctgagacttgtaatgaacagaactgacgaactccgtactgcgcgtattgagagcctggtaacgcccgccgaactcgcgctacggtatcccgtaacgcctggcgtcgccacccatgtcaccgactcccgccgcagaattgaaaaaatactcaatggtgaagataagcgactgttggtcattattggcccctgctcgatccacgatctcaccgctgcaatggagtacgccacccgtctgcagtcgctgcgcaaccagtaccagtcacggctggaaatcgtaatgcgcacctattttgaaaaaccacgaactgttgtcggctggaaaggactaatctccgatccagatttaaacggcagctatcgggtaaatcacggtctggagctggcgcgcaaattacttttacaggtaaatgagctgggcgtcccaaccgcgactgagttcctcgatatggtgaccggtcagtttattgctgatttaatcagttggggcgcgattggcgcacgtactaccgaaagtcagatccaccgtgaaatggcttcggcactctcctgtccggtaggttttaaaaatggtaccgatggcaatacgcggattgctgtggatgctatccgcgcagcccgcgccagccatatgttcctctcgccagacaaaaatggtcagatgaccatctatcagaccagcggcaacccgtatggccacattattatgcgtggcggcaaaaaaccgaattatcatgccgatgatatcgccgcagcctgcgatacgctgcacgagtttgatttacctgaacatctggtggtggatttcagccacggtaactgccagaagcagcaccgtcgccagttagaagtttgtgaggatatttgtcagcaaatccgcaatggctctacggcgattgctggaattatggcggaaagtttcctgcgcgaaggaacgcaaaaaatcgtcggcggtcagccgctcacttacggtcaatccattaccgacccgtgtctgggctgggaagataccgaacgcctggtcgaaaaactagcctctgcggtagatacccgcttctgaatgcgtgcccattcctgatgggatgggcatttctgcgcaacttgttgtcttctcaacacattactgcttgctctggtcagccataatattgataataagaatcattgttatatcaattattattaatttttatgcgttatacggatagcagaaaactcacgcctgaaacggatgccaatcacaagaccgcttccccgcagcctattcggcgaatttccagccagacactgttaggtccggatggcaaactgattatcgatcatgacgggcaagaatatctgctccgtaaaactcaggctggcaagctgctgttgaccaagtagcctttaactcgagcagctgacttccagccgtttaccccagtcaggtggacgactgacatagtcatcatctctgtcgctgaaaggatttcgcaacgcctcatgcaggcggtgcaattccgtcatatcacccttttctgccgcttcaatcgcccgttgcgccaaccagttgcgcaataccagagcggggttaacgctttgcatcagttgctgacgctcactatcgctaacctcgtcttgttgcaaacgccctcgataacgggcaaaccagtcatcaaatgccgcacgatcaataaactcatcacgtagcggtgacgccgcgctgtgctgctcggtcagactcagcatgcgaaatgtgcgggtataatcgctgcgctctcgcgccatcagactgaataattcattcagtagcgcgttatcctctttttgctccgtcataaagcccagtttctgccgcatccgttgtccataatgcgtcaacaaaacctgctgatagctgtccagggcctcattcagggcatctacggcaacaaatggtgacaatgtctgcgccagacgctgtaaattccacaacgcgacagcaggttgattgtcaaagctgtaacgtccttgatgatccgagtgattacaaataaaaccgggttcgtaatcattaagaaaaccaaacggcccgtaatcaagcgtcagtcccagcagcgacatgttgtcggtattcatcaccccatgtgcaaagccgaccgtctgccattgggcaattaacgatgcggtacgtgcgacaacatcgttaaaccagagacggtatttgtcctcatcatcttcaagatgtgaccagtaatgacgaatggcaaagtcagccaactgacgaaccttatccggctcgcggcgatagtaaaaatgttcgaaatgaccaaagcgcagatgacttggtgccacacgcatcagcatcgcgcctggctccaccgtttcccgatacactggcgaatcgctggtgacgatacttaacgcgcgggtcgtcggaatgcccagataatgcatcgcctcactggcgagactttctcgtatcgtcgaacgtaataccgcccgtccatcacccattcgcgaataaggcgtcaggccagcacctttcagatgccagtccattgtagtgccatcagcaagcagttgttcgccaagtaaaatgccgcgcccatcacccagttggcccgcccagacgccgaactgatgaccactgtaaacctgcgccagtggtgacataccaggcagtagggtttcgccgccccagacacctgcnccatttttaaacagcgacgatggaatactcagcgtgttagcgagttcggtattatgccaaatcagccgggcattatttaaaggcgtaggggaaagtgctgtataggtttctggcaattcatcgcgccagcgggtaataaaagacagggtcatagagcctcctgtttgatagtgtagacggttactctcgtcttaaacaccagcaaacaggagggttatcgctgaaccaacgtcgttatctgatttatgggaacggcaggccacaggcatccctggagagcatggaaatcgaagggggtaatctgtgctaatatttctggcgtatcaatgccccccgcgatgatgcaattgcaacaaggggaaatttgcgcctgaatcgcacgaataaacggttcgaaggagcgatgcgtgatttgttgctgaataaaacttttatccagcattacgcgggtgaaaagaccatcaaaaaccgctttcattgtgctattgcctgctcccaaattacctaacacaaggggatacacttgcgataaggataaaagaccgcgattatcttttccttcattgagatgcgggtaattctcattaatcaacagttcaataaacggatattttaatagttcgcctgcgtaattatccctctctaataataatgtagccacttgtggcgttaaattaagccaggcaaagagtttatgttgaataaaaaaatgttggcatgattttagtaattccaactgctntgaaaataattgccaatgttgctcctcggtaagttgcgctataacccgactcgtcgggatacgcaccgtgccatcttcactggagaaatgggtaattaactcaacgccgacaaggacttgctggttatctcttatcggcaggaaatagcaatcagaatgataaagattctccaaaaaaatcttcatggtaaccgtccctctcgaaggatgtttttcagtatccggctaaaagggatgaggccataagacataacaattacagaaggagtaactttcatttgttccatgttaaccactttttcaggggtcctttttttagattatcctgattataaacgaataatccatttacggaatttttgtctgcaaaatactactgtattctggagtaaatggacggcgatgtatcatcgacgtccaattttcgacatactagattcgtctcgcctgccagaaatttttctgccaatagacattatcaagtgaggaacgcatcactcccttgctggtagaggcgtggataaattggttgttggtatcgtaaatacctacatgcaaaccattttgtccggaacccgttttgaaaaagaccaggtcaccaggcagcaactcgtctttatcaatttgcgtgccgatagaggcttgttctttggtttctcggggcagctgcaaatcgaaacgatcgcgcatcgtcacaaccacaaatcccgaacagtccacaccgcgccgcgtcatgccaccataacgatacggcgtgccatgccagctttgtagctggtcgttcaaaccggcaataacggtaatcgaatcagaaagtctggcatttggcggcggtgctttatggtggctacacccggccagaaacagtgctgtgatcaaaataaggcagaaacgcattccgtacggttcctctgttttttattcttgcattaatttagcgtcgtaattacccgattttcaagatactaatgaaatcagatggtcgaaatcagcattctgtgaccttcgatatccagacggcgaaaattcatcccataggcctgcgccagatttggcggcgtgagcacatcttctctgcgtccactggccagcatttttccaccttttagcaaccacgcccgatgcgcatgacgcaatgtgtggttgagatcgtgactgctcatcacaatcgccagtccttgctgacacagcgcgctcagaattttgtctaacgcactttgttgcgcaacatcaagactgttcatcggctcatcaagaagcagcaattggcctgcgggattggcttgtggtgtgatttgcagcaccaccgcagcaagacgtacgcgttgccattcaccgccggaaagttgattggtgctacgaccgagtttgtcatcaagagccagcgcccctgcgacatcattcagtagttcggtacgcgttttatcgtgctgatgcagtgtcaggtagtgccagaccggcattgcaaacggcggcgtctgctgttgtgaaagataggcacgatgcagcgcgagttttgttgcggaccatgcttccagtggttgccccgcgaactgaatgcttcccttaccgctggtcattccggccattcgcgccagtaaggtactcttacccgcgccattcggccccaccaggtgcaggatctccccagcccgaacctcgccagaaagcggccccaggcgggtagattccgcaacatcctgtaactgcatcacaatagacattattttgccaacgccagtttaatgctttccatcacaatgggatcttccggcgtcatatccggggaaaaacgctggatgaccaatccgtccctgccaactaaaaatttctcaaaattccataaaatatcatcagggtacagcggtgcacgacctttgctgaccatacgggcatagaatccgctctcttccggcgcgactgcggtcggcgctgcggaaatcaatttttgatacagcggatggcgtccttcgccattaacttcaatcttactgaacatcgggaacgtcaccccccatgtggtggtacagtaagttttaatctcttcatcgctgcccggttcttgttccagaaactggttgcacgggaatcccagcaccacaaaacctcgatcggcccaggctttctgaatattctccaactgctcatattgcggcgttaagccacactttgaggcgacattgacaatcaacagcacattaccggcgtacttctccagcgtggtcacttcaccgtcgatatctttcactacggtcgtcagaatggaatcttgcatcgtttctcctgggtgtggtcagtaaaaatcttagcttttaatcatagaccgtctttttgcggctaacgtcctgcttttaacaataaccagataaacaccggcgcacccaacgttgcggtgaccacgccaataggcagctctgcggcagctaatgccaggcgcgctacaatatcggccagcagcaatgcgctcgcccctgccagcgcgcagccgggaagtaatgcgcgatgatcggttaaaccacacaaccgaagaatatgtgggatcaccagaccaataaagccgatagcacccgccagcgctacactgacgccaaccatccagccggtcgctgccaccagcacattgcgccagaaccacaggggtaaacccagttgccgcgccgagatctcgccaagtgctaacatattcatcggcctggactgacaacagatccacaacaacatggggatcaatgccagcatcagccagctttgccgccagtctacaccgccaaaaccgcccatcatccagtacatcagctgacgtaaatcaacagaggtggaaaagtagatagcccacgtcattagtgcgctacagataatccctaatgcaacgccagccagcaataaccgactggtcgaaagatgacgacgggcgaaacgtaagagtattaaagtgatgataagcgccccagcaatcgcacacagccctagcgcccagttggggagttgcccttgcccaagcaataccgcggcgataagccccacgcctgcgccgttagagacgccaagtagtccaggttctgccagaggattttcaaacaacgcctgcattacagcgccggatatagccagcgccgcaccaaccagcaatacagccagcgtacgtggcaggcgaatttgccagacgaacagttcgccacgaggagaaaaccagtcacctggcgagatccattgttcaccggcgcaaaggcttaagagaagcgccagcagcatcaaaactgacaggcataataaccagcgaatattttgtcgctgttgttggcgggcaagtgtcagcatggtatccgttctgctgaagtgtcatggcgttgattttacggtgactcttcgacagtgaaaaagaaaaagggccgcagagcggcntttttagttagatcagattantcgtctttgggcgaagcgttttcgacccggctttttaacttctgcccgggtctgaaggtcaccacgcgccgtgctgtaatgggaatatcctcgcccgttttcgggttacgtcccgggcgttgattcttatcacgcagatcgaagttaccaaaaccagagagtttcacctgttcgccgttttccagagcgcgacggatctcttcgaaaaacagttcaaccagttctttggcatcccgcttgctaagcccaagcttatcaaacagatattctgacatttcagcttttgtaagcgccataggttcaatccctcaatgatgcctggaatcgctcttttaatgcctctacacatttggcgacggtagcggcaatctcntcttcttcgagtgtacggctggtatcttgcaggatcaggcttatggcgaggctcttatacccctccgcaacacccttaccgcggtacacgtcaaataagtttacgccaactacctgatttacgccaactttcttacattcggataaaatatccgctgcgggaacgttttctgcgaccaccaccgcgatgtcacgacggttcgccgggaagcgagaaatctcgcgcgcctgaggcaccacgcggtctgcgagcttgttccactccagttcgaacaccagagtgcgaccgttaagatccagtttacgttccagttcaggatgaacaaccccaacaaaaccaatacgttcacctttcagataaatcgctgcggattgccccggatgcagtgccggattcgcttctgcacggaactcaacctcattcagtttaccggtcaggtcgagtacggattcaagatcgcctttcaaatcatagaaatcaacggtctcttttgccaggttccagtgctcttcgtaacggttaccgcaaatcacaccggctaacatcagatcctgacgaatgcccaacggtgcctgagtatctggtacgaaacgcagaccgctttcgaaaatgcgcacacggttctgctgacggttctggttgtacaccacggttgccagcaggccggtccacagagaaagacgcattgctgacatttcaacagagatcgggcttggcagcagtaaggcttcaacgcctggatggatcatctgctgcactttcggatcaacgaagctataggtgatcacttcctgatagcctttatcgttgagcagcgttttcacgcgcttgagcgacaggtcagcttcacggtgagtacccataatcaggcttgcctgtaccggctcatccgggatgttgttgtagccgtaaacacgcgcgacttcttcgaccagatcttcttcaatctccatgtcgaaacgccagctcggcgcaactgcctgccactcgtctttgccttcggtcacttcgcagccgagacgacgcagaatgtcagttacctgctcatccgcaatatgatggccgatcaggcgatccagtttgctacgacgtaaagtgatggttgcacgcttcggcagcgttgcttcgttggtgatatcaattaccggaccagcctcaccaccgcagatgtcaatcagcagacgggtcgcacgttccatcgctttgtactgcagtgccggatcaacgccacgctcataacggtgagacgcatcagtatgcaggccatgacgacgagcacgaccggtgatagacagcgggctaaagaaagcgcattccagcagcacgttttgtgtttcgtcattcacgccagagtgttcgccaccgaagatgccgcccatcgccagcgccttgttgtggtcggcgatgaccagagtgtcagcattcagcttcgcttcagtaccgtcgagcagcaccagcgtttcgccctctttcgccatccgcaccacaatgccgccttcaatgcgatctttatcgaaagcgtgcatcggctggcccaattcgagcagcacatagttggtgacgtcaacaactgcatcgatagaacggatcccgcaacgacgcagtttttctttcatccacagcggagttggcgctttaacgttaatgccttttaccacacggccaagataacgcgggcaggcttccggcgcttcgactgtaatcggcagcgtgtcgtcgatggtcgcaccaaccggaacgatttccggttcaaccagcggcagctgattcagcacggcaacgtcacgcgcaacaccaatgatacctaaacagtcggcacggtttggcgttacgctgatttcgatggtgttgtcatcgagtttcagggattcgcggatgtcagtgccaatcggcgcatctgcaggcagttcgataatgccgttatggtcgtcagaaattcccagctcagaaaaggagcacagcatcccttcagacggttcgccgcgcagtttcgccgctttaattttgaaatcacccggcagaacagcaccaatggtcgctaccgccacacgcaggccctgacggcagtttggcgcaccgcagacgatgtccagcaggcgatcgccgccgacattcacttttgtcacacgcagtttgtcagcgttcggatgctgcgcacactcaaccacttcaccaacgaccacgccgtggaagctaccggcaaccggttctacaccgtcaacttccaggcccgccatagtgatttgattcgccagcgcatcgctatcaatcgccgggttcacccattcgcgtaaccacagttcactgaatttcataatctattcctgccttatttaaactgtttgaggaaacgcagatcgttttcgaagaatgaacgcaggtcggtgacgccgtaacgcaacatagtcagacgctccatccccatcccgaaggcgaaaccagagtaaacttccgggtcgatgccaacgttacgcagcacgttcggatgcaccatcccgcagcccagtacttccagccatttaccgtttttacccatgacatccacttctgcagaaggttcggtaaacgggaagtaggaaggacggaagcgaatctgcaaatcttcctcaaagaagttacgcaggaagtcgtgcagcgtgcctttcaggttggtaaagctgatgttggtatcaacaatcagaccttccatctgatggaacatcggcgtgtgagtctggtcgtagtcgttacgataaacacggccaggcgcgatgatacgaatcggtggctgctgggctttcatggtgcggatctgtacgccagaggtctgggtacgcagcaggcgggtagcgtcaaaccagaaagtgtcgtggtcagcgcgcgccgggtggtgaccaggaatgttcagagcatcgaagttatgataatcgtcttcgatttccggcccggttgccacggtaaagccaagctcaccgaagaaactttcgatacggtcgatggtacgggtaaccggatgcagaccgccgttttcaatgcgacgacctggcagagagacatcaatcgtttccgccgccagacgcgcattcagtgcagcgctttccagttccgctttacgcgcattcagcgcctgctgaacctgctctttcgcttcgttgataaccgcaccggctgccggacgctcttctggcggcagctcacgcagggtcgtcatctgaagggttaagtgcccttttttacccaaatattcgacgcgcacattgtctaacgcggcaacatctgacgcctggctaatggccgccttcgcactggcaaccagttctgcgagatgtgacatggttttcctcattgtgtcagtggtgacactggttcgttggacttagagcctatcccatcaggctattttacttgccattttggtcccgggcagtgctcgaaatcctcacgtacttaagtacgctccggtttctccgcactggccgtatccagactggctgcgacaattacgcctgatagactggctttttatttttcaaaacgcgcanacaaaaaaagcctccactgggaggctttcaggcgctgttttccgtttctcttctcacgcgctagcctcctggattcaggtgctaaagtaaaaaaagaagcggaaaatagcagcattcattgcttgcgttaccttttggtactcttcaaaagacctttattgaaaaggctacggcgataaaagtcaatgttttgatggcgttgaaacgaaaagagggagactagctccctctttcaactggcttatgccagagctgctttcgctttttcaaccagagcggtgaacgctactttgtcgaatactgcgatatcagccaggatcttacggtcgatttcaacagaggcttttttcaggccattgatgaatttgctgtaagaaataccgttctgacgtgctgctgcgttgatacgcgcaatccacagttgacggaactgacgcttacgttgacgacggtcacggtaagcatactgaccagctttgataacagcctggaaggcaacgcggtatacgcgagaacgcgcaccgtagtagcctttagcttgtttcaaaattttcntgngacgtgcgcgtgcaataacaccacgttttacgcgagccatatgtgctctcctgtatctatattctaattaaaaagttaaaaacgttaacggcttatgcgtacggcaggcacgcgattaccaggcccagatcgcctttggaaaccatggctttcggacgcaggtgacgtttacgtttggtcgctttnttggtcagaatgtgacgcaggttagcgtgcttgtgcttaaaaccacctttaccggtttttttgaagcgcttagcagcaccgcgtacggtcttaatttttggcattttaataacttccacttcgcattgttaataaacgaaacaaaggcgaacaaagcctgtgaagcccgaaggctccacagacagtgctacttgaaggccttactgtttcttcttaggagcgagcaccatgatcatctggcggccttcgatcttcgttgggaaggattcgaccactgccagttcttgcaaatcgtctttcacgcgattaagcacttccataccgatttgctggtgcgccatctcacgaccgcggaaacgcagcgtgattttggctttatcaccctcttcgagaaagcgaatcaggctgcggagtttgacctgatagtcgccttcatctgtaccaggacggaatttaatttccttaacctggataactttttgctttttcttctgttccttagaagacttgctcttttcatagaggaatttgccgtaatccattatacgacaaaccggcggctcggcgttagggctgatctcgactaagtctactccggcttcttctgctttctccagagcttctctcagactcacaataccaagctgctcgccttccagacctgttaagcgaacttcctgggcgcgaatttcgccattgatacggttagggcgcgccgtttgaactcgttttccgcctttaataccttattcctccaattgtttaagactgcggctgcgaatctcttgttgcagcttctcgatcacttcatttacgtccatgcttcccaggtctttaccacggcgggtgcgaacggcaattttgcctgattccacctctttatcaccacagaccagcatatacgggacgcgacgcaaagtgtgctcgcggattttaaagccaatcttctcatttctcaagtctgctttaacacgaatgcccgcatttgatagtttttgcgtcaattcgttaacgtattcagactgtgaatcggtaatattcatgataacaacctgaactggcgcaagccaggtcgggaagaaaccagcgaattcttcggtcaggataccgatgaaacgttccatcgaccccagaattgcgcggtgaatcattaccggtaccttacgctcgttgtcttcgcccacataggaggcgctcagacgagacggcaaggagaagtccagctgtactgtaccgcactgccatgcacgatcgaggcagtcatacagggtaaattcaattttcggaccgtagaaagcgccttcacccagttgatattcaaacgggatgttgttttcttccagcgcaaccgccaggtccgcctcagcacgatcccacatttcgtcgctgccaatacgcttttcaggacgagtggagagtttgacgacgatcttctcgaagccaaaagtgctgtacatatcatagactaaacggatacatccgttaacttcatcgcgaatttgttcttcagtacagaagatatgcgcgtcatcctgggtgaatccacgcacgcgcatcaggccatgcagagaacctgacggctcgttacggtggcagctaccaaactcggccatacgcagcggcagatcgcgataagacttcagcccctggttgaaaatttgtacgtgacccgggcagttcatcggcttaatgcagtattcacggttctcagaagacgtggtgaacattgcatctttgtagttgtcccagtgaccggttttttcccacaggacacggtccatcatgaacggacctttaacttcctgatactggtactctttcagtttagaacgaacaaacacttccagttcacggaagatggtccagccgtcgttgtgccagaataccatacccggcgcttcttcctgcatatggtacaggtcgagctgtttaccgattttacggtggtcgcgtttcgcggcttcttccaggcgctgcaggtaa

SEQ ID NO: 861 - DNA, 4383 bp, Escherichia coli
  Strain O55:H7
  modified_base (1319)..(1319): a, c, g or t
  modified_base (1889)..(1889): a, c, g or t
  modified_base (2695)..(2695): a, c, g or t
  modified_base (4054)..(4054): a, c, g or t
aagcgcttttttgtctgcccacgccgtaccgtaaatacgttgcaacattttgttgttgctgtcgccacgccagtaagcccctgccgttttcattagtttgaaatgatggcagaaacgcatgttcggtacgtgcggaccgcggcacatatcgacatattcttcatggaagtacagacctggcttgtcatcatgggcgatgttttcgtcaagaatggagactttgtagctctccccacggttggcgaaagtttcacgcgcttcgtgccagctgactttcttcttaatgacgtcgtagtttttctcagcaagctcatgcatccgcttctcgagtgcttcgacatcttcctgggttaacgtgcggtcaagatcaacgtcgtaataaaaaccgttgtcaataaccgggccgattgccattttggtatgcggccaaagttgtttaatcgcgtgccctaacaggtgcgcacaggagtgacgaatgatctccagaccttcttcgtctttggcggtaatgatcgacagttgtgcgtcgttttcaatcagatcgcaagcatcaaccagttcgccattaacgcgccctgcgatacaggctttcgccagacctggaccaatgtccagcgcaacatccatggggcttacagcgtggtcgtaatggcgttggctgccatcaggaagagttataacaggcattttatatccttatttgcagtggtgacccacacgaaagatcacatacaaagaaaaatttgtttattaacagttcattgcgaaaccatctagccaacaaatgctaaattggttcgcaatcaggtacacaaatgaaagacattaacctctcaccttccacccggttgagcgatgttaacactaaaaaaagggagattgtacctttccgtttcacattgattcgattcgcaattcgtttgtagtgagtacaccagcaaaacgcttaaagaacaactgataacatcacggagcgtctgaaaggtttactgcgagcggatttacagcagcataaactgaatccagcaaagttcgttgcgtgatttggcggtactatttaaacgatcataagattaatgacgaagtggtcatatcacaatgataaaagtgacacaattcttatagcaatttttcgtgcacatttcgttctggcgataataattaatcatcatactcaaaacctccagacatatataaggcgaatagattatgagtcaaaacgacattattatcagaactcattataagtctcctcatagaatgcacatcgatagcgacataccaacgccttcatcagagcctattaatcaatttgcgcnccaactcatcaccctacttgatacctctgacttaagttcgatgctgtcatactgtgttactcaggaatttaccgcaaactgtcgaaaaatatcacaaaattgttattccactgccctttttaccattaactttgccacttcacccatccatgcagaaaatatattcattacattacactataaaaaagaaatcatttccttattactggaaaccacgcctattaaagctaaccatttgcgaagcatactggattatattgaacaggaacagttaactgccgaaaatcgtaaccattgtatgaaactgtctaaaaaaatccatagagaaaaaactatacaaccaacagtaaatctcaatggtagtgcatttttttcgcaatctccttctgacgctattttttgtcgccatctgtcattgcaatacgcacttgattcattgagaaatggaaaaggcaaggtcaacctgattaaacattactcctccgttgaatccatacagcagcatgtccccttagtccgggacgcggagttcagagcattacttcgccatcctcctgcagggagtcgcgntatcgcgagtaaggattttggcttcgctttagatattttcttctgtcgaatgatggcaaacaatgtcagtcatatgtctgcgattttatatatagacaatcatactttgtcagtaaggctacgaataaagcagtcggcgtatgggcaattaaattatgttgtgtccgtttacgacccgaacgataccaacgttgccgtcagaggcacccacaggacagcacggggctttctctcgcttgataagttcatcagttcaggtcccgatgctcagacctgggctgataggtatgttcgcaactgtgcaattgctattctgcccctattacctgagggagttccaggggctattttcacgggtatcgcgacacgaatgccatttgcccctatacatccatcggcaatgttgttaataatggccacaggccagactcaacagcttattacattattcagacagttgcccatactccctgaaaaagaaatcattgaaataataactgcgcagaatagcattggtacacctgctttatttttggctatgatgaacggacatactgacaacgtgaaaatatttatgcaagaaattcagtcactggtagataatcacatcattcatgaagataatctggttaaattgttgcaaactaaaagtgctaacgaaacacctggactttatatctccatgttgtatggattcgatgagataatcgatatctttctgaatgcattaaccactcctatagcacaagagcttttaaacaaaaaactggtgatgagtattttagccatgaaaatacatgatggtnagccaggattatacgccgcaatggaaaataatcaccctttgtgtgtcacacggttcctctctaaaattaatggcatcgcctttaaatacaagttgagcaaagctaacatcatggatttattaaaaggcgctacagcacagggaacccctgcattatacatcgctatgagcaagggtaatgaagacgtcgtgttatcttatatatcgacgctgggtgcttttgcaaaaaaacattcttttagtcaacatcagttatttacactgttggctgctaaaaatcatgacaacatgtcagctgttcatatagccattcatcataatcattataaaactgtagaaacatattatgctgctataaatgtaatcagccaaagcatgagttttagtgctgatgaattaaagacgtatttataaccagctatttacgatatttatatatcgatacataattttattttttcataaaacgcagaaacagtgatcaggtgtacaacgccacccgacggctgtaataacaaaaaatcccttgatgcctgtcccttttgttacactccgttatcacgcacaagagatatgcaggacactggtatgccgactaaacgctttgataaaaaacactggaagatggtggtggtgctactggcaatctgtggcgctatgttgttgctacgttgggcagcaatgatttggggctgagcagtgacaaacgaagacagccagaccgcataacacggtccggcagataattttacatgctgtagcccagcgataaggttgtccgacggtcggtatgttccggtgcagactctggaggttcagagttccatgtgacgttgtaagccaccttcagtccaaaatgttcattaatagcaacatttaatgcgctttcggagttcagcgttgtgtcttccgcgccaaagacggaaacaccctgcgtaaatttagcgttgtcagtaagctgccatgcataagcaccggaggcatagcccagcggctgagtttcactggcattgtcggtatatttgtcgtaacgcacacctggaccgaattcaaagcggaaactgtgtaccgggccattcaaaaactgacgaccataacccgcggtcaacacatcgcgctctcgatagccgttataacggtctgtcagccagcttgcctgaccaaataaatagtcataatcagttaaattaaaacggctacgcccgcccgccgcatatttttctgaagaacgctcatcattagaagaagtattactggcgttcccccacagcgaccaggcagtggtttgtccataccaggtcatggtggtgtcagccgtaagtgaggagcttttcgtattgcctgattgtgcaagataccntgcgttcagattaccttcgaaaggttttttagcgctggcaggatcgtccatgacagtaaaaacggaatcatcggcagctgcattcagtgacgcaaacatgccccccgccaacataacgatggcaggaactgtcttcaaaagcttcatttatcaagagtccgtacaacaaaaaaagagaccatcgcggtcccggaaactttcttaaggatcaaagattagcgtccctggaaaggtaacgaattataaaaaggcgcgaataacttatcaatgtattcttatttcattttttgaataagcatgtggcgaaaacagatttttatttatatata

SEQ ID NO: 862 - DNA, 21329 bp, Escherichia coli
  Strain O55:H7
  modified_base (2)..(2): a, c, g or t
  modified_base (1223)..(1223): a, c, g or t
  modified_base (1243)..(1243): a, c, g or t
  modified_base (2081)..(2081): a, c, g or t
  modified_base (2084)..(2084): a, c, g or t
  modified_base (2675)..(2675): a, c, g or t
  modified_base (5018)..(5018): a, c, g or t
  modified_base (6808)..(6808): a, c, g or t
  modified_base (6879)..(6882): a, c, g or t
  modified_base (9454)..(9454): a, c, g or t
  modified_base (9893)..(9893): a, c, g or t
  modified_base (14578)..(14578): a, c, g or t
  modified_base (14775)..(14775): a, c, g or t
  modified_base (15626)..(15626): a, c, g or t
  modified_base (16864)..(16865): a, c, g or t
  modified_base (17608)..(17608): a, c, g or t
  modified_base (17673)..(17673): a, c, g or t
  modified_base (17866)..(17866): a, c, g or t
  modified_base (18130)..(18130): a, c, g or t
  modified_base (20456)..(20456): a, c, g or t
  modified_base (20466)..(20466): a, c, g or t
anaattttaaataaagctccaataaatcatattgttaatttcttcactttccgctgattcggtgccagactgaaatcagcctataggaggaaatgatggtacgtatctatacgttgacacttgcgccctctctcgatagcgcaacaattaccccgcaaatttatcccgaaggaaaactgcgctgtaccgcaccggtgttcgaacccgggggcggcggcatcaacgtcgcccgcgccattgcccatcttggaggcagtgccacagcgatcttcccggcgggtggcgcgaccggcgaacacctggtttcactgttggcggatgaaaatgtccccgtcgctactgtagaagccaaagactggacccggcagaatttacacgtacatgtggaagcaagcggtgagcagtatcgttttgttatgccaggcgcggcattaaatgaagatgagtttcgccagcttgaagagcaagttctggaaattgaatccggggccatcctggtcataagcggaagcctgccgccaggtgtgaagctggaaaaattaacccaactgatttccgctgcgcaaaaccaagggatccgctgcatcatcgacagttctggcgaagcgttaagtgcagcactggcgattggtaacatcgagttggttaagcctaaccaaaaagaactcagtgcgctggtgaatcgcgaactcacccagccagacgatgtccgcaaagccgcgcaggaaatcgttaatagcggcaaggccaaacgggttgtcgtttccctgggtccacaaggagcgctgggtgttgatagtgaaaactgcattcaggtggtgccaccaccggtgaaaagccagagtaccgttggcgctggtgatagcatggtcggcgcgatgacactgaaactggcagaaaatgcctctcttgaagagatggttcgttttggcgtagctgcggggagtgcagccacactcaatcagggaacacgtctgtgctcccatgacgatacgcaaaaaatttacgcttacctttcccgctaacaaaaacattcccccagcattgggggaatcatcaccaacctgtcggcaacgcgtttctccgactatgctcaaaagtcatgtgataacaaaggggtgaactatggccagtggcgatcttgtccgttatgtcataaccgtcatgttgcatgaggatacattgactgaaattaacgagttgaataattacctgactcgcgncggttttttgctcaccatgncggatgatgagggaaatatccatgagctggggactaacacttttggacttatcagtacccaaagtgaagaagaaattagagaactggtttcggggcttacccaaagtgcaaccggcaaagatcctgaaatcaccatcacgacctgggaggaatggaatagcaacagaaaataaatggtttttgggcaataatcagtctgtggtgtgcgttagctcgtgtttttacaccgcattcttgcgctaaccttatgatctggcagacaacatgggagagacatcatgtggcaggcaatcagtcgtcttttgagcgagcagttaggtgaaggcgaaatcgaactgcgtaatgaactgcctggcggagaagtccatgccgcatggcatttgcgctatgcaggacatgactttttcgtcaaatgtgatgaaagggaactgcttcccggttttaccgccgaagccgaccaactggagttactgtcgcgtagtaaaaccgtcaccgtgcctaaggtttgggcagttggcgctgaccgtgactacagttttctggtgatggattatctcccacctcgtccgctggatgcgcatagcgcatttattcttggtcagcaaattgcgcgtttacatcaatggagcgaccaaccacaatttggactcgattttgataactcgctctccacaactccacagcccaacacctggcaacgtcgctggtcaacgttttttgctgaacaacggattggctggcagttggaactggcagcagaaaaagggatcgctttcggcaatatcgatgccatcgtcgagcatattcagcagcgtctcgcctcacatcaaccgcagcnttntctgttgcacggcgatttatggtccggcaactgtgcgctgggtccggatggcccgtacattttcgacccggcctgctactggggtgaccgagagtgcgacctggcgatgttaccgctgcatactgaacagccgccacaaatctatgacggctatcagtcagtatccccgctacctgccgatttccttgaacgtcaaccggtttaccaactctacacgctgttaaatcgtgcaagattatttggcggtcagcatttggttattgctcagcagtcactggatagattattagcagcgtgatatgggttgaagataatggccgctccgtgcggccttttgattaaataaacccaagcagagaaaagaacacataacctgcagcaatacaaataaccggcaggatatacagtgagaaaaactgcaggaaaatagtatggtgcggaacaacaatacgtgactcaatttgttcacgcgttagcccctcttcccctttggctttttccagaatgagttgatcttcaacaccttcccgcaagaagcgcgcctggcgactcatccgggtaccggaatcctgcaacgccagtccgacaaanatcaggatgaaaatcacccagaacataacgttcacgccaccattaaaattgggcgtcggggagttataccagaacagattcaaaaaaggcgtattcgcctgcatcatatcgatcatgacatgagtaaagtcgagcatgaccgcattaatgccttcctggttttcctgccgggtattcataaatttcagcaaagaaatcaatgtagagatcaatgcaggtataaaaatcacccaacccataatccttttcaaaacagcaatgcgtccagcttgttgatacgtcatgagttctccttgattaagacgcgtcgtttcacttagtttacctgtagatatctgttttcgcccattctttaaaggcgatatgataggcgcttaatcataagcacggcttaataccttacacataatgctctaaaggagaggttgtaatgtcaaccccgcgtcagattcttgctgcaatttttgatatggatggattacttatcgactcagaacctttatgggatcgagccgaactggatgtgatggcaagcctgggggtggatatctcccgtcgtaacgagctgccggacaccttaggtttacgcatcgatatggtggtcgatctttggtacgcccggcaaccgtggaatgggccaagccgtcaggaagtagtagaacgggttattgcccgtgccatttcactggttgaagagacacgtccattattaccaggcgtgcgcgaagccgttgcgttatgcaaagaacaaggtttattggtgggactggcctccgcgtcaccactacatatgctggaaaaagtgttgaccatgtttgacttacgcgacagtttcgatgccctcgcctcggccgaaaaactgccttacagcaagccgcatccgcaagtatatctcgactgcgcagcaaaactgggcgttgacccactgacctgcgtagcgctggaggattcggtaaatggcatgatcgcctctaaagcagcccgcatgcgttccatcgtcgttcctgcgccagaagcgcaaaatgatccacgttttgtattagcaaacgtcaaactctcatcgctgacagaactcaccgcaaaagaccttctcggttaatgaccaggggcagtgatcacgctgcccctggttctttatctgaatttgcattcaactgacggattaatcgtcaatttaagagaaagagttacaccgtcaccacttccgtgcactgtataaaaatcctatactgtacgtatcgacagtttagtgagttttatcatgacggcggaaggtcaccttctcttttctattgcttgtgcggtatttgccaaaaatgccgagctgacgcccgtgctggcacagggtgactggtggcatattgtcccttccgcaatcctgacgtgtttgttaccggacatcgatcacccaaagtcgtttcttgggcagcgattaaagtggatatcaaaaccgatcgcccgcgcttttgggcatcgtggttttacccacagtctgctggcggtatttgcgctgctggcaaccttttaccttaaggttcctgaaagctggttcattccggctgatgcgctacaaggaatggtgctgggttatttaagccacatacttgccgatatgctgacacccgccggtgttcccctgctctggccatgccgctggcgtttccgcttgcctatcctggttccccaaaagggtaaccaactggaacgttttatctgcatggcattatttgtctggtcggtatggatgcctcattcattacccgaaaacagcgctgttcgttggtcatcgcaaatgatcaataccttgcagatccagtttcatcggcttattaagcatcaggttgaatactaaaaaggcaaaaatcgcctttctgtaataagcaattccatttgaatataagagccagctcacagttctgttaatcttgcgccaacactatgactgctacgcagtgatagaaataataagatcaggagaacggggatgaactttccattaattgcgaacatcgtggtgttcgttgtactgctgtttgcgctggctcagacccgccataaacagtggagtctggcgaaaaaagtgctggtgggtctggtgatgggtgtggtttttggccttgccctgcataccatttatggttctgacagccaggtacttaaagattctgtacagtggtttaacattgttggtaacggctatgttcaactgctgcaaatgatcgttatgccgttagtcttcgcctctattctgagcgcggttgcccgtctgcataacgcatctcagttaggcaaaatcagttttctgaccattggtacgcttttgtttaccacgctgattgcggngctggtcggtgtgctggtaaccaacctgtttggtttgacggctgaaggtctggttcagggtggtgcagaaactgcacgtctgaacgccatcgaaagtaactatgttggtaaagtctctgacctgagcgttccgcagctggtcttgtcctttatcccgaaaaacccgtttgccgatctgaccggagccaatccgacgtcaattatcagcgtggtaatttttgccgcattcctcggtgtagctgcgctgaaactgctgaaggatgatgcgccgaaaggtgaacgcgtcttaaccgctatcgataccctgcaaagctgggtgatgaaactagttcgcctggtcatgcagttgaccccttacggcgttctggcactaatgaccaaagtggttgcaggttctaacctgcaagacatcatcaaactgggaagtttcgttgtcgcgtcctacctcggtctgctgattatgtttgcagtgcatggcattctgctgggcattaatggcgtgagtccgctgaagtacttccgtaaggtatggcctgtgctgacgtttgcctttaccagccgttccagtgctgcgtctatcccactgaatgtggaagcacaaacgcgtcgactcggtgttcctgaatccatcgccagtttcgccgcctctttcggtgcgaccattggtcagaacggctgcgccggtttgtatccggcaatgctggcggtgatggttgcgcctacggttggcattaacccgctggacccgatgtggattgcgacgctggtcggtattgttaccgttagctccgcaggcgttgccggtgtcggtggtggtgcaactttcgccgcactgattgtgctgcctgcgatgggcctgccagtaaccctggtggcgctgttaatctccgttgaaccgcttatcgacatgggccgtacggcgctaaacgttagtggctcgatgacagctggcacgctgaccagccagtggctgaagcaaaccgataaagccattctggatagcgaagacgacgccgaactggcacaccattaattcttatgctggcaacggtccgttttgtaaaggggccgttgccttactttttaaatgttccatcgcggcgatgcatactgactcatatttaaacagatcgtcagcgaaaaaatgtccaacttatcaatacattcctggctcaatgaatgtgcctgtagcgagaagcttaaaacctcatacccgagacgttttctaagtgaactatctggaatactcataatatcttcaagtataccacttcccattcccggaagatttagtggattaaaaagaagattgatattaagcattgatattatcgaaggaaactttaggagactctcatttttttgaatcgcagcaaaaatgctcccgacaggatgtatataatattgttcatagtatatagtccttaaatagtgaataaccaacctgttttttatactgatcaaattggtcattttttctgggcgaaatacagaagtgacatccattccaataaaatctttatttatacctcttatccgaatttcactaccataaagattattaattattactctatatttaacattgtcctgcagatatgtatcaaaactaagtgctggcgctcctggctttgaggcatcatagttaatgttagacatataggcaatcatataattaaagtttgattctgctatttcatcgcagtcacattgacccgttgatataaagaaagtgagtgctgtcatagtagactgcagcctttctttaaaagagtcgaaagccaggcttntaatatttaaatcaccataattactctgtattaagtttgtagaaaacatctcccgcctcatattgttaacnnnnttattatctcatttaaatctaagtcatttacaatataagtttaagagcgacgccacaggatgaactatcaaaaatagctcatcatgattagcaaaacttaaccattttaaaataaataaacaattaaagaaaaaagatcacttatttatagcaatagatcgtcaaaggcagctttttgttacaggtggtttgaatgaatgtagcaatgaaatagagaatttcaggccatgtaactcccggcaaaaccgggaggtacgtaatctttactcagtcacttccccttcctggcggatctgatttgcccaacgctgggcggattcaggcacagtaaacgccggtgagcgcagaaatgactctcccatcagtacaaacgcaacatatttgccacgcagcatccagacatcacgaaacgaatccatctttatcgcatgttctggcggcgcgggttccgtgcgtgggacatagctaataatctggcggttttgctggcggagcggtttcttcattactggcttcactaaacgcatattaaaaatcagaaaaactgtagtttagccgatttagcccctgtacgtcccgctttgcgtgtatttcataacaccgtttccagaatagtctccgaagcggggtctggctggtggtctatagttagagagttttttgaccaaaacagcggccctttcagtaataaattaaggagacgagttcaatgtcgcaacaaaacgaaaagaacccacatcagcaccagtcaccactacacgattccagcgaagcgaaaccggggatggactcactggcacctgaggacggctctcatcgtccagcggctgaaccaacaccgccaggtgcacaacctaccgcctcagggagcctgaaagcccctgatacgcgtaacgaaaaacttaattctctggaagacgtacgcaaaggcagtgaaaattatgcgctgaccactaatcagggcgtgcgcatcgccgacgatcaaaactcactgcgtgccggtagccgtggtccaacgctgctggaagattttattctgcgcgagaaaatcacccactttgaccatgagcgcatcccggaacgtattgttcatgcacgtggatcagccgctcacggttatttccagccatataaaagcttaagcgatatcaccaaagcggatttcctctcagatccgaacaaaatcaccccagtatttgttaggttctctaccgttcagggtggtgctggctctgccgataccgtgcgtgatatccgtggctttgccaccaagttctatactgaagagggtatttttgacctcgttggcaataacacgccaatcttctttatccaggatgcgcataaattccccgattttgttcatgcggtaaaaccagaaccacactgggcaattccacaagggcaaagcgcccacgatactttctgggattatgtttctcagcaacctgaaactctgcacaacgtgatgtgggcgatgtcggatcgcggcatcccccgcagttaccgcaccatggaaggctttggtattcataccttccgcctgattaatgccgaagggaaggcaacgtttgtacgtttccactggaaaccactggcaggtaaagcctcactcgtttgggatgaagcacaaaaactaaccggacgtgacccggacttccaccgccgcgagttgtgggaagccattgaagcaggcgattttccggaatacgaactgggcttccagttgattcctgaagaagatgaattcaagttcgacttcgatcttctcgatccaactaaacttatcccggaagaactggtgcccgttcagcgtgtcggcaaaatggtgctcaatcgcaatccggataacttctttgccgaaaacgaacaagcagcattccatccaggtcatattgttcctggtctggacttcaccaacgatcccctgttgcagggacgtttgttctcctataccgatacacaaatcagtcgtcttggtgggccgaatttccatgagattccgattaaccgcccaacctgcccttaccataatttccagcgtgacggcatgcatcgtatggggatcgacactaacccggcgaattacgaaccgaactcgatcaacgataactggccgcgcgaaacaccgccgggaccgaaacgcggcggttttgaatcatatcaggaacgcgtggaaggaaataaagttcgcgagcgcagtccatcttttggcgaatattattcccatccgcgtctgttctggctaagtcagacgccattcgagcagcgccatattgtcgatggtttcagttttgagttaagcaaagtcgttcgtccgtatattcgtgagcgcgttgttgaccagctggcgcatattgatctcactctggcccaggcggtggcgaaaaatctcggtatcgaactgactgacgaccagctgaatatcaccccacctccggacgtcaacggtctgaaaaaggatccatccttaagtttatacgccattcctgacggtgatgtgaaaggtcgcgtggtagcgattttacttaatgatgaagtgagatcggcagaccttctggccattctcaangcgctgaaggccaaaggcgttcatgccaaactgctctactcccgaatgggtgaagtgactgcggatgacggtacggtgttgcctatagccgctacctttgccggtgcgccttcgctgacggtcgatgcggtcattgtcccttgcggcaatatcgcggatatcgctgacaacggcgatgccaactactacctgatggaagcctacaaacaccttaaaccgattgcgctggcgggagacgcgcgcaagtttaaagcaacaatcaaggtcgctgaccagggtgaagaagggattgtggaagctgacagcgccgacggtagttttatggatgaactgttaacgctgatggcagcacaccgcgtgtggtcacgcattcctaagattgacaaaattccggcgtaaatatggataaggtcacgtcccctggggagtgaccttaccnccttacttacacatcaagataactacccaaccgataaccacgctcagcaattgcatatttcaacgacgctgatgtcagcacttccagctccgttaaccgtgggaaacagtaagcactctggcgaatcgtattatcgacaaacgccggatggcacatgacttccagcgagcgttccccgcgatggctggaatcatcaagcacttgcaggaacagtgcctcgctaatctcttcaccataaaatgcgctactgaatccgtgcgaactgcgcagattagccggtaaatcaccagcgttagatagcggctgacggtcgatgcgcaacgcaatcccctcttcagccgcaaacctggcaacaatagggaaaatctgcgggaacatatgcacatgatgatggctatcaagatgcgtaggtttgcgtccaaatagctcaatgaaacgcaaatactgactggcaagctcctgagtaatttcttccagcggtaaagcatcttcttctgccaactgccagatccattttcccagcacaccatcgcgggttaaccccggcatagctgtcagtggcttgcccatagtaaggacaaagtgcatccctatggccagactcggttcatcacgactcaactgcaccgcatggtcaatagcctgcccattcaccagcgccgtcgtcgatgtgacaatcccattgcgacaggcctcgataatgccgtagttctgacctttgcttaagccaaaatcatcggcattaacaatcagtaagcgttccataatcagcctcggttaatgtgcttttttaagctctgcgatgcagtcggcaaaatttggcagccatttctcgtgcgccagaatcatctcgcgtgccagcagctcagcatcgcgatcggaatgcaccaacggactaaggtttagcgccagtaacacatcgttaaattctccgctaagtgcggcgttgctggcagcaatctcgaagcctttaatggtgtgaatcagccccatcactttatcatcgaaatgcgtaatgcgcggatgtggcgtcgcgccatcgcgccccagcgtacaggtcatttctaccgcccagtctgccggaatattatcaatatgcccatgatgcgggatattaacgtaatgttctgcttgcttatcgttgtagatagcgttgatcacttcgcacgctgcatcagagtaataagccccaccgcgctgttccagttctttcggcttaactttcaactccgggtttttatacagctcaaaaagttgtttctcgactttctgtactacctgcgctcgtgcgccgcctttgtagtattcgcccatttcaatagccagcatctctttttgcttgaagtaataaagcaaataagaacacggcaacagattcagagaacgaattaagccttcgctaaatggcagatcgaaaatatttttaacgccagatgcttttaactgcccggatgccacaccatcaagcaattcggcaaagcgcgacttgccatttaccagcacatccttaatgaacaccatatggttgaggccgaacagatcgatagataaatcatcgctgtctttcagcatcagaacatcgcgaataaacatcttcatgccgatcggaatattacacacgccgataaagcgtttaaatccggtatgacgataaacggcttcagtgaccattcccgccgggttagtgaagttaatcacccatgcattcggacaaagttcttcgacatcttttacgatgtcaaaaatcaccggaatggtacgcagacctttaaacagaccgcccgcgccgttggtttcctgaccaagataaccatgacttaatggaatacgttcatccagttcacgcgccggtaattggccaacgcgcagttgggtagtaacgaaatcagcatctttcaatgcttcgcggcgatccagcgttttataaagcttcatcgggacgccagcgttatcaatcatccgttggcagagatcgaaaataatatccagtttagctttgccaccttcgacatccaccagccataattcgctgaccggcaattcgtgataacgcttaataaatccttccagtaactccggggtatagctgctcccgccaccaatagtgacgacttttaatttctggctcataatttctcccttcagtacagaatactgatatctggcatatctgccccccccggacataaataatccagcaacaggacagatatgtgaattgtcaggtataacgacttactgattaaattcagtcaatttcttacgatagctcttaggcgtaaaggacgttaatttcttaaacgttttaataaacaaactcgggctactataaccggcctcaaacgcaatatccgtcactgaatagttggtcatttccagttgttttttggcaaaattaatacggatttcattaataatctgcattggcgttttgccataatatcgttgagtcgcccgcgtcaaatattcctgtgatttggctgacaacgtcaccatattctccagcgccgattcactaaactgctctttatcatgcatcttttctaccgtacttttcagccactgcggtacatcatcaatcacctgttcttcgcggtaatgacgtaaacggttaatgacataaaaagtaaccatctcaacaaactcttccagccctgtttcgcggaaattcaatgaagaaatcactgtttccacataggtgagaaaagcgttattggtccggtatacctgcgaagctacaaagcaataaggcaacaatggcaggtaatgctgctcaaaaaagcgtttactgatcccaacgttcaatatgcgcgtggcaccaaactcataaaaactttgatggtgcgaacctaacggaataaaaacaaaatcgccccgttccagtaacacgcgcttaccgttaatctcctggaaataacgcccggttaataccagagtaaattcataatagtcgtgctgatgcagtccgctgatactctcagttttgttatagataaacacatggaagtttttgccattaaacaactgctgttctcgggcagtggcaatttccggcgcgttaatcactggctgcatcatcgactccttatgccttcagtttttcatgaagctcaattaattcagtaatcagttcacgcgcaagcatggacgtcattaaatgatcctgagcgtggaccagcaccagactcactttcatcttaccttcgcccgcatcgccttcaatcagtttcgtctgtaccagatgcgcttcattcaatgccatccgtgactgatccatcatggcttttgctgcggcaaaatcgccctgcttcgcctgtttcagtgcggcatacgccaggctgcgcgcttgtccggagttgatgataagccccatcaccacttcttccagctcttcagcttccgtttgcgtatcgggaatattatcgagatccatcatacatcgttcctctcttttcttaccggcacgattacccgtaccggcatcgattaaaatttcagggcgttagcgatatcttcttcgctctcttctttatcaatcgcattttgtgctttgttagccaccacaacaaagggcagataaattaacgttgcgataccaaggttgaagagtgcaaccagcaatgcggcgacgctaccgttggtgttaaagaaggctcccagaccggttggcatggtccacggtgcaatattggtcaccggaggaataatgcccatatagtacgctgccagggtgattgccgccagaatcggttgtaccagtacaaacgggataaacatcaccgggttcatgataattggcagaccaaacagaatcggttcgttaatctggaagatgccggacggcagcgccagttttgccacctgacgataatcagcacggcgagaggcaataaagatagccaggatcaggcctaaagtcgcaccactgcctccaaggaaaataaaggagtccagcatcggcttggcccagatatggaaggtcttaccggctgccagcgccgcttcgacggaaccatattgctgataggtcgcgatattttccagcgcccacggcgtcataatgccgttgtccagtgcggtcagcgccagcgcgccatgaataccgaagaaccagagcagtggaacaaagatcacataggcccagcccaccacgctacccaacgatgccagtggggttgagatggtatccataatgatctgatggaagttggtgccccaggtattcaacgcccaagcaataatccccatcacggaaagaataataaagccgggaattaatgccgagaaggaacgcgatactgaagcaggtacgctgtcgggcagtttaatgacccaattgcggcggacaataaaggtaaacatttctgccaccaccaggccaataataatcccggagatgatattcgccccacctaaccagtttgcgccaaccgcataggcctcaccgacactatatggggtgacggtcataaatgctgcaacggataacaacccagccgccagcgcatcgactttacgctcttctgccagcgccatgccaataaagaacggtgccattaaagacattatccctaatgttccgttatatacgttgccgccaatacctttcagaccattaagtgtttcaatggttgaggcgtcgaggcgaatacctaaggaataaaaaaacgacccctccccaaagnttagaaaaacgttgttaattaatacaaacatggcccccgcaagggttaacggcattaagcgaataaagccatttttgattgcattaacgtgtggctgctttcctattttaactgcaaaagggaggagtaccttttcaagcgatgcaataacattactcatagaaaaatacccttaaaaaccgcaatttaaatattgnggtattgatttatgaaataactctttgacgggaaaatttaaaataaattaatttgctgcggcttttttaatcgctgcaaccgcagccttaagcacgcctaaaccatcgactttgccataaagcagcgagtcaattacttcaaccggtttgttgggtaacaaacgctggatttcgggcaacatataagcaatctgcggccctaataacacgacatcggcattctgacctttttcaccagccagtgtttccggaaatgcttcaataatgaccggaacttcatatttttctgcctgtgcgcgcatttttgataccagtaaagaggtagacatgcccgcagaacaaaacagataaatgtgtttcttttccataaaactgccctcatcgacgattatctgtcagccagacactccgcaagccttaacctgcttccatgctctgggtaacttgcgaaaccaacatgactttttttgtggctgaaaggagtatacggtatagacctgagcaatagtatttctttgaccttataaattgtctctccttgacctgcggttatgaccctcttcacatttcgggcaaataattcgcgaagataattaagaactcaggccaaaaaaaaaccggcgcaatggccggtttccgttgttactcaagctttcagacgaagtgattacttcgcagcctgtggatcagtgtcgtattcagcacaggtctgataaccggagttgatgacatgtccggtatcatctaacgcgacaaagtaggtttctgctttaccatcacgttgacccaggatgtaggtctggcaagtaccacgagcatggatcatgctcacttcagacgaaggtttaccncgcaatttgtgcaacctgcgcccggctcatgccttttttgacgtctttcaccacaggctgtacaaactggtctttggtacgatcataagccgtacaacccgccagcatggttaataccgccgctgcactcagaattcctgccatattcttgttcatattccgtcctcttgtttatcagcgtgttagataagcctggaatacattgggcgctttttcaagcccatgaacgaaacggctccgctttcagaggattcctgtatgacgttttaaccaccattcagcccgctgtcgcttgtcgtttcagtagcaacgggttagctttaaggaagttttgtcttttctgtctggaggggttcaatgacattgcaacaacaaataataaaggcgctgggcgcaaaaccgcagattaatgctgaagaggaaattcgtcgtagtgtcgattttctgaaaagctacctgcaaacttatccgttcattaaatcactggtgctcgggatcagcggcggtcaggactccacgcttgccggtaagctgtgccagatggcgattagtgagctgcgccaggaaaccggcaacgaatcactgcaatttattgccgtacgcctgccctatggtgttcaggccgacgaacaagattgccaggatgccattgcctttattcaaccggatcgcgtattaaccgttaatatcaagggcgcggtattggctagcgagcaggcattgcgggaagcaggcattgaactgagcgattttgtccgtggcaatgaaaaagcgcgtgagcggatgaaagcacaatatagcattgcgggtatgaccagcggtgtcgtggtgggcaccgatcatgcagcagaagccattaccggattcttcactaaatatggtgacggcggtacggacattaatccactgtatcgtctcaacaaacgtcagggtaaacagttactggcagcattaggttgcccggaacacctttataagaaagcgccaacggccgatctggaagatgatcgcccttctctgccagatgaagtggcactcggcgtgacctatgacaatatcgacgactatctggaagggaaaaacgtacctcaacaggtcgccagaacaatagagaactggtatctgaaaaccgaacataaacgccgtccgccaattaccgttttcgatgatttctggaaaaagtaataatttgcacctattggattgtgcgaaaaagagtaatttgttcacgccggatnnggcgtgaacgccttattcgacctacaaaactatgcaaattcaatacattgcaggagtcgaataggcctgacaggcgtagcacgtcagacggtgtaacctttgtcatcgacccgcctcttttttaatcgcttcccggctgttacactggatagataaccagcattcggagtcaacagtggtacggcgtttaacttctccgcggctcgaatttgaagctgcggcaatttatgaatatcccgaacatttacgttcattccttaatgacttacccacccgaccaggggtgtatctgtttcatggcgaaagtgacaccatgccgctctatatcggcaaaagcgttaatatccgcagtcgggtgctttctcatttacgcaccccggatgaagccgccatgctacggcaatcccggcgaattagctggatctgcaccgcaggcgaaatcggcgctctgctccttgaagcgcgattaatcaaagaacaacagccgctgtttaataaacggttgcgccgcaatcgccagctctgtgccctgcaattaaatgaaaagcgcgtcgatgtggtgtatgccaaagaggtggatttttcacgagcccccaacctgtttggcctgtttgccaataggcgcgcagctttgcaagcattgcagagcatcgctgatgaacaaaaactttgttatggtctgttgggactggaaccgttaagtcgcggtcgtgcgtgttttcgttcagcgctaaaacgttgcnccggagcatgctgcggtaaagagagccatgaggaacatgcgctacgcttgcgccagtctctggancgtttgcgggtggtgtgttggccttggcaaggggcggtggcgctgaaagaacagcacccggaaatgactcaatatcatattattcaaaactggctgtggctgggggcggttaattcgctggaagaagcgacaacgttaattcggacacccgccgggtttgatcacgacggttataaaattctttgtaagccgntgctttccggtaactatgaaattactgaacttgatccggcgaatgaccagcgagccagttgatttcactgaacaacagtttaccttgcggttgtaaaagccgcagggtgtgcctgccatcgaaccagcacgcgccctggtcggtagtgagcagtttgtcgcccagttgccacgccccgttaatcacaaacaccaccccgccgcgtgagccaaaggtagtaaacgtacgttcggcaattctgactttcgccttacagacatccangcgcgtcataatattgaaatccatcgacatctgccctgccgtcagtttcgcttttaccacctggtccgccgcaaaggcaaaaggctgtaacggttttaaggtatggttaaagtggtctgcgctttcaaggaacatctcgccgccttccagcaacgtcactatcctttccataccaggaaacaaagaaaactccccattcgccgcgatggatgcaatgctggcacgccagtaaaaatcacgttttgccggtgggaaagtgcaaatttcgcgcgtttcaccggcagcgtttcgccacaaattcaccgacattttacgcatatcaaagtattccatactcgctcccggcccgttcttttcattgttatcgttcaggtaaccgtggatggttatcggcaactcgggtgatttacgttagtggtgatcaggctttttttacaactgtttgagaagagaaaagaaaaccgccgatcctgtccaccgcattactgcaaggtagtggacaagaccggcggtcttaagttttttggctgaaagattattcagcagttgcaggcattttaccttttgccgctggacgttctgtcagacgcttctcaaaattagcattaaattgctttttctgttccggcgtcaggatgttgtaaattttgttctgggtttccatgtgcgccagcatgttagctttgcgctgttcttccatttttgcgatctgcgcttcagcttttgctttatcgaaggtatcgctggcaatgatgtcatgcattgcgcgacgttcttccagcggcggacgtttcatctggtcacgctggcctttcatgatttcgcgaatctgctgtttctgcgcgtcggtcaggttcaggtctttgaacatcatgtcctgatgcggaccgaacttgcctttgtggtgcatcatcggcttcgcgtcagccggtgctgcggtagtggtgtctgcggcatgggccaggttagccgcgccaagagccagggtagaggcaacaaacagtgcagttaatttacgcatattctatatccttcctttcagttatttattacggctttcttaagtagcgtgccgtgttgacgagattaactttactgactttagcgtcaattaatcagagcaacggtaaaacaatgaaagtgtaaaaaacacttttgcgccaattatggagaaaaaaagaaaatttgatggagagtgatgagagaatattacaacaccatgattttgcagagattatgaagaactataccggatgactggtgataaataaagcaaataaccaggattaatctgtattaatttataagaaggtaacttaatacccgcagaaagatttctgcgggtaagtattagcttattttttcgagcattaatcccgcgcgtaatcccaacgctaccaacggattagggaataacacatactctacatcatgggttacggtaaaacgttcctcaccgtcctgcgccagcaacgttcctttcttaaacggcataaaattcagcgtgtcacttgccatatgcatttcgaaggacggcgagtggcgagtaatttgcgaaaccacccgataacggagcggcggtgttctcacgataccgacactctcaccagatagcagcgcagcgattgcgctggcagttactgcaaactggcgaagatcgttttgcccaaagggcaacgctttgccaagttccagcgtacaggccagcgcgccaaaatgtctggcgctgaaatgggtaaacgtaccaccaggctcctgatggaacaccagcgcctccagccccgccgcacccagccacgtcaggaatttctcgtcccagggaatgtcgcgttgcggtaatacaccgaactgcggatgcaaggagccacgaattgcggtatgtagatcaaggtgccagcgcacagattctttgccctggtcataaaaatcttccaggcactgttccagttcgcgcgcccgacaggtttccccgctttcagcaaacagctgccaacgaccgccaaacattcggttcatatcgctatggcaataacgtttcccttgcttcagcgcaggaggattcccgaggatcaccagcaaccgccaccgtaacgggatctcgccgtgagatatcgcgccaagcaatgcatcaagcatctccacaggtgccgtctcattaccgtggatccccgcagaaatcaccagagcgccttgcggtggcgttaatggcgtcagttccagcacaccatcgcccagccagcgccagcgaacgccgttgatttctcgctcggtgatgacaggttttttactcgttaaggtcagagcaagaaaattatccattgccccntccctcgcgntggaacggataaaccgaaccgagattcagtaattggctcaatacatccagtgcttcccgcccttcgcgcagcaattgcgggtcggccagatcggcagcagtaagacgatcgcggtagtaacgatccacccagtcattgagcgcattaaacaaggtatcgttcatcatcaccgccggattcaccgcccggcgttcttcttgtgtcaataccacccgcaaccgcaggcacgccgggccaccgccattcgccatgctttcacgtaaatcaaagacttttagttcgctaatcgggttgtcagcggcaaggagttcattgagataaccccatactccggcgtgttcccgacactcctgaggcagcaccaacatcatggaaccatcatcgcggctcaacagttggctgttaaacagatatgtagacaccgcatccgacacggaaacctgagttgccggaacttctatcgccataaaaccgttcacccgcgcacgcaggtttgccagtaactgtgactggcgagcgaacgcctgttggtggcaaaacagcacctggcggttactcacggcaatcacgtcattatgaaaaacgccctggtcgataacgtccgggttttgctgggcgaaaatcacctgttggggattcacctgattcagccttgccaccgcctcgctggcttcgcgagtctgtcgcgccggataacgggaaggccgggtatcattgccctcttctcgcccgtagacaaaaagttgcatacccggttcaccgtaatgaccgccgagacgattgtggtttgccgccccctcatcaccgagcaaggctacctgcggcaacgccgaatggacactaaatttctcttcgtcgttaaa

SEQ ID NO: 863 - DNA, 2884 bp, Escherichia coli
  Strain O55:H7
  modified_base (548)..(548): a, c, g or t
  modified_base (1647)..(1647): a, c, g or t
  modified_base (1776)..(1776): a, c, g or t
ttttaacagcgattcagtgacgggcgcttccagcgaacggtgaaatttattgttcaggttagcaacggtgagatgcactttgccatccagcgtatcggcagatggcgcgatcgttgccgcattggctacccacattggcgaagcggaactgacgctggaaagccagtgcggtgcctggcgtacaaccttttccagtacctgctcatcgctaccactgaatcccaactgacgcagcaccggaataaacggacgctcgtgaggcgggatcacggcctgggggaatcccgcatcggcaagggttttcattttcagtaagccctgttttgccgccagtcgcgggttagagacctgaaaacggtgacgggtagaggctttattaccaaacgacaggcccgcgtaatgatgcgtcagccctaccagcccgtcgaaattaacttcccaggcgttcatcgcaccacctcatcggaaaaatccagcccggggttaagcgttgcgggcaaagttaacgagtccgactccaggctcgccataggccatgcgcagtaatntgcggcataccaggcgctggggcgatggttaccggatgcaccaatgccgccgaatggcgcggtactggcagcaccagtaagcggtttgttccagttaacaatccccgcccgcgcctccagcaacagttgatcgaatttttcccgctcgggggaaaccagaccgcaagagagtccgaagcgagtgttattcgccattcgaatcgcttcctcgaaagaatcataacgccagacgcgcaataacggtccgaacacctcttcatctggtacgccagcaacgcctgtcatttcaatgatccccggcgtcagcaacgatgtccctgcttgtaataagcgcggcgcaagcagggttcgtccacccatcgcttccagttgctgccaggcagtaaacacctgctgtgcggcctgttcagaaatcagcccgccaataaacggctgcggttcgtcatcccagttgcccggcgttaatcgctggctgacggcaaccagacgagcaagaaatgcatcgccctgcgccccgcttttcagcaatacacggcgggcgcaggtgcagcgttgcccggctgtaacaaacgccgactgaatggtcagatggacagccgcgtcgatatccgccacctcatcgataattagcgggttattgccgcccatctcaagggcgagaattttctccggctgaccggagagctggcgatgcagctggtagccggtattggcgctgccggtaaacagcaagccgtcgagatcctccagcgcactcagcgcctgacccgtttcacgcccgccctgcaccaggttcagcacgcctggcggcaagccagcctgctgccataaacgcattaccgcttcgccactccacggtgtcagttcgctgggtttaaagataatggtgttacctgccaacaatgcgggaacgatatgtccgttcggcaaatgaccagggaaattatacggcccaaacaccgccagcacgccgtgcgggcgatgtcgcaggctcgccgcaccgtccggcatttcactacgctgctcgccggtacgaacgtgatacgccttaattgatatcgcgattttattgatcatcgccgtcaattcggttgccgcntcccagcgcggcttgccggtttctcgggcaatgattgcggttaattcgcctttattcctttccagcaatccggcaaagcgttcgacaacggcctgacgttcagcaaatgagagccgcgcccagcgcggnaacgccgcacgggctgcccgacaagcctgcccgacctgagcggcatcggcatcattgccttgccataacacctcgcccgataccggattacgcttcacacgcgatgcaccctggcccgttatccagtcaccgttaatccataaagtcatgctgttttctcctctgcgcacaggcgcaccagacgaacgcgatcccctgcatggcatttgagggcatccagttgtgcggcggttaaaatcaaacgctcggttgccggatcggtacgcaccagcaccacgcggaaatggtgataattttcattggcgaccaggcaggccggaaaatcgccctgcgcaggctgcccttctgccacttccaccagccgacttttacggatggcgcgcacgcggtcgatgtcacactcaagcgtcggcccaccgtcgaagatgtcgatatagttgcggtagcgaaaaccttctttctccagcaccgcgcgggcaggcgcggtttgcggatgtacctgaccgatgacgtcctgggcttcctgggataaaaagtgcgtatagatcggatgtttcggcatcagttctgcaataaatgccttttgcccggtgccgcagagaaaatcggcgcggctaaaatccatcgaaaagaagcgtttaccgaggctttgccagaacggtgaatagccgtgttcgtcaatcaccccgcgcatttcagcaaccactttgtcattaaacttgtcgcgaaaagccgccataaacataaagcgcgatttcgacagcaaatagccgttgccctctttgcgccagtccgggtcgagaaacagcgtgcacagctcgctgctgccggtgtgatcgttactgagaaacaacgtcggcaatgcgttatagacattcagctcttttgaggcgtgaaccaacgtgccgacgcgatagttgtaccagggatcgttcagcccaactgccacctcaatggcgcaaatccccgccacggtgcctgtctcgctatcttccagtacaaacacataaccctgctcacttttgggcagttcaccttgccaggttttgattgccctttcgatacgcgccgaaagcgtggcttcattggcgggaagcgacgtcaggcc

SEQ ID NO: 864 - DNA, 6192 bp, Escherichia coli
  Strain O55:H7
  modified_base (42)..(42): a, c, g or t
  modified_base (949)..(949): a, c, g or t
  modified_base (3634)..(3634): a, c, g or t
  modified_base (4807)..(4807): a, c, g or t
  modified_base (4878)..(4878): a, c, g or t
  modified_base (5891)..(5891): a, c, g or t
  modified_base (6009)..(6012): a, c, g or t
  modified_base (6190)..(6191): a, c, g or t
ccgttttgctggcaagctgcatcagcgccgagacatctgagngctcaacgggacggatgaccatcatgatgaaccttggctaacaaagtgttcgcaagcaactgcaaagcgatccagtccggtcgtcacctcttcttcgctgacattgagcgcaggcgcaaaacgcaccacgttgccacccgcaatcagtaccatcacgcctgctttcgccgcttcctgagagatctgtttcgcttgcccggcgtaatcggcattcagtacacagccaatcagcaaacctaagccgcgaacttcattgaacaaaccatagcggtgattaataatattaagacgctcaacaaaccagtcgtgacgttgcttaaccccgttaagcatctctggcgtattgatgagctccagcactttgcctgccaccgccgaggccagcggattgccgccataggtggtgccatgagtgccaacggtcatcacgctggcgcactcttcggttgctaacaacgcaccgaccgggaaaccgccgcccagagctttggcggtagttaacagatcaggcgtcacgccgtagtgcatataggcatacagttccccggtgcgcccgacgccggtttgtacttcatcaaaaatcaacagcgcattgtggcgatcacacaattcacgcagaccttgtaaaaatgcgttgctggctggcaccacaccgccttcaccctggatgggttcgacaatcaccgcacaggtagagtcgtcaatcagcgcgctggcagagttaatatcgttatatgcagcatgacggatatctggtggcagtggcgcaaaatcctgtgaataggctggctgcccacccgcactaacagtaaacagcgtgcgaccatgaaacgcatttttaaacgccacgataccgctcttatggctgccgtagcggtcgtgagcgaatttacgcgccagttttagngccgcttcgttggcttccgcaccggagttacaaaagaaaacgcgatcggcaaacgtggcgtcgatcaattttttcgccagtcgcagtaccgactcgttggtgtaaccgttgccggtatgccagaacttactcgcctgttcgttcagcgcctcacgcagttccggatgcgcatggcccagcgcgttcaccgcaatgccacccgcgaagtcgatatactctttcccctgctgatcccacaagcgcgaaccttcgccacgtaccggtataaacggtgccggagcgtaaacaggtatcatccattcatcaaagttttcacgcgtaattggctgagacatagcgacctctacagtaaatagctcgttatttatatgttaataataagtaatgttttcgctgtaaatgtagattgcagggttcgtgccagccagtgataaaagtgcataaacggcggaggctaactggaaatcaaggagttataaccaaaccatatgcatttaaagtgcatattaagtgaatacgtttgcgatgtgggtgaataaaaagaataaaaaacgcaatgttatgcagaagtaaaatataattctggaattgtgatcattgacgaaatttactggaaattactgcgccattctgacgcagcgcgcaccaaaagcgggcattttttgcgccatcgttgacatcattaacaaccatcgatcaaatcacttaacaacaggcggtaagcaaagcgaaattctgctaccatccacgcactctttatctgaataaatggcagcgactatgaaatttgtctcttttaatatcaacggcctgcgcgccagaccccaccagcttgaagccatcgtcgaaaagcaccaaccggatgtgattggcctgcaggagacaaaagttcatgacgatatgtttcccctcgaagaggtggcgaagctcggctacaacgtgttttatcacgggcagaaaggccattatggcgtggcgctgctgaccaaagagacgccgattgccgtgcgtcgcggctttcccggtgacgaagaagaggcgcagcggcggattattatggcggaaatcccctcgccgctgggcaatgtcaccgtgatcaacggttacttcccgcagggtgaaagccgcgaccatccgataaaattcccggcaaaggcgcagttttatcagaatctgcaaaactacctggaaaccgaactcaagcgtgaaaatccggtgctgattatgggcgatatgaatatcagtcctggcgacctggatattggcattggcgaagagaaccgtaagcgctggctgcgtaccggaaaatgttctttccttccggaggaacgcgaatggatggagagactgatgagctggggattggttgataccttccgccatgcgaatccgcaaacagcagatcgtttctcatggtttgattaccgctcaaaaggttttgacgataaccgtggtctgcgcatcgacctgctgctcgccagccaaccgctggcagaatgttgcgtagaaaccggcatcgactatgaaatccgcagcatggaaaaaccgtccgatcacgcccccgtctgggcgaccttccgccgctaatttagcagctctcctggctcaaactgggtcaggagaattaaccttgagaaaaatcaacaaactgtcagtaatgatttgttgcctgccgtcctttgttataccgtcactgcgtttttagttgtctgaccacttctctattatcaagtttgatataggaaactccacgatgaacgctgagcgtaaatttctttttgcctgtcttatttttgcgctggccatttacgctatccacgctttcggtttattcgatctgctcaccgatttaccccacttacagacactcattcgccagagcggattgttcggttatagcctctatattctgttattcatcattgccaccctctttctgttaccaggaagcatattggtgatcgcgggaggaatagtttttggcccgttcttagggacactactctcattaattgccgccacgctggcctcctcgtgctcattcctgctggcgcgctggatgggacgtgatttactgctgaaatacgttggccatagccataccttccaggccattgaaaaaggcattgcgcgtaacggtattgattttcttattctgacccgcttaatcccgttgtttccttacaatattcaaaattacgcttacggattaaccacaatcgccttctggccttatacccttatttcggcactcacgaccctgcccggtattgttatttataccgtgatggcaagcgatctcgccaatgaaggcattacgctgcgctttattttacaactctgtctggcgggcctggcgctgtttattctcgtccagctcgcaaaactctacgcccgacacaaacatgtggatctgtctgcttcgcgccgcaacccacttactcacccaaaaaatgaaggatagaacgatgttgcaacattattcagtgtcatggaaaaaaggactgactgcactctgcttactggctgttgctgggcttagcggctgcgatcaaaaagagaatgcggcggcaaaagtggaatacgacggactttcgaacagccaaccgctgcgcgtcgatgccaataaccatacggtaaccatgctggtgcatattaatggtcgtttcctcaccgacgacactngtcacggtattgtgtttaaagatggctccaacggacataaatcgctgtttatgggttatgcgaccccgaaagcattttatgaagccctgaaagaggcaggtggtacaccgggcgaaaacatgacgatggataataaagaaacgactcatgtcacaggcagcaaactggatatttcggtcaactggcaaggggcggcaaaaacgtattccttcgatgaagtgattgttgacagtaatggcaagaaactggacatgcgctttggcggtaatttaacggcagcagaagagaagaaaacgggttgcctggtgtgtctggatagctgcccggtcggcatcgtcagcaatgcaacatacacttatggtgcggttgaaaaacgaggtgaagttaaattcaaaggcaatgcctcggttctcccggcgaataacacgctggcaacggttacctttaaaatcaccgaataaagccaggataaaggatgatgaagatgcaatcgcgtaaaatctggtactaccgtataaccctcatcatcctgttgttcgctatgctgctggcatgggcgctgcttcccggcgtccatgagtttatcaatcgcagcgttgcggcgtttgccgccgtggaccaacagggtatagaacgctttattcagtcttacggcgcactggcggcagttgtctcgttcttgttgatgattttacaggccattgctgcaccgctacctgcgtttttgatcacctttgccaatgcgtcgctgtttggcgcgttctggggcggctcgctgtcgtggaccagttcgatggccggcgcggcactgtgcttttttatcgccagagtgatgggccgcgaagtggtggaaaaattaaccggcaaaaccgtacttgacagtatggacggctttttcactcgctacggcaaacacaccatcctggtctgtcggttattgccttttgtccctttcgatccaatcagctatgctgccggtttgacttcaatacgttttcgctcgttttttatcgccaccgggcttggtcagttaccggcgactattgtttattcctgggcgggcagcatgttaacaggcggtaccttctggtttgtcaccggactgtttattctgtttgccctgaccgtggtgatttttatggcgaagaaaatatggcttgagcgccagaagangaatgcctgatgggtttaccgccgcttagcaaaattcctttcattttacgtccgcaggcgtggctgcatcntcgccattacggcgaggtgctaagccccattcgctggtgggggcggatcccgtttatcttttatctggtgtcgatgtttgttggctggctggagcgcaaacgctcaccgctcgatccggtagtacgatcgcttgtcagcgcgcgcattgcgcaaatgtgcctgtgtgagttttgtgtggatatcaccagtatgaaagtcgccgagcgcaccggcagcagcgataaactgctggcagtggctgactggcggcaaagcccgctctttagcgatgaagaacggctggcgctggagtacgccgaagccgcaagcgtaacgccgccaacggtcgatgatgccctgcgtacccgactggctgcgcattttgacgctcaggagctcaccgaactgacggcattgatcggcctgcaaaatctgtcagcccgttttaattctgccatggacattcccgctcaggggctgtgccgtattccggaaaaacgttcttaaggagagatgatgcgccattgtgggtggttgctgggattgttatcgctgttttctctggcaacacatgccagtgactggcaagaaattaaaaatgaggccaaagggcaaactgtctggtttaacgcctggggcggcgataccgcaattaaccgctatctcgactgggttagcggcgagatgaaaacccattacgctataaacctgaagattgttcgtctggcggatgccgcagacgcggtgaagcgcattcagaccgaagctgctgccggacgtaaaacgggcggctcggtggatctgctctgggtgaacggcgaaaacttccgcaccttaaaagaggccaatttactgcaaaccgactgggcagagactctgcccaactggcgctatgtcgacacacagctgccggtgcgggaagatttttcagtgcctacagaaggggctgaatcgccctgggggggcgcacaactgacatttatcgcccgccgcgatgttacgccacagccaccacaaacgccgcaagccttantggagtttgctaaagccaatcccggcacggttacctatccgcgcccaccggactttaccggcacggcgtttcttgaacagttgctgattatgctgacgcccgatcccgccgcattaannnnagcgccgaacgatgcgactttcgcccgtgtcactgctcccttgtggcaatatcttgatgcgctgcatccgtatttgtggcgcgaaggaaaggatttcccgccttcgcccgcgcggatggatgctctgctgaaagccggaacatttcgcctgtcgctgacctttaaccccgcgcatgcnna

SEQ ID NO: 865 - DNA, 17417 bp, Escherichia coli
  Strain O55:H7
  modified_base (5)..(5): a, c, g or t
  modified_base (109)..(109): a, c, g or t
  modified_base (4269)..(4269): a, c, g or t
  modified_base (6834)..(6834): a, c, g or t
  modified_base (7834)..(7834): a, c, g or t
  modified_base (8761)..(8761): a, c, g or t
  modified_base (11989)..(11989): a, c, g or t
  modified_base (13259)..(13259): a, c, g or t
  modified_base (13699)..(13699): a, c, g or t
  modified_base (15231)..(15231): a, c, g or t
  modified_base (15261)..(15261): a, c, g or t
  modified_base (15311)..(15311): a, c, g or t
ccagnggcgatttgcctgcaagcagttacagttttggctttcgcgaggggatgattggcaacgtgcatttcgtcaccattcctgccaacgcgaatgccagtgctgcggngaaggtagttgccaatttcttgctctcacccgatgcgcaattgcgtaaagcagatcccgctgtctggggcgatccttctgttctcgatccgcaaaaactgcctgatgggcagcgcgaaacattgcaatcaagaatgccgcaagatctgccgccggtactggctgaaccgcacgcaggttgggtaaatgcgctggaacaagaatggctacaccgttacggtacgcattaatctttttgctgtgggcgatggtggcggtgatttatgcaccgctgatcccgacagctctcacgctgatatcgcctgctttgtcgttgacacactggcaggcgttatttgccgatccacagttaccgcaggcattactggcaacgctggtgtcgacaaccatcgcggcggtcggggcgttgttgattgccctactggtgattgtggcgctgtggcctgggccgaaatggcagcgtatgtgcacccgtctgccgtggctgctcgccattccccatgtggcttttgccaccagcgcccttctgctctttgctgacggagggctgctttatgactatttcccgtatttcactccgccaatggacaaattgggtattgggctgggcttcacgctggcggtgaaagaaagcgcatttctgctgtggatcttagcagcggtattgagtgaaaaacggcttttacagcaagtcatcgtgctggattcgctgggctacagccgctggcaatgcctgaactggctgctgttgccctccgtcgcgcctgcgctggcaatggcgatgctggcgattgttgcctggtcgctgtcggtcgtagatgtggcgattattcttgggccaggtaatccaccgacgctggcagtaattagctggcagtggttaactcagggcgacgccgatcaacaaacgaaaggcgcactcgccagcctgctgctgatgttgttactcgccgcctacgttttgctgggctatctgctatggtgtacctggcggcgtactattccccgcgtagatggcgttcgtaagcctgccacgcctttattgccaggcattacgctggcgagttttttacccttgaccggtgtgctgtgtgtggttctgctggcgatcctcgcggatcagtcgacgatcaatagtgaagcgctcatcaacagcctgacaatggggctggtggcgacattcatcgctttgctcctgttactgctgtggctggaatgggggccacagcgtcgccagttgtggctatggttgccgattttattaccggcactgccgctggtggcgggccagtacacgctggcgctatggctgaacatggatggaagctggacggcggtggtctgggggcatctgctgtgggtaatgccgtggatgctgtttatcctgcaacccgcctggcagcgcattgattcacggttaattttgattgcacaaacactgggctggtcgcgggccaaaatcttcttttacgtgaaatgtccgcttatgctacgccctacgctgattgccttcgcggtgggattttcagtcagtattgcgcagtatatgccgacgctgtggctgggcgcggggcgttttccgacgctcaccactgaggcggtggcattaagcagcggcggcagcaacggtattctcgccgccctggctttatggcaactgctattaccgcttattatttttgccctgaccgcgttagtcgcaaaatgggtaggttatgtcagacaaggactccgctaatgctctgcgtgaaaaatgtttcgctacgtttaccagaaagttgcttgctgacaaacgttaactttacggtggataaaggtgacattgtcacgttaatggggccgtctggctgtggaaaatccactctgttttcatggatgattggtgcactggccggacagttttcttgtacaggtgagctatggctcaatgagcaacggattgacatgctacccaccgcacagcgtcagattggcattctttttcaggatgcactgttatttgaccagttcagtgtcgggcaaaatttactgctggcgctaccggcgacacttaaggggaatgcccgacgtaatgccgtgaatgatgcacttgagcgttcaggccttgacggagctttccatcaggatcctgctactttgtctggcggtcagcgagcgcgcgttgctctgcttcgcgcccttctcgctcagccaaaagcgttgctactggatgagccattcagccgtcttgatgtggctctgcgcgataattttcgccagtgggtgttcagcgaagttcgcgaactggcgatccccgtcgttcaggtaacgcacgatctccaggatgttcctgctgatagttctgttctggatatggcgcagtggtcagaaaattacaacaaactgcgataacgcaaagtttttctcaatgcgtcagttcagaatggcgcactcaaaactacaatgtcgggattttcgatgaaacgtgtttctcaaatgaccgcgctggcaatggctttagggctggcttgcgcttcttcgtgggccgctgaactggcgaagcctcttacacttgaccagcttcaacaacaaaatggcaaagcgatagatactcgccccagcgcgttttataacggctggccacaaaccttaaatggcccttctggtcatgaacctgccgccttaaacctctctgctagctggcttgacaaaatgagcaccgaacagctcaacgcgtggatcaagcaacataacctgaaagccgatgccccggtggcgctgtacggtaatggcaaagatgtcgacgccgtcaaaacgcgactgcaaaaagcaggttttacgcatatctccattctgagtgacgcgctaagcgaaccttcccgtctacaaaaactgccgcactttgagcagctggtttatccgcaatggctgcacgacctgcaacaaggtaaagaggttacggcgaaacctgccggtgactggaaagtcattgaagcggcctggggcgctcctaagctttaccttatcagccatattcccggtgctgactacatcgataccaacgaagtggaaagcgaaccgctgtggaacaaagtttctgatgaacaactaaaagcgatgctggcaaaacacggcattcgccatgacaccacggtcattctgtacgggcgtgacgtatacgctgcagcgcgtgtggcgcagattatgctttatgccggcgtgaaagatgtgcgcctgctggatggcggctggcaaacctggtccgacgcgggtctgcccgttgagcgcggtacgccaccgaaagtgaaagcggaaccggatttcggcgtgaagatcccggcacaaccgcagttgatgctcgatatggaacaggcccgtggactgctgcatcgccaagatgcatcgctggtgagcattcgttcgtggccagaatttatcggtacgaccagcggttacagctatattaaaccaaaaggtgaaatagccggagcacgttggggacacgctggtagcgactcgacgcatatggaagatttccataatccggatggcaccatgcgtagcgccgatgatattaccgctatgtggaaagcatggaatatcaaaccagatcagcaagtttcattctactgcggcaccggctggcgcgcgtccgaaacctttatgtacgcacgagcaatgggctggaataacgtctccgtttacgacggcggctggtacgaatggagcagcgatccaaaaaatccggtagcaaccggtgaacgcggcccggacagcagcaaataacattgcaattactgacgctggagcgacttcagcgtcagatacccactccacacccgcgtaaaggtcgtcatccagcacaacgcaccgaagatccacgcaaaccacgcaaaccatgcagggaataaacatcccagcacaaacagtaagatcgtttctgtgccttcggttaatccccccagataataaaacgatttatgcgcataaccgggattatcaatctgatatttcgccgccagcgcagcaaaagcgagaaaactgctacccgtgccgataaacgcaaacagcagccagccgcctgccagggcgttttgctgcggtgcggcgaggataaacccaaaaggtaccagcgcgtaaaaaagaaaatcgagagaaatatcaagaaagccgcccgcgtcngtaagccctctgcgccgcgccagcgcaccgtccagaccatcaagcagcctgttcaacaaaatgacgacaagcgccgccagataccagcccagcgccagaaaaggcagtgccagcacaccgatggcaaatcccactaatgttaaaccatctggcgtaatgcccggtttatcaagaacccgcacacactgatgcaacaacggtttaatccggggatgaagatggcggtctagcacaggcactccttaaatataaagcctttctgattgagcaacagtgcggatattatggcatttttcgcttatctgcccgtgtgtaatttatgaaaatgattgaagttgttgccgccatcattgaacgtgatggcaaaattttactcgcgcaacgccccgcccagagcgatcaggcgggattatgggagtttgccggtggtaaagtcgagccggatgaaagccagcagcaggcgctggtgcgtgagttaaacgaagaattgggcatcgaagcaactgtgggtgagtatgttgccagccatcagcgagaagtttcgggccggattatccatcttcatgcctggcacgtacccgacttccacgggacgttacaggcacatgaacatcaggcgctggtctggtgctcacctgaagaggcgctgcaatatccgctggctcctgctgacattccattattagaggcgtttatggctttacgcgccgccagaccagcggattagtgctaagggttttgtcatcccgctggcattgcagaagtattccttcggctttaattaccgccccttcagaataatttttatcctgataaacgcagcactgagtacagggctgcgctgactgcccgcctgaactgaccacttctggcggtacgtttacctccacgtccggaccataatgcgggttagccagtgcaattaatggaaatgctaatactacggcgaacaatgctcgactcacagggaactccttaacgttattgtctctgctactgataacggtagccgggtggcaaaactttagcgtctgagttatcgcatttggttatgagattactctcgttattaatttgctttcctgggtcatttttttcttgcttaccgtcacattcttgatggtatagtcgaaaactgcaaaagcacatgacataaacaacataagcacaatcgtattaatatataagggttttatatctatggatcagacatattctctggagtcattcctcaaccatgtccaaaagcgcgacccgaatcaaaccgagttcgcgcaagccgttcgtgaagtaatgaccacactctggccttttcttgaacaaaatccaaaatatcgccagatgtcattactggagcgtctggttgaaccggagcgcgtgatccagtttcgcgtggtatgggttgatgatcgcaatcaggtacaggtcaaccgtgcatggcgtgtgcagttcagctctgccatcggcccgtacaaaggcggtatgcgcttccatccgtcagttaacctttccattcttaaattcctcggcttcgaacaaaccttcaaaaatgccctgactactctgccgatgggcggtggtaaaggcggcagcgatttcgacccgaaagggaaaagcgaaggcgaagtgatgcgtttctgccaggcgctgatgactgaactgtatcgccacctgggcgcggataccgacgttccggcaggtgatatcggggttggtggtcgtgaagtcggctttatggcggggatgatgaaaaagctctccaacaataccgcctgcgtcttcaccggtaagggcctttcatttggcggcagtcttattcgcccggaagctaccggctacggtctggtttatttcacagaagcaatgctaaaacgccacggtatgggttttgaaggcatgcgcgtttccgtttctggctccggcaacgtcgcccagtacgctatcgaaaaagcgatggaatttggtgctcgtgtgatcactgcgtcagactccagcggcactgtagttgatgaaagcggattcacgaaagagaaactggcacgtcttatcgaaatcaaatccagccgcgatggtcgagtggcagattacgccaaagaatttggtctggtctatctcgaaggccaacagccgtggtctgtaccggttgatatcgccctgccttgcgctacccagaacgaactggatgttgacgccgcgcatcagcttatcgctaatggcgttaaagccgtcgccgaaggggcaaatatgccgaccaccatcgaagcgactgaactgttccagcaggcaggcgtactatttgcaccgggtaaagcggctaatgctggtggcgtcgctacatcgggcctggaaatggcacaaaacgctgcgcgcctgggctggaaagccgagaaagttgacgcacgtttgcatcacatcatgctggatatccaccatgcctgtgttgagcatggtggtgaaggtgagcaaaccaactacgtgcagggcgcgaacattgccggttttgtgaaggttgccgatgcgatgctggcgcagggtgtgatttaagttgtaaatgcctgatggcgntacgcttatcaggcctacaaatgggcacaattcattgcagttacgctctaatgtaggccgggcaagcgcagcgcccccggcaaaatttcaggcgtttatgagtatttaacggatgatgctccccagggaacatttcttatgggccaacggcatttcttactgtagtgctcccaaaactgcttgtcgtaacgataacaagcttcaagttcagcatccgttaactttctgcgatagcagcagatatgccagtaaagaaatcccattagactatttttttgataatcttcttcgctttcgaacaactcgtgcgcctttcgagaagcaagcattatataatgccaggccagttcttcttcaattgtcccgttttgaaaagctgtgcttgatatcgagatcatccatgataattccgccgcccatattagcttcgccgaggatttaccggagctatgattagcgcaatcagagatatagtctgagggaaaaacagcaaatttattcaacaaggcgataacctgctctggggcttcctccatgtttgctttaaaggtattggctccatggtcgccagaaagaaaatgctccattaaggcacaataactttcgctatcttcgataccccattgttcctctaaagactcgcgtcttttacttatgatatcgatcgagtcaaaaggaagcacatgatattggaaggtatctttgccaggttcaggctttcgcggccagaactccagcgtttcagaccattgcttatgatagaatcgataaggtgcgatcaattgtagcgcctgtaatttctcgatactgagcggctcaatacctttagcctgataataatgcagctgttctttttttgctttaaaaccggcccgaacaataagccccatcataattaatagataaagaaaagagcatcccgcggtaatcaggcctctttcattcaaaccgttggatgttatcgctgcgaatacaaacattacagcgacaacacatgttnaataaaacccccacttacaaagcagcatggtcttattttctttaatcatccgttcaaaattactattaaatatttcccagccattaaaagaatacttctcgctcccaggatggttttgtaataaaacttttttcatcacattccctgttattacatactttagaggcgataattttatccatgcaaaaaaaatatccaacgaattttcttgatccgctggatatttcagaatatgactcgaatagcacgaaagattcgctcgcttacgctatcgccccgcttccggcttcatctgctggcggactttttttcgcactacgtttacgcggtgcagcctttttcttatcagcactgccaccactgcccggagccacaatgccgcgaaactgccgcaccggagtacgtttggcttgatcaataagctgatatagcgtccccaccagcggctgcataaagtcctgatagcgacactgcttttcgctgatttgcgtcagcaccgattcccagtgcgcggtcatgtccggtcgcgtagccatttctggcagcgaatggaataacgcttttccggcgtcggtggagtggatatagcgcccttttttggtgaggaaaccacgcttgaacaacagttcaataatcccggcacgcgttgcttctgtccccagaccatcggtcgcacgaaggatctttttcagatctttgtcctgcacaaagcgcgcgatcccggtcatcgccgaaagcagtgttgcatcggtaaaatggcgcggcggctgggtttgccgctctaccacttcacctttttcacacagcaactcatcgcctttcgccaccacaggcaatggcgtaccgtcgttttcttcatcgcgctctttgctgcctaacagcgtgcgccagcctgcttcagcaagaaaacgcgctttagcgacaaanttgcctttggcaatgtccagttcgataacacacttgcggaacaccgcatccgggcagaactgcatcagatactgacgggaaatcaggttatagaccttcgcttcgttctccgtcaggttgatcgcagaactccgtgcggtcggaatgatggcgtggtgcgcatcgacctttttgtcatcccaacagcggttgcgtatatctggatctaccactggctgcggcaacagatctggtgcatgaacgctgatggcattcatcaccgcgtggcgtccggcaaaatgttcttctggcaaatagcgacaatcggaacgcggataagtgattagcttgtgcgtttcgtacagcttctggcagatatcaagcacgttctgcgcgctcagaccaaagcgttttgccgcttcaatctgcaacgccgaaagcgaaaacggcagcggcgcggattctgattcccgtttatcgttatagctggtgacaatagccggttgaccactaatgcggttaaccacatgctccgccagtggacgatgtaacaagcgcccttcttcatcctggtacggttcacacgcttcgctcggttgccagatagcggtaaaccgctcatcggcaggtgtcacgatatgtgctttgacttcaaagaagtctttcgccacgaagttttcaatctcttcatcgcggcgcaccaccagcccaagcacgggcgtctgcacgcgtcccacggaaagcacgccctgataaccggcattgcgaccgagaatggtatacgcacgggtcatattgatgccgtacagccagtcggcacgcgctcgcgccagcgcagaaacgcacagcggtacaaactcactgttggaacgaagacggtcgatcgcccgctcaaccgcctgcgggttcaggtcgtttatcaagcaacgctgcacctgctggcgcttttccggtgccagttgtagatagtccagcacttcatccaccagcagttgcccttcgcgatccgggtccccggcgtgaacgatttcgctggcttcatgcaggtaccgtttgatgacgttaagttgtttggtcacggagggtcggggctgtaattgccacttttccgggacaatcggcaaatccgcaagattccagcgcgcatagcggctgtcgtaggcgtctggctgcgcctgctcaagcaggtgaccgatacaccaggtcaccacctgaccattaccgcactcgataaagccatcgcctttccggtgcggtttgggcaggacatcagcaatggcgcgcgccagactcggtttttcggcaataaacaaccgcattgaattaacggatctcaaccatggcacgaccgccgcgtgctggcaccagttcgccaatcgccgtcagttcaatgccaaactcggcggctgtagctttgacctcattttcggcttccggcatgaccgccagcagcaaaccgccagaagtttgcggatcgcacagcaaatcgcgcacttcacgcggcatttcacccatcagatgaccgtagctggcaaagttacgttcggtgccgccaggcactgcacccaacttaatgtactcttcaacccccggcaatttcgggatcgcgtcatagtcaacgcgcgcctgcacacctgcgccctgacacatttcgctcaaatggcccagcaggccaaagcccgttacgtcggtcatcgcttttacgccttcaatgttggcaaaggacgcgcctgcgatgttcatccggcacatcacttccgtcgccagtccctgatgttctggtttcagcagtgattttttctcagccgtggtaagaacgccgatccccagcggtttcgtcaggaacagtttacatccggcttgtgcggtactgtttttcttcacccgctcggtcggtacgatccccgttaccgccagaccaaaaatcggctccggcgcatcgatggagtgaccgccagccagcgcaatacccgcctgacggcatgcatagcgtccaccttcggttacttcgcgggcaatttccggggaaagtttgttaatcggccagccgaggatcgcaattgccataatcggtttgccccccatcgcgaagatatcgctgatggcgttagtcgccgcaatgcggccaaaatcgaaaggattatcaacgatcggcataaagaagtcggtggtactgataacgctggtgccattgcccagatcgtacaccgccgcatcgtcgcgggtttcattacccacaagcaaattcggatcaacaaacttcgcctgctcactgtgcaggatggtttccaacacttttggggaaattttacagccgcaaccagctccgtggctgtattgggtcaaacgaatcgagttctcgctcatggacatctcctgtcaatgcaatccgggtatggtaaccctcattccgtgaagtgataagtgagagtgtctgaattcctgcgcctttgctcacaatccagacagtttcgcgacaattatcagaaataagtgacaaacggcgtcgggtccgggacgtttatcgacgtagatgctttcagctgcggcgtgccgaggtagagaaaaccgacaattttatcctgctcacggcaaccgaatgcttcacgcactaccggactttcagttaatgcgccactgcgccagatgccgccaaacccctgggcaacggctgccatttgcatcgccatgaccgcgcatccggcagacatttcctgttcccatcgcgggactttatgattttcttcgcatttcgccaccaccgtgatgatgagcggtgcgcggaacggcgcattacgggctttgtcgatagctttgtcatcactaccggcagcaatcgccccctgttccagtacggcgctgaaacgctcgcgcccttccccttcaatcacaaaaaaatgccacggttgcatggacttatggtccggcgcgcgcatacccgcacgcaggatgttttgcagttgttcacccgttggtgcgggttcagccaggcgggaggcgctacggcgattgatcaatagttcgagtgcatccatttgattaactcctgtcgtgatatttattcacaaaattaacacgagagtggattttgttacagcacagtccgcaattcctgctgacaagtgccggttgggtcattacgataaccacatctattgcgcctgtgacaggtgtgaccttaagttgggagaatacatgcgaaccctttggcgatttattgccggattttttaaatggacgtggcgtctnctgaatttcgtccgtgaaatggtacttaacctgttctttatttttctcgtgctggttggtgtggggatctggatgcaggtcagtggtggtgattcgaaagaaacggccagtcgtggtgcactgctgctggacatttctggtgtgatcgtcgataaacccgacagttctcagcggtttagtaaattaagccgccaactacttggtgccagttccgatcgtctgcaggaaaactcactgtttgatatcgtcaataccattcgccaggcgaaggatgaccgcaatatcaccggtatcgtgatggatctgaaaaacttcgcaggcggcgaccaaccgtctatgcagtacatcggcaaagccctgaaagagtttcgtgacagcgggaaaccggtttatgccgttggcgagaactacagccaggggcaatattatctcgccagtttcgccaataaaatttggctgtcaccgcaaggcgtggtggatttgcacggttttgctaccaacggtctgtactacaaatcgttgctggataagctgaaagtttccacccatgtgttccgcgtgggtacgtataaatctgccgttgaaccgtttattcgtgatgacatgtcaccggcagcccgcgaagctgacagccgctggattggtgagctgtggcaaaactatctgaatactgttgccgctaaccggcagatccctgctcagcaggtattccctggcgcgcaagggttgcttgagggtttaaccaaaaccggtggcgataccgcgaaatatgcactggaaaacaagctggtcgatgcactggcatcgagtgcggaaatcgaaaaagcactgaccaaagagttcggctggagtaagactgataaaaattatcgcgccatcagttattacgattacgcattgaaaacgccggcagataccggtgacagcatcggtgtcgtcttcgctaatggcgcaattatggatggcgaggaaactcaggggaatgttggcggtgataccactgcggcacaaatccgcgacgctcgccttgacccgaaagtgaaagcgattgtcctgcgtgttaatagcccaggcggcagcgttaccgcgtctgaagtgattcgcgctgaactggcagcagcccgggcagcgggtaagcctgtggttgtatcgatgggcggcatggcggcatctggtggttactggatttccacgccagctaattacattgtggctaaccccagcaccctgaccggttctattggtatcttcggcgtgatcaccaccgtanaaaatagtctggattcgattggtgttcatactgatggtgtctcaacttcaccgctggcggatgtttctatcaccagggcactgccgccggaagcgcagcagatgatgcagttaagcattaagaatggctataaacgctttatcacgctggttgctgatgcgcgtcattcgacgccggagcagattgataaaatcgcccagggccacgtctggaccggtcaggacgcaaaagctaacgggctggtcgatagtctcggggatttcgatgatgcggtcgccaaagcagcagagctggcaaaagtgaaacagtggcatctggaatactacgttgatgaaccgaccttcttcgacaaagtgatggacaacatgtctggttctgtccgggcaatgttgccagatgcgttccaggccatgttacctgcaccgctggcctcggtagcntctaccgttaaaagtgaaagcgacaagctggcggcgtttaacgacccacaaaaccgttatgcgttttgcctgacctgcgccaacgtgcgttaaatcctgcaaaaatgtggccgatatgctgtcggccacactcctgaatcggactgtctttcactccctctctccactacattcccttgctcatttagcatctgatatggagtcatcagtgaacaaggccccctctttaattgccgctatcgtcctcggactggggattagcgcctgtggttattttgttggcgatggtgttaaacatttaaaaaccaacaaccgttatgtcaatgtgcgcgggctttctgaaaaagaagttcgcgcagatacggcggaattaacaattgcgattaactttaagggtaatgttcccggcgaactgttcccgaaactggaagaagcgcagaaaaaaattgttgccgaactcaatgctcaggggattaacgagaaagagataattctgggccaatggacaagcaagcgaacagattccttttatctgaaagatgatcccacaatgccacgctataacgcagacgggtcagtgacgataaaaacccataatgttgctgctgtcgaaaaagtcgtcgcgaaattaaacgaactgcaagtcgctacggatggcgctatcgctgagagcaaagtcgcctatcgctttaatggtattggcgcactgcgcgctgagatgattgctgccgccaccaaagatgcacgcaacgccgcactacaatttgcaacggactcaggtagccaggtggggtcaattagcgatgcctcacaaggcgtattccagatctttgccagtggcagtgatgaagatgatcctacggcgattaataaaacggtacgcgtagtcacgaccgtaacctatgcgttgcaggattaaccacttttctccggcgggacactaatccctccgtcctgccggacttttctcatatccacagagtatccaggtgcgctcgctgcccctcacgtatatacttttgctctttcgatatcattcatatcaatatcatgcaaaagaaatcaatttacgttgcctacacgggcgggaccatcgggatgcagcgttccgagcagggttatataccggtgtcaggtcatctacaacgccaactggcgctgatgccggaattccatcgcccggagatgccagatttcaccattcatgaatatacgccgctgatggattcttcagatatgacgccggaagactggcagcatattgctgaagatattaaagcgcactatgacgactatgatggttttgtcattctgcacggcaccgacacgatggcgtataccgcctctgcgctgtcgttcatgctcgaaaatctcggtaaaccggtcattgtgacagggtcacaaatcccgctggctgagttacgctctgacggacaaattaatctgctgaatgcgttgtacgttgcggcgaattatccgatcaacgaagtaacactcttttttaataaccgactgtatcgcggcaaccgcantaccaaagcccatgccgatggttttgatgngtttgcctctccaaaccttcctccgttactggaagcaggtatccatattngtcgtttgaatacgccacccgccccgcacggtgaaggggaattgatcgtacatccaatcaccccacaaccaattggcgtagtgacgatttatccagggatttctgctgacgtcgtgcgcaattttctgcgccaaccggtgaaagcattgattctgcgctcctatggcgtgggtaatgcgccacaaaacaaagccttcctgcaggaattacaagaagccagcgatcgcggtattgtggtggtcaacctgacacaatgtatgtccggtaaagtgaatatgggtggttatgccaccggtaacgccctcgcccatgctggcgttattggcggtgcagatatgactgtagaagccacgctaaccaaactgcattacctgcttagccaggaactggatactgaaaccattcgcaaggccatgagccaaaacctgcgcggcgaactgacgccggatgattaaggagactgcaatgccccctcgcgccctgttactggtcgatttacaaaatgatttctgtgctggtggcgcgctcgccgtgccggaaggtgacagtacggtggatgccgctaaccgcctgattgactggtgccagtcgcgcggtgaagcggttatcgccagtcaggactggcacccggcgaatcacggcagttttgccagccagcacggtgtagagccttatacgccaggccaactcgacggtttgccacaaaccttctggccagatcactgtgtgcagaacagtgaaggcgcacaattacatccgttactgaaccaaaaagcgatcgcagcggtgttccataaaggcgaaaatcctttagttgacagttacagtgccttttttgataacggccgtcggcagaaaacctctctcgatgactggttacgcgatcatgaaatcgatgaattgatcgttatgggcctggctactgactattgcgtgaagtttaccgtgctggacgcgttacagttaggttataaggtaaacgtgattaccgatggttgtcgtggcgtgaatatccagccccaggacagtgcgcacgcgtttatggagatgtcagcagctggggcaacgctatatacgctggcagactgggaagagacgcaggggtaattttacgctggcctacaattctgtactggcattgtaggccaaataaaacacgtcagtggcacatctggcaattgatgccatcaacgaaagatttaatttacctcagaaatctcttccaacgacaccttccgcgtttcgatgccaaaaatggagagaaccagcgcacagagcaataacatgacaccaagtaccataaacaccgtgatcgacccataatgtgttaataatgccgcaacgccatagggcgtgaagactgcgacgatccgtccgacggcattaacgaaacccgaaccgcgcaggcgtaaatgcgttggccaaagctccgggatataaaccgccgacgcgaagcaaacatacatgtataaaaagaagatcatcaccaggccatagattaaaatcgcccactctgtagtctgaattgaatagatatagcctaacactgcaataataataagtaaggtggagccaaataaccgacgaggaaaatgatcaataattaatgccgcaataaatattcctaccggagcgccaatcataataacagcggtcattaatattgatttatcgacatcaatgccggagttaacaaatatggtcggtatccatacggtgatggtataaagcgaaatgttcattgcaattaaaacagtaatcgcgactaatgtacgtcgtaacatttcacctttaaacaggagccagaaagtacccttgattactttaaccttgctgttgctctgatacgaagtaagcgggggtaaacgaatactcttctctctttcaatttgctgctctacttcacgaagttggcattctgcacctgcgatttgccctttccctgccagccatcgtggcgactcaataaagtatttacctgagagaaaccaggctaacagtatgccaataccacccaacagaaacattatccgccaactaaaaaaagcgataaccaccacacctatcgccgcagacagcatgggcgaccagttaccaacaaatgag

SEQ ID NO: 866 - DNA, 379 bp, Escherichia coli
  Strain O55:H7
  modified_base (36)..(36): a, c, g or t
  modified_base (376)..(377): a, c, g or t
gcggaccattttccacgcaccgtcgcggggataaantccgtaaatgaggcatagccaaccataatcagcgcccccattcctgttcccatcaggaagcgaaagaagataagccagtacatatcagggacaaaagcggcccctgttgcagcaataccgacgatgagaagatttatgcgaaacgccctgcgccgcccaaagtaatcaccgatgaacccaccggtaagagagccgatgaaataaccaaacattaatgccgaggtaaaggcggcattgaggaaattatttgaccatccattgcttaccagctttgctaagacgacattaccggagtaactcaaaaaccctgttaataacagactaaagcttataataccannta

SEQ ID NO: 867 - DNA, 110 bp, Escherichia coli
  Strain O55:H7
  modified_base (99)..(100): a, c, g or t
atgaaaccgggccaaaggcaagcggtccagtcttgcgccaatttgatcatattgttccattgggtgcctcggatttgctaaaaaaggtagcaattgcgnnaaattcactt

SEQ ID NO: 868 - DNA, 106 bp, Escherichia coli
  Strain O55:H7
  modified_base (5)..(5): a, c, g or t
  modified_base (42)..(43): a, c, g or t
  modified_base (73)..(74): a, c, g or t
ttaanaacagactaaagcttataataccaaatatacgataannaaaccgggccaaaggcaagcggtccagtcnngcgccaatttgatcatattgttccattgggtg

SEQ ID NO: 869 - DNA, 615 bp, Escherichia coli
  Strain O55:H7
  modified_base (2)..(3): a, c, g or t
anncacttgccgcatctttatcatcattttatttccaggcgcaggaacaaataatattgacaacgcgtgcttaaattaccacaccagctggatattattgtctttgcaaaatgctatccactctgcacccggtgatttatcagttattatgtaattaatatgactaaagtcggctaactggacaaaagctttgcgatcaaacttagagtgatcaaccaataacgcaacttctgtcgcctgacggatcattgtctttttgatttcagcttccgcttcattagagtccagcgcgccgctgttaatatcaagacctttacaactcattaccatgatatcgacatgatagcggctgatgatctctttagtaattcttccttgcagtgaaagtgtatttttgtttagttccccacccgttgaaacgactttaatttctgactgagccagaacatgaatcgcttccgccgagttggttagcaacgtcaggtcactacggtcctgtaacaatttgagcaattccattacggtactactggaatcggctgccatggtggttttattgtcgataaagggtagtgccttgcgtgcaataagctgcttctcttcataaaacgatga

SEQ ID NO: 870 - DNA, 4629 bp, Escherichia coli
  Strain O55:H7
  modified_base (3665)..(3665): a, c, g or t
  modified_base (4129)..(4129): a, c, g or t
  modified_base (4624)..(4625): a, c, g or t
cttataaaaatggatattctccgtcaacatcgctgtatttaaaacagcaccaccataggttctggtcaaaaagccttcatcttccagcttctcaagatcgcggcgaatggtttcttcggttacctgaaaaatcccactcaaatttgagactgtcacctttttatcgttggcaaccatttgcttaattgcctgaatcctgtcttttgccgccacgattacacccctgtatctttttacatcacattagcgcgattatcgcataaccgatgtttactttcaaaataacctgtttgaatcacagattttcatcacagttttcacagaaacagaggtgaatcgtgttgagtatttaacgccccaaggcctctgccatttccctcatcaatgttgcgtctgcatccgataagttgatattcagtgccgcgacattttcgcgtacctgttccggtgcagtagccccactaagaatggagattaaatcactctgttttaatatccacgccagtgccagagtgggaattgtgcactgataacgagcacaaagtggctgccactgttcaagcatatcaatcactttcagcatgttttcacgctggaaccagactttatttgcccgagcgccgcccggaacgtaatcacgagtgatggtgccggtcaacaatccctgctctagcggggaataaacctgaaccacaatgccattatcacgacatagcggcagcagttcgttttccattgcccggtcgaggatactgtatttcgcctgaataatatccagttcaccatattgcagatactcgcggatatggtcagcatcgacgttagcagcgcctatagcgcgaattttcccttcagcctttaactcattaagcactgcgacagtttcagcgatcggcgtataaaatggcggcaccgactgccagtgcgtcatgtagatatcgatgtaatcaaaacccagacgttgcaagctggcttctacctcttcgcggatagattccggggaaaggtttttatacaactgccgatcgccaactttgttgaataaacttccttttcgttcccagacaatgccgcatttggtttctactacaacctgttcacggggcagtttttttaacgcctgaccgacgataacttcactattgccaaagttatatcctggtgcagtatcaatcaggttaatgccgcaacgatgggcttcaagaatcgtatcaatacatatttgccgatcgagatcgccattccatgcaggaccgccgccaatggcccatgtccccaaccccattcgcgaaagcgtaatatccgttgtgcctaaaggtatctttttcatttgccttcattatccttcgtattcttccagcaattgttcgaccagctttctgttttttacgccggtggtggcaccgacgcttagaaccgagatagccgccgttgcattggcaaagcgtgcgcattcacgcagattttttccttctaacagtgccgcaataaaacctgaagcaaagttatcgcccgcgccaatggtgtcgatggcggttattcctgcgaccgccggcaccttcatcgtcatgtcaccacgcttgataaagcagccgtctttacccgttttaatcaccaccgtttttacgccgcacgcatgaaagctgtcagcaatttcatccagtgtctctttcccggtgagtaattttgcctcggcataattgacataactcaatgcttcgcaaatatcatccagcgtttcattcaaccgcggtttaatcatatcggcacagataatcatctgccgggctttagcttgcgtaaaaatttctgttagcgctttaccatccaatagtggactgttgaaaatactggccagtgataataatttcgcctgggaaaaccgcgcaaaatcaacatcgtcaatattcaatttccacagactgccgttacggtttgtgacaaacgtccgctcgccatcctccgtcaccagtccaacattaatagaggtatctatgttgacgtcctgcttcaggctttgaatatcaatattctctttgcggcaatggtcgagaataaactgccctgcggcatctttaccaatacggctcattaatgctgtacgatggcccagacgagaaataattgttgcttcatttattgcatcacccccggtggtcattgcgattctttcaagaggataagaatccacatcaaagatatttttactgaccggttgcaatggaatatcaacaatagcggcacctatacaaataacgtcgagattatccatatcattattccgctttgccatcagaaccgaacagtttaattttttccaatgcccgttcttttacagctttacgtacttcacgttctaaatgcaggaaaggctgatcctggttttctttcactgcgaccattgcggcctgacagagctccgtatggatgttgattttcgcgatacccaacgaaattgcagttttaatgtcggcatcactgatccccgatgcgccatgcaaaaccagcggaacagacactgcatcgcgtacgcgtttgacgacctcaaagttcaattgtggctctgacgtataaaccccatgctggttgccgatggcgacagccaatgagtcacagcccgtacgttcaacaaattcagccgcctggtcaggatcggtatagtgatagcccgccagcgcttcctcataaacggtttcattaccgacatgccctaattccgcctctaccggaatacccagcggatggaagaaatcaacagcctctttggttaaacgaatattttcttcgaaatcaaatgcggaagcatcacgcattaatgaattcataccatgagtccaggcgttatgaataatctccatactccgaccatgatcccaatgagttattaccggcaccgttgctttttgtgccatagataccatcatgtgagagaaatcttcaaatgaggtgttgccgacaaaacctgtgccaaaagaaataataaccggtgatttcgcttcttcggctgcgtcgataacgcccatcaacatttctgcattccatacattaaaatgggcaatagcataacgtttatttgtggcatcgttttcccaatatctgatatctgcgagcatgttctgttctcccgtattaattaatcgctaatcttaataacgcctttaataatgtcgcgtttgttgttaactgactcttcaaatgcctgttgtacatcccgataatcgtaaatatgcgtcaccatcgatttcacatcgaatcgccctgaagaaattgcttcaatcgtgaccggataacgattggcatagcggaataccgtctggatagtgacttcgcgattgattttgaggaaattgattgccgaagcgccgggtacagtaccaacaatcataattttaccgccacgcattaccagataaggtgcctgtttaacggtgaccgcagaacccgctgtttcgaaaacaatatctgcgcccatgtcttcggtaaattgctgacagcgtgcaatagtgtcttcttttgcgccgttaataaccactgtcgcaccaagctgttccgccattgccagacgtttttccagcacatcaacgacggcaatttccgttgctcccaggcatttgcacgcttgcaacgtcatcaaaccaatacaacctgctcccagaataattatnttcttacccggtttaacatctgccagcatcgcggcatgcatcccgactgcggcaggctccaccagcgtcccttccatcgtgtccatattgtcgggcagtttgtaagtaaagctctccggatgacacagatagtgcgttaatgcgccgcggtagttgggttgtgtcgccataaaatcaacgtccgggcagatgttatatttgccttccagacagtaacgacagtgaccgcaaggaacgccaggttcgatatttacccgatcccccggtttaaatttgcgcacacggcttcccacagccacaaccgtcccggcgcattcatgacccaggccaatttcttgatttgggtctttaggcggaataaacggacctgattcaaaaccatgtacatctgaaccacaaataccgacatattctactttaatcaaaacttcatcttctttaggcactggtatttctgctgaaanaattttcattgtgcccggcacctgcaatattgcttttgaatttttcattttgaatccacccgtattatttattggctactgcatcaatacttaaactttcaacggagacacctttggtttcgattccaatggtggcgatagcaattgcgacaataattgaaaccgcccccagaagaataaagactcccgtaacgccataactactgagcagcactgcaacggcataaggtgcggcaataccactgattcgccctaccgcattcgccagaccggagccacggagtttggcctctgtcggccagatctcagggacatacactgccgaggcatagcaaacgtacatatagacgaaagtaatcaggaagaaaccaatcaacgttatgagcaacatgctggtttgcagtgaatagatatatccgagcaccgcaatcaggattaatagccccacacccattgttttacgcggaattttatccatcaccagcatggcaatannaatg

SEQ ID NO: 871 - DNA, 383 bp, Escherichia coli
  Strain O55:H7
  modified_base (2)..(3): a, c, g or t
gnngcgccaaacatactcatggtatttaaaacaatcgagtcttttaaattaatcccctgggtcatgaatatgcgacgatggcaaacattgatgaatgccagcggcaatccggtaagcgatccagccgtgcaccacaatgcggttttgttatctgatccatgcgataacgttccttcaggagagtggttattcatcaaagtcgtaagtcatgatcactttgattgcggttttatcgaccatcgcatcaaacccttcgcgccattgcgacaggccgatacgatgcgtgatcatcggtttgactttgatagcgccgctggctaatagcctgatagcgttacgccatgaggtggagtcataggccatatgcccaatgatgcttttgt

SEQ ID NO: 872 - DNA, 2897 bp, Escherichia coli
  Strain O55:H7
  modified_base (159)..(160): a, c, g or t
  modified_base (1037)..(1037): a, c, g or t
  modified_base (1224)..(1227): a, c, g or t
gcggtaatgtcattaatcgagaaatcaagaggtttgaagcccattccaacgcgtaccacttccccgttcggacggagcatttcgatggcttgtttcagtgcgatattggcaccggagcattcaatcaccagtcccagattgtctttgccacaaatttgnnggcagcgcgccaccacatcttcggtagaaccatttactactgccgtcgcacccagttcttttgcaaccgggaagcggaccgccacatcttcttgcagaccaacgacgacgatatttaccgcccccataattcgcgccatttgtacggagaacagcccgagtgggccagtgccgatgacgaccacatcctgaccagggaggaatttcgattgctgcgcgatggatttgtaggcattacagatagggtcaagtacggctgcgtcctcataatcaacaccatcagggatttcccacaacgcatgacgatgaattttgagaatttcaccaggaaccagacaatatttggaaaaaccaccgccccaggtattgttatccagaccaaggtttactttttctgtacaacacagaaaatcaccttgttcacaggccggacaaacgccgcagacgtgaccgctgttatccgacacgacgcgttgccccactttccagtctttgactttttcaccaacctgcgcaatacaacctgcgaactcatggccgcggatagagttaaactcatcagaaccgctatcgacattgtagtgcttcatgtctgcgccgcagattgccgcggctttaatttcaatcactacatcttccgggccacaaatgggttgtggcacatcgatcatcttgtagccgccaaaggctttgccaaaccgagccagtgctttcattgcgtcatcctctgtgttttgttttgcttagatggtcatcatacttacccacatgatttttgaggtcaacattaaatatgtaaaacacagataataatctgcgctttacaactcagatcacaattacgcagaaaatggctggttctgttacaggttgatggnaggcggaacgcaaaaggagcaaatttgagagggattaccggccaaataggtctgagacttaagttcaggagaagtcattcaggcgtgaacgcgacggcaagagatcggactgggacttagccaggtcatggcgagataattgagatgagtcgtggggtcattgttggctatccccttcatagccgcnnnnaaaaggggatgaaccacttacttaaacatggcaataggctttgctgagataccaaaatcttcttttaactgctgtttgctcttcatgaccatctgaccatttgtgtcaattgtcatatgctgtgcttcggtattattgcgggcttgccacagcatcaccagttgcaggcagttctctttttgttcctcggtcaacgcaacgccatcaggccatttccccagttcaacggcggtcgacaaacgctggtatacctcaggcgtcatgctgttgataatgtcatcaagattcataatttttccgctcctgtggaataagttgctgaatcgttttttcaaccgttgatttcttcgccgttttcaccatcagtgaagcgtaaagaagcagagttaacacaataacgttcgcccgttggctgcggcccgtcagggaagacatgccccagatgggcatcacagttaccgcaacgaatttctatgcgctgcattccatgtgacaagtctttgatataacgaatggattcttcactcaccggttcgtagaaactgggccagccacagccggaatcatacttggtttgggaatgaaacagcggggcatcgcagatcaaacagtgatatacgccgtcacgcttgttatgcagtaaacgacccgtaaatggcggctctgtcccatgattctgcgtcacgtaaaactgcatctcggacaaattttttttcagttcttctgccgaaggtttattagccatttgctcacatctcactttaatcgtgctcacattacgtgactgattctaacaaaacattaacaccaactggcaaaattttgtcctaaacttgatctcgacgaaatggctgcacctaaatcgtgatgaaaatcacatttttatcgtaattgccctttaaaattcggggcgccgaccccatgtggtctcaagcccaaaggaagagtgaggcgagtcagtcgcgtaatgcttaggcacaggattgatttgtcgcaatgattgacacgattccgcttgacgctgcgtaaggtttttgtaattttacaggcaaccttttattcactaacaaatagctggtggaatatatgactatcaaagtaggtatcaacggttttggccgtatcggtcgcattgttttccgtgctgctcagaaacgttctgacatcgagatcgttgcaatcaacgacctgttagacgctgattacatggcatacatgctgaaatatgactccactcacggccgtttcgacggtaccgttgaagtgaaagacggtcatctgatcgttaacggtaaaaaaatccgtgttaccgctgaacgtgatccggctaacctgaaatgggacgaagttggtgttgacgttgtcgctgaagcaactggtctgttcctgactgacgaaactgctcgtaaacacatcaccgctggtgcgaagaaagtggttatgactggtccgtctaaagacaacactccgatgttcgttaaaggcgctaacttcgacaaatatgctggccaggacatcgtttccaacgcttcctgcaccaccaactgcctggctccgctggctaaagttatcaacgataacttcggcatcatcgaaggtctgatgaccaccgttcacgctactaccgctactcagaaaaccgttgatggcccgtctcacaaagactggcg

SEQ ID NO: 873 - DNA, 7900 bp, Escherichia coli
  Strain O55:H7
  modified_base (426)..(426): a, c, g or t
  modified_base (480)..(480): a, c, g or t
  modified_base (693)..(693): a, c, g or t
  modified_base (5543)..(5543): a, c, g or t
  modified_base (6143)..(6146): a, c, g or t
  modified_base (7164)..(7164): a, c, g or t
ccgcggcgcttcccagaacatcatcccgtcctctaccggtgctgctaaagctgtaggtaaagtactgccagaactgaatggcaaactgactggtatggcgttccgcgttccgaccccgaacgtatccgtagttgacctgaccgttcgtctggaaaaagctgcaacttacgagcagatcaaagctgccgttaaagctgctgctgaaggcgaaatgaaaggcgttctgggctacaccgaagatgacgtagtatctaccgatttcaacggcgaagtttgcacttccgtgttcgatgctaaagctggtatcgctctgaacgacaacttcgtgaaactggtatcctggtacgacaacgaaaccggttactccaacaaagttctggacctgatcgctcacatctctaaataagttgagatgacactgtgatntaaaaagagcgacttcggtcgctcttttttttacctgataaaatgaagttaaangactgcgtcatgattaagaaaatttttgcccttccggtcatcgaacaaatctcccctgtcctctcccgtcgtaaactggatgaactggacctcattgtagtcgatcatccccaggtaaaagcctcttttgcattacagggcgcacaccttctctcgtggaaacctgcaggtgaagaagaagttctgtggttgagcaacaacacaccgttcaanaatggcgttgctattcgcggtggcgtaccggtttgctggccgtggtttggtccggcggcacaacaaggcctgcctgcgcacggttttgcccgcaacctgccgtggacgctgaaatcacatcgtgaagatgctaatggcgtagcgctgacttttgaattgacacaaagcgaagagacgaaaaaattctggctgcacgactttactctgttagcgcatttccgcgtggataaaaactgtgaaatcgatcttgaagcacacggcgaatttgaaaccacctctgccctgcatacctactttaacgtgggtgatatcgctaaggtaagcgtcagtgggctgggcgatcgcttcattgataaagtaaatgacgcgaaagaagatgtactgaccgacggtattcagaccttccctgaccgtaccgatcgcgtgtatctgaatccgcaagattgcagcgtgattaatgatgaagcgctgaatcgtattatcgccgtaggccaccagcatcatctgaacgttgtaggctggaacccgggaccggcgctttcagttagcatgggcgacatgccggacgatggctacaagacctttgtttgtgtagaaacagcttacgcctcagaaatgcaaaaagtgaccaaagaaaaacctgcacatctggcgcaatccattcgcgttgccaaacgttaatttgcgtcaatgttgtgtgccgggtgcgatgcatccggcacgtatcaacatcacaccatatccagcgcagtttttccttttggtgccggatacgctttgtccagcatggctaattccgctgacgaaagttcgacctcaagcacagccgcattctgttggacatgggcaatcgtggccgcttttggaatcgccatcacaccctgatggctgattacccacgccaacaatacttgcgccgcgctgatattgtgagcatgtgcaatttcgttgactaccgcgttttttaacagtccattgcgcaaccgcccggcctgggctaacggactgtaagccatcaccggcatctgctgttgctggcaccaggggagtagatcgtactcaatccctcgtgaaccgagatggtaaagcacctgattagtggcacactgatttccccccggcagctgccagagttcctgcatatcagcataatcaaggttcgaaacgccccagcggcggatttttccctgggcgatcaatttttccatcactgcaacagtctcttcaaaagcgaaactgccagaccagtgtaataagtagagatcgagataatcagtattgagacggcgtaaactggcttcgcatgcatttatcgctttttgcccgccagcattccacggatagactttagagacgagaaagaccttctctcgcagaccggttaatgcttccccaaccaccttttcggcaccgccatcggcatacatttcggcggtatcaatgagggttaaaccgagttcaatgcccgcgcgtagtgcagcaacttctgttttgcgctgactggcatcttcgcccatataccatgttccctgccctatggctggcagtgagacatcgccactaaattgaatcattttttgttgcattgtttcctcccaggtattgcaccaccgtaatgcaaaacagggcgtgacgccctgtttttatgcacaaaatgccctggaaagatgcattatcagaatttgtaggtgatcccggtagaaatcaggccagtccaggatttatccaccatcgggctgtcagtaacttcatcagacagacgggtgtagcgcgcggtaccgtaaacactccagtcgccgaggaagttgtagctggcgctcagctccaggtaagggctccagctgtcgttcgggttatagccacgcagaccgctgcgagcggactctttgcgcgatacgccataatagtattcgttctggttttcgctgttccactgcacaccaatacccggagtcacggtcaggccaccgttggtgtaacgatacaaccaggccatatcccagacgatgccgttgctgttatccagggtatcgccagccagggtggtacgcaggtaaccgtactgggtaaagtgagcataagacagaccagccatcatggtgctcttacggtcatccaggtgacgcatttggtgatcgccactgtctttagctttgaagtaaagcggcgaccagtaagcggtaattgaaagtttatccgttgcgtcattccacaggtagtaaccaccacctaagccacggaaccagaagttatcgccttcatagttgattaccggtactgggtaaacatcggtatcgtaatctttatatgggtgttcaacgacacctacgcctgcgcccagggaaaatttaccttcagcgtgcgctacgcctgcagacgttgcgataagcactccaagtgccagaagtttgagtttggtcacaattaatcattccttaaacaaatgtttagcgggcgacaaagtttacccgtcaatacatcgaaacccaacctttttacgttttcattttttaaagtaactgtttaattttcctgacgcggatgacaccgcgcttacagccaaatgaatttagcgttactggcgagcctggtctttacattaattatgcaaaatttatggatgagttgttgatatgccattgaaattaagaaagccgtgtaggcaagttttccatttgccatctacgcttaattttgaaggtgtatcaccgggcacgttgttctcatcgtcgataaaatggcatgagagttgctgtgttttagcaagagacgtcgttcagtttacctcttccgggagcctctactattcatatgaacggctcttaacctgtgctaaaaaacgaaaggacggcataccatgaatatattcgatcactatcgccagcgatatgaagctgccaaggacgaagagttcacactgcaggagtttcttaccacttgtcggcaagatcgcagtgcttatgccaacgcggctgagcggctattgatggctatcggtgagcctgtcatggtcgatacagcccaagaacccagactttctcgactcttttctaaccgggtcattgcacgttatccggcgtttgaagagttttacggcatggaagacgcgattgaacagattgtctcttatctgaaacacgcggctcaggggctggaagagaagaaacaaatcctgtatctgctggggcctgtgggtgggggtaaatcatcgcttgctgagcgactgaaatcattaatgcagctcgtaccgatttatgtattgagcgccaacggtgagcgtagcccggtcaacgatcatccgttctgtcttttcaatccgcaggaagatgcgcagattctggaaaaagagtatggcattcctcgccgttatctcggcaccatcatgtcgccgtgggcggcaaaacgcctgcatgaatttggtggcgatatcactaagttccgggtagtgaaggtctggccgtcaattctgcaacaaattgctatcgccaaaacggaacccggtgatgagaacaaccaggacatctccgcgctggttgggaaagtcgatattcgtaaactcgaacattacgcgcagaatgacccggacgcctacggctattccggtgcgctgtgccgcgccaaccaagggatcatggaatttgtcgagatgtttaaagcaccgataaaagtgctgcatcccttgttaaccgccactcaggaaggtaactacaacgggacggaaggtatctccgccctgccgttcaacgggattattcttgcccactcgaacgagtccgaatgggtcactttccgtaataacaaaaacaacgaagccttcctcgatcgtgtttacatcgtgaaggtgccgtattgcttgcgcatttccgaagagatcaaaatctacgagaaattgcttaatcacagtgaattgactcacgccccatgcgcccctggcactctcgaaacactgtcacgtttttccattctttcgcgcctgaaagagccagaaaactccagcatttattcaaagatgcgggtttatgatggcgaaagtctgaaagacaccgatcccaaagccaagtcgtatcaggaatatcgtgactacgccggtgtcgatgaaggtatgaacggtctgtcgacgcgttttgcgtttaagatcctctcccgcgtgttcaacttcgatcatgtagaagtggcggcaaacccggtccatctgttctacgtcctggaacagcagatcgagcgcgagcagttcccacaagagcaggcagaacgctatctggagttcctgaaaggttatctgatcccgaaatatgccgagtttattggcaaagagatccagacggcctaccttgaatcctattccgaatatgggcaaaacattttcgaccgttatgttacctacgcggatttctggattcaggatcaggagtatcgcgatccggataccgggcagctgtttgaccgcgagtctcttaacgccgagctggagaaaatcgagaaaccggcggggatcagtaatccaaaagatttccgcaacgagattgttaacttcgtactgcgcgccagagccaataacagcggacgcaatccgaactggaccagctatgaaaaactgcgcacggttatcgagaagaaaatgttctccaataccgaggagctgttgccggttatctcgtttaacgccaaaacgtcaaccgacgagcagaagaaacacgacgactttgtcgaccgtatgatggaaaaaggctacacccgtaaacaggtgcgtttactgtgcgaatggtatttgcgcgtacgtaaatcgtcttaacaaccctggcccggtacacatgctaccgggcctacaacgacagcgaaccgtgggccanagaaatggcaacacaggcgtagcatacagttggcaaatgtagtacggggggcatatgacctggtttattgaccggcgtctgaacggcaaaaacaaaagcatggtgaatcgccagcgttttttacgccgttataaagcgcaaattaaacagtcgatctccgaggccattaataagcgttcggtgactgacgtcgacagcggcgagtccgtatccattcccacggaagatattagcgaaccaatgtttcatcaggggcgtggcggtctgcgccaccgcgtgcatccgggcaatgaccatttcgttcagaacgaccgaattgaacgtccccagggtggcggcggaggttccggcagtggtcagggccaggccagccaggatggtgaaggtcaggatgaatttgtctttcagatttcgaaagatgagtatcttgatctgctctttgaaaatttggccttaccgaatctgaaacaaaaccaacaacgccagctgaccgaatataaaacgcatcgggcgggttataccgctaacggcgttccggccaatatcagcgttgtgcgttccttgcagaactcactggcgcgacgcacagccatgacggcnnnnaagcggcgggaacttcatgcactggaagagaatttggccatcatcagcaacagtgaacctgcgcagctgctggaagaggaacgtctgcgcaaagaaattgcagaattacgtgccaaaattgaacgcgtcccttttattgacaccttcgatttacgttacaagaactacgagaagcggcccgatccctccagccaggcagtgatgttttgcctgatggacgtttccggttcaatggatcaatccactaaagatatggctaagcgtttttatattctgctgtatctgttcctcagcagaacgtataagaacgtggaagtcgtatacatccgccatcatacccaggcgaaagaagtcaatgaacatgagtttttctactcgcaggaaactggcggcaccattgtttccagcgccctgaaactgatggatgaggtagtgaaagagcgttataacccggcacagtggaatatttacgctgcacaagcatcggacggcgataactgggccgatgactctccgctttgccatgaaattctggcgaaaaaattattacccgttgttcgttattacagctatatcgaaattacccgtcgcgcgcatcagacactgtggcgagaatatgagcatctgcaatctactttcgacaactttgcgatgcagcatatccgcgaccaggatgatatttatccggtgttccgtgaactgtttcataagcaaaatgcaacagctaaagactaaaactatcagccgggtcattatcgcctggctgatttttagctcactgtaaattatctcatttattacatacattagcttacaatcgctttaaatatgacagcataacctttacacaatttagttccagaaaacaatcattcggaaaaattattctgtcaacacgtatttccctggggttattctttaaatattttttatcgttaacgaaaattgatcctggtcaaaactatatatctctgccatcaataaaatccagcactcacattgctctcctttttatggnttctatgggtacacaaaaattaaaagctcaaagcttttttattttcagtttattgctgacgttaattttattttgcattactaccttatataacgaaaacacaaatgtaaaactcatcccacagatgaattacctgatggttgttgtggctttgtttttccttaacgccgtcatttttcttttcatgttaatgaaatatttcactaacaaacaaattttaccaacactcattttaagccttgcatttttaagtggccttatctatttagttgaaaccattgtaattatccataaaccaattaacggcagtacactgatccagacaaagtcgaatgatgtttctattttctatattttccgccaactcagttttatttgtttaacctcgctggcgctcttttgttatggaaaagacaacatccttgacaacaataagaaaaaaactggcattctgttgctggcgctgatcccttttttagtttttccccttctggcacacaatctgagcagttataacgctgactattctttgtatgtcgtcgattactgtccggacaatcatactgcgacctggggaatcaactatacaaaaatattggtttgtctgtgggcatttttactgttctttattatcatgcgtacacgattagccagcgaactatggccgttaatagcattattatgtctggcatcgctatgctgcaacttacttctactgactctggatgagtataat

SEQ ID NO: 874 - DNA, 3003 bp, Escherichia coli
  Strain O55:H7
  modified_base (568)..(568): a, c, g or t
  modified_base (598)..(598): a, c, g or t
  modified_base (2769)..(2771): a, c, g or t
atctggtatatcagtcgcgggattgaagtctccagtaaactgtttgttgtgtcttttctgatttataacatttttcaggagctgcaactctccagcaaactggcagttcatgatgtgctgaccaatatttataatcggcgctactttttcaacagcgtagagtcattattgtcgcgacctgttgttaaggacttctgtgtcatgctggttgatattaatcagttcaaacgcatcaatgcccaatggggacatcgtgtgggtgataaagtgctggtttcaattgtcgatattatccagcaaagcatccgccccgatgatattttagcgcgactggagggtgaggtgtttggcttgctatttaccgaactcaatagtgcccaggcaaaaatcattgcggaacgtatgcgtaaaaatgtcgaactcctgaccggctttagtaacagatatgatgttcctgaacaaatgaccatcagtattggcacagttttttcaacgggtgacacgcgtaatatctcgcttgtcatgacggaagcagataaagccttacgcgaagcgaaaagcgaggggngcaacaaagtgattattcatcatatttaantgcaaaaatattcagagccatgctttttgcgtggcttttgcatacaatttattactattacccctaaatttcccctccccagcggcgcagagatgagtataattagcgcccctgtgccaggccgcaatcgaactttatctggttttctcgtttcactaaccgaaggagtgccatttatcatgaaattgcaccatagaatgctccggcattttatcgccgcaagtgtcattgtgctgacatcttccttccttatttttgaacttgtcgccagcgacagagcaatgagtgcctatctgcgctatatcgtgcagaaagcagactcctcctttctttatgataagtatcagaatcagagtattgccgcgcatgtgatgcgcgctctcgctgctgagcagtcggaagtgtcgccagaacagcggcgcgccatctgcgaggcttttgagtctgccaataatacccatggcttaaacctgactgcccataaatacccgggcttacgcggcacattacaaaccgcatccactgactgcgacacaattgtggaagctgcagcactattacccgcttttgatcaggcagtggaaggcaaccgccaccaggatgattacggttcaggtcttgggatggccgaagagaaatttcactattatctcgatctcaatgaccgctatgtctatttttatgagccggttaatgttgaatactttgcgatgaataactggtccttcctgcagtcaggaagtattggcatcgatcgcaaagatattgaaaaggtatttaccgggcgtaccgtattgtcgagcatttaccaggatcagcgtactaaacagaacgtgatgagtttgctgacgccggtgtatgttgcagggcagctaaaagggattgtgctgctggatattaacaaaaacaatctgcggaatatcttttacactcatgaccgccctctcctctggcgttttctcaatgtcacgctaaccgatacagattcggggcgcgacattatcatcaaccagagcgaagataatctgttccagtatgtcagttacgtccatgacttaccgggcggcattcgtgtctcgttatccattgatattctttactttatcacgtcttcgtggaaaagcgttctgttctggattttgacggcgttaattttgctgaatatggtgcggatgcacttccgcttataccaaaatgtgtcgcgagaaaatattagtgatgcgatgactggactgtataatcgcaaaattttaacccctgaactggagcagcggttgcagaaactggtgcaatccggttcttcggtgatgtttattgcaattgacatggacaagttaaagctaataaatgacaccctcggtcatcaggaaggggatttagcgattacgttgttagctcaggcgattaaacaatcgattcgtaaaagtgattatgccatccgactcggtggcgatgaattctgcatcattcttgtcgattcgacgccgcaaattgcagcacaactgcctgaacgtatcgaaaaacgtctgcaacatatcgcgccgcagaaagagatcggcttctcttccggtatttacgcgatgaaagaaaacgatacgttacatgatgcgtataaagcttccgatgagcgtttatatgtcaataagcagaacaaaaacagccgttcatgataaccttctgtggttgtttgcttgtaatctcaggagcgtgaaatgactgaaatggctaaaggaagcgtgacgcatcagcggttaatcgctttattatcacaagaaggtgctgatttccgcgtcgttacccatgaagcggtaggtaaatgtgaagcggtgtcagaaattcgtggcaccgctctaggccagggtgctaaggcactggtatgtaaagtcaaaggcaatggcgtaaatcaacatgttctggcgatcctcgcagccgatcaacaggccgatctgagccaactcgccagccatataggcggattacgcgcttcgttggccagcccggcggaagtcgatgaactcacaggctgtgtcttcggcgcgatcccccctttcagcttccatccaaaactcaaactggttgccgaccctctactcttcgaacgatttgatgaaatcgccttcaatgcagggatgctggataaatccgttattttgaaaaccgcggattatttnnncattgcgcaaccagaactggtcaatttccgccgcactgcgtaactagcctgtccgttcaataagcagaacggacaaaaccagcacaacagcaatggcaaaaaacgatgacgtgataatcagtgtctcgacgaacatttgatcgttcatagcatacccccgggagatagctgttttcacgttattgttagcgtgcacaaatggcagtttgatgacagttcgcctgatttttta

SEQ ID NO: 875 - DNA, 1950 bp, Escherichia coli
  Strain O55:H7
  modified_base (1402)..(1402): a, c, g or t
  modified_base (1435)..(1435): a, c, g or t
acgtaaagattttctacttccttcctgcagcaagcgtaaagtaagcaggcttattattttttggcaaggaaaccacgatgtttgatgtcactttgctgatcctgctcgggttagctgcgctgggctttatcagtcataacaccactgtcgccgtttcaattctggtgttgatcattgtccgcgtcacaccgttaagcacctttttcccgtggattgaaaaacaggggctaagtatcgggataatcattctgacgattggcgttatggcccccatcgccagcgggacgctaccgccctcaaccttgattcactcgtttctgaactggaaatcgctggtggcaattgcagtaggcgttattgtctcctggctgggtgggcgcggcgtgacgttaatgggcagccagccgcaactggttgctgggctgctggtgggcactgttttaggcgtagcgctgtttcgcggcgtaccggttggcccgcttattgccacgggtctggtttcgctgattgtggggaaacagtagttaatcccgcaatatatcggcctggcgtttgccccaggcctttcttaaacatagtaataaaggccgttgttgaatcataccccagcgtatgagcaactttctgtacagtatcgcctttcactaatccctgaagcgccataatcagctgtaactgctgtcgccactggcgaaaactcaaccccgtctcttttactatcagtcgggcaagattgcgttcactcatcgcaaaaaagccagcccattgccccaatgccccccactcgacgggctctttcgccatcatctccaccatcgcgcggattttaggatgagaagaaacgggtaggtgcagctgttgttgtggctgctgagggagttcatcaaacaggacctgaattaatctgcgggtcaccggctcagcacgctgagtcgtcgtcctgtttgccagagttaaaattaattcccggcataagggcgatattttcaatgtgtaacatgttgtcggcattgtcactgcgctgggttcgataaacagaaaacagagttcagcgttagctgtcacttgattgctatgttccaccccgcccggtatccaaaccgcatattgtggcggcaccatccacaaagcattttccaccgtacaggtaattgcaccatgtagcgccagtatcagctgtcctttgcggtgctgatgtacaggactggttaactcatccgttccggcgtgaatacaaaatgcgaccgcggcttcatggtgtcggtcgggttcatagccattgagattcaacctgtgcatcattttgtccgaatttagcgataatttgtcattttagcttgattcaacataacaataaaaacggtaaggtacagcctcgtttgtaacaatgagaagcatatgncctgttcaacttcattaagcggcaaaaacaggnttgtccttatcgctggcattctgatgattgccactacattacgcgtcaccttcaccggcgcagcaccgttactcgatacgattcgttccgcttactcgctgacgactgcgcaaaccggcttattgaccaccctgccattattggcctttgcgctaatctcacctctggctgccccggtggctcgacgttttggtatggaacgtagcctgtttgccgcgttacttttgatctgtgcaggtatcgcaattcgctctctcccttcgccttacttattatttggcggtacagcggtcattggcggtgggattgcattaggtaatgtcttactgccaggattaattaaacgcgatttccctcattccgtcgccagacttaccggcgcatattccctgacaatgggagctgcggcggctctgggatcggctatggtagtgccgctggctttgaacggttttggctggcaaggcgcgttgctcatgctgatgtgttttcctctgctggctctttttttatgg

SEQ ID NO: 876 - DNA, 5029 bp, Escherichia coli
  Strain O55:H7
  modified_base (3)..(3): a, c, g or t
  modified_base (4109)..(4109): a, c, g or t
  modified_base (4166)..(4166): a, c, g or t
  modified_base (4169)..(4169): a, c, g or t
  modified_base (4419)..(4419): a, c, g or t
  modified_base (4453)..(4453): a, c, g or t
aanccaacaacatgcaaatttgagtacttcacgcgccttacatactcggggtatctggcgttcgccgcttgcctggcaggtaacattgtttcttgggatcaactcactggtctattacgtgattattggctggcttccggcgatcctcatcagtcacggctatagcgaagcacaggcgggttcactgcatggtttgctgcaactagccacagcagctcccggtttgctgatcccacttttcttacatcatgtgaaagaccagcgtggtattgcagcgttcgttgccttgatgtgcgcagtgggcgcggttgggctctgcttcatgccagcgcacgcgatcacctggactctgcttttcggttttggttccggcgcaacaatgatactggggttgacgttcattggtctgcgggctagttctgcgcatcaggcggcggcactctcggggatggcacaatccgtcgggtatttgttggcagcctgtgggccgccgctgatgggtaaaatacacgatgctaacggtgactggtccgtaccactaatgggtgttgcaatactttcactactgatggcgattttcggactttgtgccgggagagacaaagaaattcgctaatatccggtactatagtgacgtgacaaatcatgcgtgaaagggagaacaaacacgatgaatattcagtgcaaacgcgtttatgatccggcagaacagagcgatggttatcgcgtactggtcgaccgcctctggccacgcggtatcaaaaaaaccgatttagcccttgatgagtgggataaagaaatcacgccgtcaacggaactgcgcaaagcctttcacggcgaagtcgtcgattttgcaacctttcgcgagcaatatcttgcagaactggcacaacacgagcaagaaggaaagcggctggcggacatcgccaaaaaacagccgctgaccctgctctactcagcaaaaaacaccacgcagaaccatgcgctggtgctggccgactggctacgtagcttgtgattttagtacagcatccggcggttatttttcaccagccggatggtccagtcgccacaatgcccattcatcaatcgtttcaccgcccggtaatttgcaattgttgctgaccccttgcgctgtctgcactggaatgagcgtcccgcccttctgctggcaatagaccgacgccggatttgccataccaatctgcggcggtttaggtgcttctggctgagaaggggttgaacaaccagccaggaccagcaagcaaggcagaacaaaactgataattttcatttattgatctcacatatgtatccaagcttagagtatcgcggtatcgttttgttttgcagcactatttttattacattcactcaaaacatattacgtcttgtttcatctttgttgatgatgttttatcatgcctgcaaagattaaataatcagcatttacccgccgtatcctggagttgtttcgtgtcagatcagattatcgcccgcatctcgcaatcccttgccaaagaacagtcactggaaagtctggtccgacagcttctggagatgctggaaatggtcactgatatggaatcaacctacctgaccaaagtggatgtcgaagcgcgcctgcagcatattatgtttgcccgtaacagccagaaaatgcacatcccggagaattttaccgtctcgtgggattactcgttatgcaaacgcgccattgatgaaaactgctttttcagcgatgaagtccctgaccgttggggcgactgtattgcggcacgcaatcttggcatcaccacatttctgagcacgccaattcacttaccggatggatcattctatggcacgctttgcgccgccagcagtgagaagcgccagtggagtgaacgcgcggaacaggttttacagttattcgccggactgattgcacaatatattcaaaaagaggcactggttgaacagctgcgcgaagccaatgctgcgctgattgcgcaatcgtataccgactcgttaaccgggctaccgaatcggcgggcgatttttgaaaatctgacgacgctgttttccctcgcccggcatcttaaccaaaagataatgatcgcgtttatcgatctggataacttcaaattaatcaatgatcgttttggtcataatagtggcgatctgtttctcattcaggttggcgagcgccttaatacgctccagcaaaatggcgaagttattggtcgtctcggcggtgatgagtttttggttgtttcactaaacaacgagaatgcggatatttcgtcgctgcgagaacgcattcagcagcaaatacgcggagaatatcacttaggtgatgttgatttgtattatcctggtgccagtcttggcatagtagaagtcgatcctgaaacgaccgatgcagacagtgccctacatgctgccgatatcgcgatgtatcaggagaaaaaacacaaacagaaaacaccttttgtcgcgcattcagcgccacattcctgaggcgtattcacatccttttgattggtgataacatgcgaatcggtattatttttccggttgtaatcttcattacagcggtcgtatttttagcatggttttttattggcggctatgctgccccgggagcataaagatgaaaaaaacaacgatcattatgatgggtgtggcgattattgtcgtactcggcactgagctgggatggtggtaacgtcacatctaaaaaatagcaaaggctgcctgtgtgcagcctttgtgcaatttacgcgttaacttttaatcttcctgtagataaatagcacgacaatcgcaccaataacggcaaccacgaagctgccaaaattgaagccatcgactttaccaaagccaaacagcgtgctgatccaaccgccgactacggcaccgactatccccagcaggatagtcataaagaatccaccaccatctttacctggcatgatccacttcgccagaataccggcaataagcccaaaaataatccatgacagaatgcccattgtttcctcacttatctgttttgcattagcgggttagtcgctgataaaaagcatagcacaacatcgggagggcaagatttgtgacgagcatcacggaggtttttttgcgatggcgcagaaattgcgccatcaacgatcagtgataattaccaaccacaaacatcatgttcgttttccgtgtcataagaacgcacggtattcaccagatcttttatcacttcagccgccacttctggcaccagcaaagtcatcggcgtctctgtttcataatcgacagaaacgccattgctgttattggtgacggtcacggtatacgttgctttgcccatgattcatttcccgttatgaatgactttccgttgttgcgcaccttccatcaggacttcaggagccacgaagaagtcaatgttgaaataagtatcgtcagtcatggcttcaatgttgtgccacttttctggagggaacaccgcaaactgccccgcttcgataaggatcacctgatcaggctctgcactgtgttcatcagcgtagccgagatatttgaccgccccatgcataacggaaaggcgtgggtaaacccccgggcgcgttcctttatcaagatgacgttcgaatattccggcaggcgcagtttgtttattccagaaaggcgttgagcgcgtatgaatataattctgtgggatttgcagcatccttttccctccttcggtgaatgcgctgaaaacggtttattccagccgtttcagggtacgcctgataatttgcattttaaataccatttattggttactttttagcaccatatcagagaaaaatcagggaggattatagatgggaagcccgcgacaacgcgggctgaaagcatcaggattgcagcgtcgccagtcgggcagcgaaacccacgaacatcaaaccaatcagtgagttgcccactttagccagtttctttttggtacgtatgtactgcgtgacaaaagcaccagatataatcaggaagctcaaatagcagaaactcaccagttccagcgtcgtcgccagaataaagaatgaaattcccgtatgtggggcattaacatcgataaactgtacganaaacgacacatagaacaaaatggctttcggattagtcaggctcaaaattaacgcgcnttnaaaaatagcaccgtattggggctcatcggatttggcctcgttatttttacccttcagggtcgcgtaaagaattttactccccagatagagcaaataaaacgcaccaagataacgtacaatgttgaataatatcggggtggtcttaattaatgtcgccactccagcccatgccagaaacatcaataccgcatcgccaataaatacaccgcaggccgcaagataaccgcctttcataccgctactgacgctntttttgagtacaaacagggtatttggccctggcnccaacacaataaaaatggccccaaccagataggtccagtaattcagaaccccgtattcagcgaacacattaacctctttaattatctttcgatcatgcgcgattaaaggtgaatatgctaaccaatctgtagcggcttagaaaggagaaaatcaggttttaacctgatatcaacccgataattgaatcattaatcaggcatgctccagtgaaaaattcgggtagtgctcggcaaaatactggcgtaaaaattctaccgttatccgcactttcgctgacgtcgccagccttgaaacataaacggcccagacgttcgctggctggtaatattccggtagcacttgcactaaatgaccactggcaatgttttcgctaacatcccaccaggaacgcagagcaatcccctgcccatcgagacaccactgatggacaatttctccatgattagacgacagtgggccggtgactttaatcgcatggtggccttctttattgcgtaattgccagacaccaaaaggatgatcgcgctctttaatgaccaggcacggcaatgcagaaagatcggttaaatgtttcg

SEQ ID NO: 877 - DNA, 5773 bp, Escherichia coli
  Strain O55:H7
  modified_base (1767)..(1767): a, c, g or t
  modified_base (2043)..(2043): a, c, g or t
  modified_base (2856)..(2856): a, c, g or t
ccatgttgcgcaataaattccggcgacgcgcagagaatgcggtaattggtcgccagtttgcgggcgattaaattaggggcgatgtcatcgccaatgcgaatatcgagatcgacaccttcattgaccaaatcgaccagccggtcttccacatcaaaacgtaattccagttgcggatacgccttcgccagcgctgataacgccggagccaccacctgtcgtccaaaaccaaagctgctgataatacgcagcatcccctgtggcacctgacgcacgtcagaaagttcgtccatcatctgaccgacatcctgcaaaatccgctgcgcccattcataaatccgctctccttcttcggtaatggtgacgcggcgggtggtgcggtgtaacaacaccacgtttagcgtttgctccagcaaggcgatgcgcttgctgacgaacgccggtgaaacgcccagttcttccgccacggcggcaaaaccagcccggcgagccaccagcataaagacgcgcaaatcattcagcagcggtaaattattcatgattcgtgttttatgtttcaccagttacggggattaattccttttcagtcaattataggatggtgatgttgtcaattttgatggtcaggaagtgagaacccaatgatgaaaacgatgcgtattgctgcgatcccgggagacgggattggcaaagaagtccttcctgaagggattcgcgtgttacaggctgccgctgagcgctggggcttcgccttgagttttgagcaaatggagtgggcgagctgcgagtattacagccatcacggtaaaatgatgccggacgactggcatgagcaacttagccgtttcgacgccatctattttggtgccgtcggctggccggacaccgttccggaccatatttcgttgtggggttcgctgctgaaatttcgtcgtgaattcgaccagtacgtcaacctgcgcccggttcgtctctttcctggcgttccctgcccgctggcgggaaaacagcctggcgacatcgatttttacgtggtcagggaaaacaccgaaggcgaatattcctcgctcggcggtagagtgaatgaaggtacagagcatgaagtcgtcattcaggaatcggtatttacgcgtcgtggtgtcgatcgcattttgcgttatgccttcgaacttgcgcaaagccgcccacgtaagacgctaacttctgccactaaatcaaacggtttagccatcagcatgccgtactgggatgagcgagtggaagcaatggccgagaattacccggagatccgctgggacaagcagcatattgatattctctgcgcgcgttttgtgatgcagccggaacgcttcgatgtggtggtggcgtccaatttgtttggcgatatcctttccgatcttggcccggcctgcaccggcaccattggcattgccccatccgccaacctgaatccggaacgcactttcccctcgctcttcgagcctgtccacggttccgcgccggatatctacgggaaaaatattgctaaccctatcgccacaatttgggccggggcaatgatgctcgattttctcggcaatggcgatgagcgtttccagcaagcgcataacggtattctggcagcgattgaagaagtgattgctcacgggccgaaaacaccggatatgaaaggcagtgccaccacgccacaggttgccgacgcgatttgcaaaattattttgcgttaaggtcaaaccagtttatttgaaccgcgtcactgacgcggttttnttattcgttctttgcagttaataacctgcgtcatttcaccttttattgtttccgtttcgtgttttatggctttccgtattcttaattgtttaatttatgtaacatgcaaataatcaattcgttaaacacgacatacaactcattaccctgcaaataattacaactggcaaaagccagagacgggcttttatgcccaggagatgactcatgatgagcaatgttaagaaaaaagatgtgccgctgataagcatcagcctggtggccattcttttcatngcagctgcattaagccttttcccacaacaatcggccgacgcggccaacgcaatatacacttttgttacgcgtacgttaggttccgcagtacaggtattggttttgctggcaatgggactagtgatttatttagccaccagtaaatacggcaatattcgtcttggcgaaggaaaaccggaatacagcacgctctcctggctgtttatgtttatttgtgccggtttaggttcttctacgctttattggggggttgctgaatgggcctattattatcaaacgcctggattaaatatcgcaccgcgttcacaacaggcactcgaatttagcgtcccttactccttcttccactggggcatcagcgcctgggcaacttatacgctggcctcattaatcatggcttatcactttcatgtgcggaaaaacaaaggtctgagtctttccggcattattgccgcgattaccggcgttcgcccgcaaggcccatggggaaaactggttgatttgatgttcctgatcgccactgtcggcgcactgactatttcccttgttgtcaccgcagcaacctttactcgtggactttccgcactgaccggtttacccgataacttcaccgtgcaggcatttgtgatcctgctttccggcggcattttttgcctaagctcatggattggtatcaacaacggtttgcaacgtctgagcaaaatggttggctggggcgcgttcctgctgccattactggtgctgattgtcggtccaaccgaatttattaccaacagcatcatcaatgccatcggcctgaccacgcaaaacttnctgcaaatgagcttattcaccgatccgcttggcgatggttcatttacccgcaactggaccgttttctactggctgtggtggatctcatacacccctggcgtagcaatgtttgtcacccgcgtttcccgcggtcgtaagattaaagaagttatctggggactgatcctcggcagcaccgtcggttgctggttcttcttcggcgtaatggaaagctatgccattcatcagtttatcaatggcgtaatcaacgtcccacaggtgctggaaactctgggcggcgaaacagctgtacagcaagttctgatgtcgttgccagccggtaaattgttcctcgccgcatacctgggcgtgatgattattttccttgcctcgcatatggatgcagtggcctacaccatggcggcgaccagtacgcgtaatctccaggaaggtgacgatcctgaccgtgggctgcgtcttttctggtgcgtggtgatcactctgatcccgctttccatcttgtttaccggtgcttcgctggaaacgatgaaaaccaccgtcgtgctcacagcccttcccttcctcgtcattttactggtgaaagtcggcggatttattcgctggctgaaacaggattacgccgacattccggctcatcaagttgaacattatctcccgcagacaccagttgaagccctggaaaaaacaccagtgctccctgcgggaaccgtattcaaaggcgacaactgagcgccatcatcctaacgataaaggtatccctatgagcaatctgagccctgactttgtactacccgaaaatttttgcgctaacccgcaagaggcgtggaccattcctgcccgtttttataccgatcagaacgcctttgaacacgaaaaagagaacgtcttcgccaaaagctggatttgcgtcgctcacagcagcgaactggcgaatgccaatgattatgtgacgcgtgagatcattggcgaaagcatcgtgctggtacgcggtcgtgataaggttttgcgcgcgttctataacgtgtgtccgcaccgtggtcatcagttgttgagcggtgaaggaaaagcaaaaaatgtgattacctgcccatatcacgcatgggcattcaaactcgatggcaatctggcccatgcacgtaactgcgaaaacgtcgccaatttcgatagcgacaaagcgcaactggttccggtgcgtctggaagaatatgccggattcgtcttcatcaacatggaccccaacgccaccagcgtagaagatcagttacccggtctgggcgcgaaagtgctggaagcctgcccggaagtccacgatctgaaactggcggcccgctttaccacccgcacgcctgccaactggaagaacattgtcgataactatctcgagtgctatcactgtggtccggcgcatccaggtttctccgactccgtacaggttgatcgttactggcacaccatgcacggtaactggacgctgcaatacggtttcgccaaaccgtccgaacagtcgtttaaatttgaagagggtacggatgcggcattccacggtttctggctgtggccgtgcacgatgctgaatgtcaccccgatcaaagggatgatgacggtcatttatgaattcccggtggattctgaaactaccctgcaaaactacgatatttacttcaccaatgaagagttaaccgacgagcaaaaatcgctgattgagtggtatcgcgatgtgttccgtccggaagatttacgtctggttgaaagcgtacagaaagggctgaaatcgcgtggctatcgtggtcaggggcgcatcatggccgacagtagcggtagcggcatttccgaacatggtatcgcccatttccataatctgctggcgcaggtatttaaggactaatgacatcggcggcggtattttccgccgccgggctgatttttgatggagtacagcaatgtcagactatcaaatgtttgaagtacaggtgagtcaggtggaaccgcttaccgaacaggtgaaacgcttcacgctggtggcaaccgatggcaaaccgctgcctgcgttcaccggaggaagtcacatcatagtgcagatgagcgatggtgataaccagtacagcaatgcgtattcactactgagttcaccgcataacacctctagttatcagattgccgttcgactggaagaaaactcgcgcggcggttcccgctttttgcatcagcaggtaaaagtgggcgatcggttaacgatctcaacgcctaataacctgtttgcgctaattccctcagccagaaagcatctgtttatcgcgggcggtattggtatcacccctttcctgtcgcacatggcagagttgcaacacagcgacgtcgactggcagctacattactgctcgcgaaatccagaaagttgcgcatttcgtgatgagctagtccagcatccgcaggctgagaaagtccatttgcatcattcatcaaccggaacacgactggaattagcgcgattattggcggatatcgaacctggcacacacgtttatacctgtggccccgaggcgctaattgaagcggtaagaagtgaagctgcgcgtctggacatcgctgccgatacgctgcactttgagcaatttgctatcgaagacaaaaccggcgatgcatttaccctggtgcttgcccgttccggaaaagagtttgtggtgccggaagagatgactattttgcaggttattgaaaataataaagccgcgaaagtggaatgtttatgtcgtgaaggggtatgcggaacctgcgaaacggcaatactggaaggtgaagctgaccatcgggatcagtattttagcgatgaagagcgtgccagccagcaaagtatgttgatctgttgttcgcgtgcgaagggtaaacgcctggtgttggatttgtagtttgccgaagc

SEQ ID NO: 878 - DNA, 638 bp, Escherichia coli
  Strain O55:H7
  modified_base (2)..(4): a, c, g or t
gnnncgctgagcgcgcccagtccggcttcggaaaattttactgcggatattcctgcaataaattgtgtaatgcttccgccatcagctcaccacgccagccggaaatcagctccggcaaattgttctgcggtttcagtttccagtgccagttcagcagttggttgatttgccgacgcgatgccagcaattcggcgctgatcttgtgcgtttcgctcacgtcagtaatcagcgacttaatcgctttaaacgctttacgataacccggcatgtccatcaggttaagcatcggctgcggtaaggcctcttccggcaatgtctgcgctttttccaccagcgccagcagcgttttaccgtgaaagcggatttcgctaccggataaacccaggctgtccagttcgcctaaacttcccggcatataacgcgctaccgaccacaaatgctcttcacgcacgacaaagttcaccgccagatcgcgctctcgcgccttgcgcagtcgccagtcggctaacagttgcagacaggccagttggcgtgtgcgtaattgccaggcattggtgatatcacgccaggcatcttccggcgcaacgacttcctgacgacgcatttgcatcaggcgacattcatccagcgccgctggt

SEQ ID NO: 879 - DNA, 8166 bp, Escherichia coli
  Strain O55:H7
  modified_base (323)..(323): a, c, g or t
  modified_base (497)..(497): a, c, g or t
  modified_base (1861)..(1861): a, c, g or t
  modified_base (3555)..(3555): a, c, g or t
  modified_base (3609)..(3612): a, c, g or t
  modified_base (6341)..(6341): a, c, g or t
  modified_base (8164)..(8164): a, c, g or t
gccggaggcctccgtttctaccataagcttggcggtgatcggtaacagataccagacatccgccgctgcatattcacactgacgttcggtcagcggtctggccagccagtcggtgcgcgattcactcttgtccagcgtaacgccggaatactcttccaccatggaagcgaaaccccatgacatcgggcgtccgcagaaggcagcaaggatttgcgtgtcaatcaggggttgtggtaattcgccaaagacattgaggaacacttccagatcttcactgcctgcatggagaaattttgtgatggacggatcgcgcaggatcgctntcagcggtgaccagtcggtgatcccgagaggatcaattagcgccagatgctcgccatcgaaaagttgaatcaaccccagctgcgggtaataagtgcgcgtacgaacaaattcagtatccagggctatcgccggaaaggcacggacggcttcacacaaagaagccagcgcatcgnccgtggtaatcatttggtaattcaaattgttttctctttagtgggcgtcaaaaaaaacgccggattaaccggcgtctgacgactgacttaacgctcaggctttattgtccactttgccgcgcgcttcgtcacgtaattctcgtcgcaaaatttttccgacgttagatttcggtaactcatcacgaaactccaccagcttcggtactttgtagcccgtgagctgacggcggcaaaaggtcaccagtgactcttcggtaagcgatggatcttttttcactacgaagattttcaccgcttcaccactggagccggaaggtacgccaacagccgcgacttcctgtacgccaggatgctgcatgacgacatcttcaatctcgttgggatagacgttaaaaccggaaaccagaatcatgtcttttttacgatcgacaatgcgcaggaatccttcttcatccattaccgcgatgtcgccagtgtgtaaccagccgtttttgatgatttcatcggtagcatccggacgctgccaatagcccagcatcacctgtggacctctgacgcaaagttcacctggctgacctggcggtacttcattatcgtcgtcatccaccagtttggcttccgtcgacggcaccggcaaaccaatgctaccgctatgataatcaatatcataggggttcacgctgaccagcggcgcacattcggtcaggccataaccttccagcagatactgtccggtcagtttcacccagcgttctgccaccacttgctgaacaggcatcccaccgcctgcagaaaggtgcagactggagaaatccagttgttgaaactctttattgttcagcaacgcgttgaacaaggtgtttacgccggtgatagcggtaaacggatatttcgccagctctttgaccagccccggaatatcccgcgggttagtgataagcaggttctgcccacccagttcgataaacagcaggcagttaatggtcagtgcaaaaatgtgatacagcggcagcgccgtcaccaccagctctttgcccggatgcagcagaggcccatacgtagcgttaacttgttccaggttcgccagcatattgcggtgagtcagcatcgcgcctttcgccacacctgtggtgccgccagtgtattgcaggaaggctaaatcttctggcaccagttcaggtttgacatactgcatacggtagccgttgtgcagggcgctacgaaatgaaatggcatctggcagatgatatttcggcaccagacgtttgatgtatttaacaacgaagttaaccagtgtgcctttcgctgtggaaagctgatcgcccatacgggtcaggataacgtgctgaactgcggttttatcnaccactttttccagcgtgtgagcaaagttggacacaatgacaatcgccgatgcgccgctatcgttaagctgatgctcaagctcacgcggggtatacaacgggttaacgtttacgacgatcatcccggcacgcaaaatgccaaacagcgctaccggatattgcaataaattaggcatcatcaacgcaacgcgatcgcctttcttcagccccaacccttgttgcaaataagcggcaaacgcgcgactgcgttcttccagcttgcggaaggtcatcacctcccccatattcacaaacgcaggctgatcggcgtagcgcgcgaccgactgctcaaacatatctaccagagattgataacggtcagggttgatctccgtcggaacgtccgcgggataacggttaagccaaaccttcttcaattcttcacctctaaaatgcgtgttcgtcgtcatcgcaaccccaaatgatatacatgccgttaacataatattaactcatcataccagcttgataattacccaacgaaaaggttgcgaagcgcgtcactatttatttttatctttaccgtaagaatgcagaaacagcggaccagccgctgtttctttttctttaaaaacaagcaattattcagttacaactgtttgtactctcgcggggccgggattataccagccccatccgccgtggccatagggccagccacgaccgccataaaaccagggatcaatcggctgaggcggcataatcacctcctgggttaaatgccaacgtttgtaacctgttgcctgcatcaccataaatttatagggcgtgttgccgatttttccgtcaaccgcaccagtgattggcccgactaccgtaaccagttgtccacggaaatccaccgggtccagaaaaccgttcacatcggcataaatgcgaccgcgagaaggttctcccagcgtcggtctggctccgctgtccagcggtacggtagcaatttccaggcgggttttcccttgctggttttgtaccgcaaccactttgccaccaaagcgtgcctcctgaccaacgtacagctgcggcgcactcatcacccgaactaaatcttgttgcggcgtgggactgctgcctttaatggcgtccggcacagtgacacaaccgctcagcattagcgcaaacgtacctgccagtatgcctttgataacattcttttgaaccgccatgatgcgactcctttttttctcagggcatactcttaagattcattctttgcccggaagtttcttccatgcgacgttgttacgtaaataaaccggttcggcatgttccaccgccaccgttttaccctcggcaaacatctgacaagcaatcggcagcatatcttctgcagcgggcagtaaaacttctccgtcgcgcaaaaccagtccgctctctttaccgagatccggccaggcttgccagcctgtacctaccgtcacccattccccggaaagctgttgcattcgttcatgaacgagttcgggtttgagtacggcttcggtttcttcaccgtgccagataccgttttcatcacgctgatattcggcccagtaaacttcgcccattcgcgcgtcaatggctgacagcacgcgtgttgcgccgtttttgcgccacgccccttgcgccatcgtcattagcgtggagacgccaatcatcggtaattccgcgccaagcgncagcccttgcgcgatgccaataccaatgcgcacgcctgtaaagctaccggggcnnnncccgtaagccagagcgttaatatcagtcagggaagttccgctggtggtcaggatatcctgcaccatcggtaagattcgttgagtatgttcacgagggcaaagctcaaaatgagcgttgacagtaccgtcgttccacagggcgacagagcaggcctctgtcgcggtatcgatagccagaattcgcatgggtcttcgtgcttagatcaataaaaaggcgcgcatcataccatactccgtaacaaattacctggaggatggtatcgcaaggaaacgaaccgcacgggcaatgtcacgggtgcgtggcgcgggcggcagactggcgagaaacgtcgcgccgtaaggacgcatcaccagccgattgtcacaaattaccaaaaccccgcgatcgtcggcgtcgcgaatcagtcgcccgactccctgcttgagagtaatcaccgcatccggcagttgtacttcatcgaacgggtcgccaccgcgcaaacggcaatcttccatgcgcgcttttaacaatggatcatcaggcgaggtaaacggcaatttgtcgataatcaccaatgacaatgtatcgccacgcacgtccaccccctcccagaaactactggttgccacaagaagcgcgttaccggcactgacaaattgctgcaacagttgccctttgctggtttccccctgcaataatacgggaagcgtcatggtagcgcggaactgctcggccagatcgcgcatcatggcgtgcgaggtacaaagcataaaacagcgaccgttgttagcttcgatgatcgggcgcagcatagccgccagttgccgcgcggaacccggttgattggtttgcggcaggttgcgcggcacacagagtaacgcctggcggctgtaatcaaacgggcttggcaatagcaacgactccgcctgttctatcccaagccgcgaggtgaaatgatgcagatcgtcgttcaccgacagcgttgctgaggtgaagatccagctaccgggcttttgcgccattaactctttgaatttatccgccacgctgagcggcgtgagagccagagtaaaatggcgcgaagtgcattcgtaccagtagctgtagcccggctgattgatctcttttagccgcttcagccgtgtgcgatacaacgtggcgcgctcaaatgccgcatccagcaaggcggaacgccccagtgacagtttcgccacgtcataacaaagttccagggtgtcatcgagcagtaaaaatgcccgctgaatttgcggattagctaacagctcacgcaggttaccgcgataacctggttcaccgagttgcagacgaaaatcctgcgcactctgggcaagacgatcagcgcacttttgtaactgctgggtgtcttttaattcggtgcggtaggcgatggtgatgtcttttgccaggtcgagcagttgtcgactggagagtgactgaccaaaatactggctggcaatgtccggtagctggtgggcttcgtcgaagatcatgacgtccgcttccgggatcaactcgccaaatccactctctttaaccaccatatccgccagaaagagatgatggtttaccaccaccacatcggcgtccatcgcttttttacgtgctttgaccacaaagcaatctttatacatcgggcagtcgctgccaagacagttgtcgttggtgctggtgaccagcggccacgcctgcgaatcttccgccacgctgacgcaggtgctgatatcaccatcgactgtttgattagaccaggagcgcagcaggatcacatcgcttaatatttgtaccggaagatcgccccccgccagcgcctgctgttcgagacgttcgaggcagaggtagtttgagcgccctttcagcaacgccacgttgcccgtgtatttcaacgcctttgagaccgtcggcaaatcgcggctatagagctgatcctgcaacgcttttgagccggtcgagataatgactttctttttcgcccgcagcgcaggggccaggtaagcgtaggttttgcccgtaccggttcctgcttccaccaccagcggctggcctttttctatcgcctgggtgacggctaccgccatctgtcgctgtggttctcgcggcttaaagcctggtatcgctttcgccagctgaccgtctggtgcaaaatcgtccgtcacactaccccctgttgatttgaacagggattatgtcaggatgagggcgctttcgccagttgaagtggtgacggcgacctcacattgtggcagtctttgcagcacgaaaatggaaggataatgaggataaaatgatgactatcgttcgtatcgatgctgaagcccgctggtctgatgtagtaatccacaacaacacgctctactacactggtgtaccggaaaacctcgacgccgatgcctttgagcaaaccgccaacaccctggcgcagattgacgccgtgctggaaaaacagggcagcaataaatcgagcattctggatgccaccattttcctggccgataaaaacgacttcgcggcgatgaataaagcgtgggatgcctgggttgtcgcgggtcatgcgccggtgcgctgcacggtacaagcgggtttgatgaacccgaagtataaagttgaaattaagattgtggctgcggtgtaagctttatcgaagcaaaataagtcagacgataatttatcgataatactggtcggttatacataaatcgaccagagaataagatattactgttgatgcttntgctaattcattatttatttttataatttcaattttatctataaaactaactatataaataaacataaccatgccgttgtgttcgccctttgattagcaactctggttttctttcttagctgaacaatctggttatagcgtgcggactgaccgttaattttctccatcttactggataacacaccatgagctgctacctttaaaacacctgaatgtcaacaggttaactcgtgccatatcgttataatccctttgatattagatgcaaattaaggtcatatatagccttatcgataacatggttaattttaaggataagaatatgcctgctgtaatagataaagccctggatttcattggtgccatggatgtatcagcgccaacaccaagttcgatgaatgaaagcacggcgaagggaatctttaaatatttaaaagaactgggagtacccgcgagtgccgctgatattacggcgcgagctgaccaggaaggctggaaccctgggttcacggaaaaaatggttggatgggcaaaaaaaatggagacaggtgaacgctctgtgattaaaaatcctgagtacttttcaacatatatgcaggaagaactaaaagcactggtctgagttaaatttatatcagcataaatgggtcaggacgcttttaatcacatataaaaagcgtcctttttctcacaatcaaataatcatcagcttctataacgaaatcgatacggattagtgtgttactcgtcttcatcctcaaaacgcgccacgattcgctcgccggagtggttggcacgcagctcttctgccaccagcgcgattgcctggccgctgctcatcccttgtgccatcagttcctggatccgctcgacagctttttgctgctgttcatgggtgagtgaaggtaaacctgcaaacattgttaactcctgctaaattgttggcgctaattatttcatgctacccggcacatagccagtagagtcaggactgatgaagacgttatctcccgctgtgattactttaccctggcgtcaggacgccgctgaattttatttctcccgcttaagccacctgccgtgggcgatgcttttacactccggctatgccgatcatccgtatagccgctttgatattgtggtcgccgatccgatttgcactttaaccactttaggtaaagaaaccgttgttagtgaaagcgaaaaacgcacaacgaccactgatgacccgctacaggtgctccagcaggcgctggatcgcgcagacattcgcccaacgcataacgaagatttgccatttcagggcggcgcactggggttgtttggctacgatctgggccgccgttttgagtcactgccagaaattgcggaacaagatatcgttctgccggatatggcagtgggtatctacgattgggcgctcattgtcgaccaccagcgtcatacagtttctttgctgagtcataatgatgtcaatgcccgtcgggcctggctggaaagccagcaattctcgccgcaggaagatttcacgctcacttccgactggcaatccaatatgacccgcgagcagtacggcgaaaaatttcgccaggtacaggaatatctgcacagcggtgattgctatcaggtgaatctcgcccagcgttttcatgcgacctattctggcgatgaatggcaggcattccttcagcttaatcaggccaaccgcgcgccatttagcgcttttttacgtcttgaacagggtgcaattttaagcctttcgccagagcggtttattctttgtgataatagtgaaatccagacccgcccgattaaaggcacgnta

SEQ ID NO: 880 - DNA, 6377 bp, Escherichia coli
  Strain O55:H7
  modified_base (4)..(4): a, c, g or t
  modified_base (7)..(7): a, c, g or t
  modified_base (406)..(406): a, c, g or t
  modified_base (1767)..(1767): a, c, g or t
  modified_base (2008)..(2008): a, c, g or t
  modified_base (2913)..(2913): a, c, g or t
  modified_base (4965)..(4965): a, c, g or t
  modified_base (5023)..(5023): a, c, g or t
  modified_base (6262)..(6265): a, c, g or t
  modified_base (6298)..(6298): a, c, g or t
  modified_base (6369)..(6372): a, c, g or t
  modified_base (6375)..(6375): a, c, g or t
ccgntcntcaggaagatagcaaacaagcagaaaaactggcgaactcagcgaaagatcgtgccgaaaatctgatgattgtcgatttaatgcgtaatgatatcggtcgtgttgccgtagcaggttcggtaaaagtaccagagctgttcgtggtggaacccttccctgccgtgcatcatctggtcagcaccataacggcgcaactaccagaacagttacacgccagcgatctgctgcgcgcagcttttcctggtggctcaataaccggggctccgaaagtacgggctatggaaattatcgacgaactggaaccgcagcgacgtaatgcctggtgcggcagcattggctatttgagcttttgcggcaacatggataccagcattactatccgcacgctgactgccattancggacaaatatactgctctgcgggcggtggaattgtcgccgatagccaggaagaagcggaatatcaggaaacttttgataaagttaataagatattacgccaactggagaagtaagacgtggaataccgtagcctgacgcttgatgattttttatcgcgctttcaacttttgcgcccgcaaattaaccgggaaaccctaaatcatcgtcaggctgccgtgttaatccccatcgtccgtcgaccgcaaccggggttgttgctgactcagcgttcaattcatctgcgtaaacacgctggacaagtggcattccctggaggtgcagtcgatgacacggacgcatcagttatcgccgccgcgctgcgcgaagctgaagaagaggttgctataccgccttccgccgttgaagttatcggcgtgctgccgcccgtcgatagcgtaactggctaccaggtaaccccagtggtcggcattatcccgcccgatctgccgtatcgcgccagtgaagatgaagtttccgctgtgtttgaaatgccgctcgcccaggcattacatctgggtcgttatcaccctttagatatctaccgccgcggcgattcacatcgggtatggctatcctggtacgaacagtattttgtatggggaatgaccgcaggcataattcgtgagctggcgctgcaaattggtgtgaaaccctgactatacttatctttacatctacaaaacactacttgagacaatcatcgcaatattagttaaatcgcggtttttgattagtttaattcatgtgaatagttaagccagtcgccgcgttccctcttacactatgcgctgttattagttcgttactggaagtccagtcaccttgtcaggagtattatcgtgattagtctattcgacatgtttaaggtggggattggtccctcatcttcccataccgtagggcctatgaaggcgggtaaacagttcgtcgatgatctggtcgaaaaaggcttactggatagcgttactcgcgttgccgtggacgtttatggttcactgtcgctgacgggtaaaggccaccacaccgatatcgccattattatgggtcttgcaggtaacgaacctgccaccgtggatatcgacagtattcccggttttattcgcgacgtagaagagcgcgaacgtctgctgctggcacagggacggcatgaagtggatttcccgcgcgacaacgggatgcgttttcataacggcaacctgccgctgcatgaaaacggtatgcaaatccacgcctataacggcgatgaagtcgtctacagcaaaacttattattccatcggcggcggttttatcgtcgatgaagaacactttggtcaggatnctgccaacgaagtgagcgtgccgtatccgttcaaatctgccaccgaactgctcgcgtactgtaatgaaaccggctattcgctgtctggtctcgctatgcagaacgaactggcgctgcacagcaagaaagagatcgacgagtatttcgcgcatgtctggcaaaccatgcaggcatgtatcgatcgcgggatgaacaccgaaggtgtactgccaggcccgctgcgcgtgccacgtcgtgcgtntgccctgcgccggatgctggtttccagcgataaactgtctaacgatccgatgaatgtcattgactgggtaaacatgtttgcgctggcagttaacgaagaaaacgccgccggtggtcgtgtggtaactgcgccaaccaacggtgcctgcggtatcgttccggcagtgctggcttactatgaccactttattgaatcggtcagcccggacatctatacccgttactttatggcagcgggcgcgattggtgcattgtataaaatgaacgcctctatttccggtgcggaagttggttgccagggcgaagtgggtgttgcctgttcaatggctgctgcgggtcttgcagaactgctgggcggtagcccggaacaggtttgcgtggcggcggaaattggcatggaacacaaccttggtttaacctgcgacccggttgcagggcaggttcaggtgccgtgcattgagcgtaatgccattgcctctgtgaaggcgattaacgccgcacggatggctctgcgccgcaccagtgcaccgcgcgtctcgctggataaggtcatcgaaacgatgtacgaaaccggtaaggacatgaacgccaaataccgcgaaacctcacgcggtggtctggcaatcaaagtccagtgtgactaatacttcttactcgcccatctgcaacggatgggcgaatttatccccgctttctcgtctgctgtaatattccccactacacttccactgttgcgtcaggcgtttgtcgccatacgcttacagagtggcccgcatgcaaaaagcacaacggatcattaaaacctatcgccgtaatcgaatgattgtttgtacgatttgcgcactcgttacgctcgcttcgaccctgagcgtgcgatttatttcacagcgtaacttaaatcaacancgggtagtacaattcgccaatcacgctgtagaggaattagataaagtactgcttcccctacaggcaggtagcgaagtcttgcttccgctgattggtctgccctgctctgtcgcccatttgccattacgtaaacaggcggcaaaactccaaactgtgcgatccattggcctggtgcaagacggcacactttattgctccagcatttttggttatcgcaatgtgcccgtcgtggacattctggctgaacttcctgcaccgcaaccacttttacgcctgacgaccgaccgtgtcctgattaaaggcagtccggttttgattcaatggacgcctgcagcgagcagtagcaatgctggggtcatggagatgattaacatcgacttactgacggcaatgctgcttgagccacaactgccgcaaatcagtagcgccagcctgacggtggacaaacggcatttgctctatggtaatgggctggtagattcccttccacaacctgaagacaatgaaaactatcaggtttcttcgcaacgctttccttttaccattaacgttaatggtccgggggctacggcgctggcatggcactatcttccaacacaattaccgctggcggtactgctaagtttactggtgggctacatcgcctggctggcgaccgcttaccgaatgagcttttcccgcgaaatcaatctgggcctggcgcaacatgagttcgaattgttctgtcagcctttgcttaatgcgcgcagccagcaatgtattggtgtagagattttgctgcgctggaacaatccgcgtcagggctggatttcaccggatgtgtttattcctatcgcggaagaacatcatttaattgtgccactgacccgctatgtgatggcagaaaccattcgtcagcgccatgttttcccgatgagtagtcagtttcatgttggcattaacgtcgcacccagccattttcgccgtggtgtgctgataaaagatctcaatcagtactggtttagcgctcacccgattcagcaactgatcctcgaaatcaccgaacgcgatgccttactggatgttgattatcggattgcccgcgagctacatcgtaaaaacgtcaaactggcgattgatgacttcggcaccggcaacagttcattttcctggcttgaaacattacgtcctgacgtgctgaaaattgataagtcatttaccgcagctataggttctgacgcggttaactcgacggtgaccgatatcatcatcgcgctggggcaaagactgaatattgaactggtggcggagggcgtggaaacgcaagaacaggcgaagtatttgcgccgtcatggcgtgcatattttgcaagggtatttgtacgcacagccgatgccgctacgtgattttcccaaatggctggcgggcagccaaccgccgcccgcccggcataatggacatatcacgcccattatgccgttacgttaacgcttactcatcttcatcgtgcgccggttgctctttaacaatgcgaaccagatcaacacgataatcattggcttcaatgatggtgatatgcagtggccctacatcaatcacatcgcccacacggggaatgtgaccatttgccgagatcacgaggcccgcgaccgtcgcgatatcatcgtcatcggcaaggtgctcaacatcaagcgcctgctgcaaggcatgcaaatctgtaccgccttttaccagccagccgtcaccatcagtaatgatttccggcgtttcgtcagcgtccgggaattcacccgcaatggcttccagcacatccagcggcgtgaccaagccttgtaccacaccaaactcgttggtcacgataacaaagctcccgcgagcacgacgcagcacgcccagcaggttgatcggatcgagggtttcagggacgataatcgccggagacgccgaagcaatcgccgccacatcaacgccctcttccagcgccaccagcagttctttagcacgtacgattccgatgatttcatccagttcaccgcgacataccgggaacaggctgtgcggtgaggagagcanctgctcgcggatttcatcgaccccgagattagcgtcaacccagcttatttcaccgcgnggcgtcatgatcccgcgcagagaacgcgacgccagcgtcagtacgccgttaatcatgtaacgttcttcttcggcaaatgcaccttccgggatcggcatcggcatcgggttatcggcatcgtgctgaacattggcctgacgtttcccgcccatcaaacgcaggatggcatcggcagtacgcgctcgcagcggcaaagtcgactggtgacgaataaagttgcgacgcgcaatctggttaaacacttcgatgatgatcgagaagccaatcgcggcatacaggtaacctttcggaatgtggaaaccgaaaccttctgccaccagactcagaccaatcattaacaggaagctcagacagagcaccaccaccgtggggtgctggttaacgaatcgcgtcagcggtttggatgccagcaacataaccgccatcgcaatcactaccgccgccatcatcaccggcagatggttaaccatccctactgcagtaattaccgcatccaacgagaagacggcgtcaaggatgacaatctgtgtgacgaccacccagaaactggcgtagcctttaccgtggccggaatcatgatcgcggttttccagccgttcatgcagttcggttgttgctttgaacagcaagaatatccccccgaacaacataatcaggtcgcgtccggagaaggagaaatccatgacggtaaatagcggtttggtcagcgtgaccatccatgaaatcagcgacagcagccccagacgcataatcagcgccagtgataaccccagcaaacgcgctttatcgcgttgttttggcggcagtttgtcagcaagaatggcgatgaagaccaggttatcgatacccagcacaatttcgagaacaacaagcgtgagtagccccgcccaaattgaggggtccattaagaattccatgacaagctcctgcttaaggaatagctattcgacgccagaaataatgcaggcgtaacgacaaaatgcaaacgaaaggtgcggcatagagtgccagaaaggcaggcgttaaaaggcctgatgctgaaatgacgtcggtgacgatccatactgcgggctactgccctatactccatgattgttaaacgggagttaaacatatcagagacgcctctgatttggcaaagatttaccttcctttgcaaacgaatgtgacaaggatattttacctttcgaaatttctgctaatcgaaagttaaattacggatcttcatcacataaaatnnnnttttcgatatctaaaataaatcgcgaaacgcangggtttttggttgtagcccttatctgaatcgattcgattgtggacgacgattcaaaaatacatctggcacnnnngangt

SEQ ID NO: 881 - DNA, 14066 bp, Escherichia coli
  Strain O55:H7
  modified_base (310)..(310): a, c, g or t
  modified_base (389)..(389): a, c, g or t
  modified_base (2753)..(2753): a, c, g or t
  modified_base (4162)..(4162): a, c, g or t
  modified_base (4980)..(4980): a, c, g or t
  modified_base (5036)..(5036): a, c, g or t
  modified_base (6289)..(6289): a, c, g or t
  modified_base (7725)..(7725): a, c, g or t
  modified_base (8099)..(8099): a, c, g or t
  modified_base (8105)..(8105): a, c, g or t
  modified_base (9093)..(9093): a, c, g or t
  modified_base (9686)..(9686): a, c, g or t
  modified_base (12822)..(12823): a, c, g or t
  modified_base (12826)..(12827): a, c, g or t
  modified_base (13704)..(13704): a, c, g or t
ataaaggaggtagcaagtgaccattgctattgttataggcacacatggttgggctgcagagcagttgcttaaaacggcagaaatgctgttaggcgagcaggaaaacgtcggctggatcgatttcgttccaggtgaaaatgccgaaacgctgattgaaaagtacaacgctcagttggcaaaactcgacaccactaaaggcgtgctgtttctcgttgatacatggggaggcagcccgttcaatgctgccagccgcattgtcgtcgacaaagagcattatgaagtcattgcaggcgttaacattccaatgctngtggaaacgttaatggctcgtgatgatgacccaagctttgatgaactggttgcgctggcagtagaaacaggccgtgaangcgtgaaagcactgaaagccaaaccggttgaaaaagccgcgccagcacccgctgccgcagcacccaaagcggctccaactccggcaaaaccaatggggccaaacgactacatggttattggccttgcgcgtatcgacgaccgtctgattcacggtcaggtcgccacccgctggaccaaagaaaccaatgtctcccgtattattgttgttagtgatgaagtggctgcggatactgttcgtaagacactgctcacccaggttgcacctccgggcgtaacagcacacgtagttgatgttgccaaaatgattcgcgtctacaacaacccgaaatatgctggcgaacgtgtaatgctgttatttaccaacccaacagatgtagagcgtctcgttgaaggcggcgtgaaaatcacctctgttaacgtcggtggtatggcattccgtcagggtaaaacccaggtgaataacgcggtttcggttgatgaaaaagatatcgaggcgttcaaaaaactgaatgcacgcggtattgagctggaagtccgtaaggtttccaccgatccgaaactgaaaatgatggatctgatcagcaaaatcgataagtaacgtattgtgttgattatcagtcagttttcacactttagtcttacgtaaacaggagaagtacaatggagattaccactcttcaaattgtgctggtatttatcgtagcctgtatcgcaggtatgggatcaatcctcgatgaatttcagtttcaccgtccgctaatcgcgtgtaccctggtgggtatcgttcttggggatatgaaaaccggtattattatcggtggtacgctggaaatgatcgcgctgggctggatgaacatcggtgctgcagttgcgcctgacgccgctctggcatctatcatttctaccattctggttatcgcaggtcatcagagcattggtgcaggtattgcactggcaatccctctggccgctgcgggccaggtactgaccatcatcgttcgtactattaccgttgctttccagcacgctgcggataaggctgctgataacggcaacctgacagcgatttcctggatccacgtttcttctctgttcctgcaagcaatgcgtgtggctattccggccgtcatcgttgcgctgtctgtaggtaccagcgaagtacagaacatgctgaatgcgattccggaagtggtgaccaatggtctgaatatcgccggtggcatgatcgtggtggttggttatgcgatggttatcaacatgatgcgtgctggctacctgatgccgttcttctacctcggcttcgtaaccgcagcattcaccaactttaacctggttgctctgggtgtgattggtactgttatggcagtgctctacatccaacttagcccgaaatacaaccgcgtagccggtgcgcctgctcaggcagctggtaacaacgatctcgataatgaactggactaacaggtgagcgaaatggttgatacaactcaaactaccaccgagaaaaaactcactcaaagtgatattcgtggcgtcttcctgcgttctaacctcttccagggttcatggaacttcgaacgtatgcaggcactgggtttctgcttctctatggtaccggcaattcgtcgcctctaccctgagaacaacgaagctcgtaaacaagctattcgccgtcacctggagttctttaacacccagccgttcgtggctgcgccgattctcggcgtaaccctggcgctggaagaacagcgtgctaatggcgcagagatcgacgacggtgctatcaacggtatcaaagtcggtttgatggggccgctggctggtgtaggcgacccgatcttctggggaaccgtacgtccggtatttgcagcactgggtgccggtatcgcgatgagcggcagcctgttaggtccgctgctgttcttcatcctgtttaacctggtgcgtctggcaacccgttactacggcgtagcgtatggttactccaaaggtatcgatatcgttaaagatatgggtggtggcttcctgcaaaaactgacggaaggggcgtctatcctcggcctgtttgtcatgggggcattggttaacaagtggacacatgtcaacatcccgctggttgtctctcgcattactgaccagacgggcaaagaacacgttactactgtccagactattctggaccagttaatgccaggcctggtaccactgctgctgacctttgcttgtatgtggctactgcgcaaaaaagttaacccgctgtggatcatcgttggcttcttcgtcatcggtatcgctggttacgcttgcggcctgctgggactgtaagactgttgtacactaccggggccttttggccccgtttntttatctggaggattaatgacaatcacggacctggtactgattcttttcatcgccgcactcctggccttcgcgatctacgatcagttcatcatgccccgccgtaacggccccaccctgctggcaattcctttgctccggcgtggtcgcatcgatagcgttatcttcgtcggattgattgtcattcttatctataacaacgtcacgaatcatggtgcgttaataacgacatggttattaagcgcactggctctgatgggtttttatatattctggatccgcgttccgaagatcatctttaaacaaaaaggttttttcttcgccaatgtctggattgaatatagccgaatcaaagcgatgaacttgtcggaagatggcgtgttggtgatgcaattagaacagcgtcggctgttaatccgcgttcgaaatatcgacgatctggaaagaatttataaacttctcgtttcaactcaatgagttattaatttagccaaagctatgtttagtgtatttttaataatcagacatagcttaggctatattacctcttcccttatttgttatttattataacgtttcattgatatataaatctaaatgaaaatcgttatcaacaaagcaataaaataatatattccaacagttgttttatattctcaaaatatgttaaggttgcgccctcatttggggagtagccaatttccagattccggaaatgtacgtgtcaacatactcgttgcaaaacgtggcacgtacggactgaagactttcagtcaggcgagaccatatgcacatcaatcgctatgcctgcatgaacgcgaaaacccatcgcggcttgttgttcatgtatgcatgtttgctgggggcgatgatgtgttttatggataccccggtcaggacgttgtcatgaatatcactgctactgttcttcttgcgtttggtatgtcgatggatgcatttgctgcatcaatcggtaaaggtgccaccctccataaaccgaaattttctgaagcattgcgaaccggccttatttttggtgccgtcgaaaccctgacgccgctgatcggctggggaatgggcatgttagccagccggtttgtccttgaatggaatcactggattgcgtttgtgctgctgatattcctcggcgggcgaatgattattgagggttttcgtggcgcagatgatgaagatgaagagccgcgccgtcggcacggtttctggctactggtaaccaccgcgattgccaccagcctggatgccatggctgtgggtgttggtcttgctttccttcaggtcaacattatcgcgaccgcattggccattggttgtgcaaccttgattatgtcgacattagggatgatggttggtcgctttatcggctcaattattgggaaaaaagcggaaattntcggcgggctggtgctgatcggcatcggcgtccagatcctctggacgcacttccacggttaataagaacgctgccagaggtgaatattaaagtccgtctggcagtcgaacacttcttttgctgccagtatttgccagacttctggcttcgcacgccaggcaaacggcgtcatctgcaataatgcgacggcttcatcaccgcgaagacgcatcggataacacaactcatcactcttctgtaatgtaaaaccttccagttgttctgcatgaggtgcatgaagatgtacttcattgtaaatcagccccttcagctccatcaaatgtcgcggtcccggcgtggcagtaatgacccagccgccgggcttcactactcgtgctaattcttctgctttacacggcgcgtaaatacgtattatggcgtccatactggtatcggaaaacggcaaacggtggctggaagcgacacaaagagtgacctgcggatagcgtttcgccgccgcttttatcgctaccttcgaaacatccagaccaaacgtggtgatttcgggcaacgcatcggcaaatgcgtgtgtgtaatacccttcaccacagccaatatccagcaccgccgtggccttttcattaagccgttcccgcagttgggcgacaattgcatcacgcagcggctgataatgtccggcatctaagaatgcgcggcgtgcttgcatcatttccgcgctgtcgcccggatcacgagaccgtttatgctgaacgggcagcagattgacatacccttctttcgccatatcaaactgatgtcgttggggacagatatagctntttttttcacgcgtaagaggctgatggcaaagtggacaggaaaacgacatgacaantccggcaggatactaaaggccgcaagtgtaacgcgaatcacgcggcgggcaaatatccgaacgccaggagcgaagataaagcatagtaaaaagcctcgcattcgacgaggctttatagcgagattgaagcgtattcacacttcagatcagtggattcgatcagatagctgttacgttaacagctgccggacctttctggccgtcctgaatttcgaactcaacgttctgaccttcagccagagttttgaagccattaccctggatagcggagaagtgtacgaacacgtctttgctgccatcagcaggagtaatgaagccaaaacctttagactcgttgaaccacttaacctgacctttaatctttgccatttgaaaaattccttagattgttttcttcgcccgcaggcataacatagataaaactgacacattactgcatgaggcaccaatataaggctcggcagagaagcggtattcaacgtcaacgtgtttactcaggacttctttactgaaaatgccacacataaacagaactgtacctcgtttaacccgaaatctgttatcacatacaacgttaattatggcaagccatttttaaacatgtctcgatcagacgcacaaatctcgatacgtcttccactttttttgcacacttatgcaacggaatacgcgccgatatatcattgtgcttaaccttgtcagttccgcagatacttaaactgacgtagtttctaacatagttcaataagttcagttgttccaggtcagtgggagaagttattacatagtgcgtgcaatatcacattttctgctatgcaatgaataaaaagttatatcactttttctcataaaacaggcagttaacggctctcaatcaccccaaagagaagtcaatcccaaaggaattggaaatttaaaataagaaaaattgatgaataagcaaaaaaaatcaagagagaaacgtttcgctaataaataataccacgcttaatcacaaatccgatgtaaacatcctaataaattaatggggtaaatatctttttctgatatcccgttacgcaaataaataatatgataattatttgaagtcagaccagagttttaatttgaagcagttgcaccatgacagtgcgtataatcaggatgaattgagtaacccttcaacgacggggttactcaagattgaggaaggattatcgttcggcgaccaggcgaataatatcttcgtcttcaaccgatttttgactctcaanggtctttttatctgctttctctggttcgtttgcttcgcacaaacgacgtaacagtgcattttgacgtttttgctgatccagcaacgcctcaagcagttcaatctgttcgttagtccgagaactggcacgattaataaaaaaccacaagatgagcccgataagaagaaccaccaccgatacaaccaaagacgcaatgttcatcacgcctgaatttacaacttcgttcatttcaccacctctgagtagaggcgctattctaccactgctggagaggaagaaaatctagtgctgaaaaaatgatatcaccacgagataaactggttaatggcacaaattccgctgaaaaattgtacatcctgatcgcacatcatgttgaatacctgcgcccaaagcagcaagcaagccaacaccacgacaaccaaaacgacccatcgaaactttttcactccaatctccgtttcacctaccttatgtcattaaactaccatgcgttagttaaacagcgcctaactatgtcgatattcgtgctttttcggaatgagtcgcttgcttcagcgcatattgccgctacgattaagcgaacataaaaaagagaagaggttgtaatgcgattcatcattcgcacagttatgctgatagcactggtatggataggattattactcagcggatatggcgttttgattggaagcaaagagaatgccgcaggattaggtttgcaatgtacctatctgactgccagaggcaccagcacggtacaatacttgcacactaaaagtggttttttggggataacagattgcccgctgttacgcaaaagcaatatcgtggtcgataatggttaagtgtaataaataaccagattctcactcatgagtaaaataattcttatatcaactgcgtttaatctaacgccaccttcaactttatttttctcatgctaaataaagaacctgtctgtttgatattccgacaggttcttactctcatcagaacggatagtcgtgataacccatttgggcagaaattttgcgcgctgcggtatgcaacattgcgacatattcctgtaaacgctcttcagagaaacgcaacgtcgggaaggagatgctcaaaccggcaatgaccacgccaaagcgatcaaataccggaaccgcaatgcatcgcagcccttcttcctgctcttcgttatcttcgccatacccctgctcgcgcacctggtccagaaccggtaataacgcttctgtactggtgatggtccgctcggtactgcgtttatactccacgccctcaagaatttgcttcacttcatcgcgatcgcgccatgccagcagtaccttaccaatcgcggtgctgtacagtggattacgacgcccaatccgtgaatacatgcgcaaattgtacatagagtcaattttgtgaatgtaaacaatactgtnttcgtccagtgcgccgaggtggatagtttctttggtcaggcgggagatctcacgcatctggatatctgcgctacgaattaaatcgacgttttgtaacgcgcgagcgcccagttcaaacaatttcagggtcagggaatatttctccgactccccttcctgcgccacataacctaaggttttcatggtctgtaaaaagcgataaacggtgctttttgacatcatgacgcgctgcgacagctcggttatccctatttcgcgctcttcacccagcgcctgcaaaatgccaaaaacttttagcacggaagatacagaatcaggctgtttatccagatctgcgttagccatttatcacctcattgcgagtgttttataanaatcanaactgttttttattataatttcgcaccagggtggtcgcaatccatcttttgccggttagttacaattctgcgacatccaccgtgaatatcagtgctagaatcatacccctgttgattattcaccaaagatttaaaattcctatgccaaaagttcaggccgacggcctgccattgccccagcgatacggtgcgatattaaccattgtgattggtatttcgatggctgtccttgacggcgcaatcgccaacgtcgccctgccaacaatcgccacggaccttcatgccacgccagccagttccatctgggtagtgaacgcctatcaaatcgccattgtcatctccctgctctcgttttcgtttctgggtgatatgtttggctatcgacgtatttataaatgcggtctggtcgtttttctgttgtcttcactgttctgcgccctttctgattcgctgcaaatactcacccttgcgcgtgtcatacaaggtttcggcggtgcagcgttgatgagcgttaataccgcccttatccgcctgatctatccacaacgttttctgggtagagggatgggcataaactcgtttattgttgccgtctcttctgctgccgggccgacaattgctgcagcaatcctctccatcgcatcctggaaatggttatttttaatcaacgtaccgttgggtattatcgccctgcttctggcgatgcgttttctgccacccaatggttctcgcgccagtaaaccccgtttcgacctgcccagcgccgtgatgaacgcgttaaccttcggcctgcttatcactgcgttgagtggtttcgctcaggggcaatcgctgacgttaattgctgcggaactggttgtaatggttgtcgttggtattttctttattcgccgccagctttctcttccagtaccgctgctaccggtggatttactgcgtatcccgctgttttcactttctatttgcacatctgtttgctctttctgcncacaaatgctggcaatggtttccctgcccttttacctgcaaaccgtgctcgggcgtagtgaagtcgaaacaggtttacttctgacaccgtggccgttagcaacgatggtgatggctccgttggcaggctatttgattgaacgcgtacatgcaggattgctgggtgctttaggattattcatcatggctgcggggcttttttccctggttctgctgcccgcgtcacctgcggatatcaatattatctggccgatgatcttatgtggcgctggatttggcttgttccagtcacccaataaccacaccattattacctccgcgcctcgcgaacgtagcggtggagccagtggcatgttaggaacggctcgtctactgggtcagagtagcggcgcggcgctggtggcgctgatgctaaatcagtttggagataatggtacacacgtctcgctgatggctgcggctattctggcagtgattgctgcctgtatcagtgggttacgtatcactcagccaagatccagggcataaaaaaagcgcgtcgagcaggacgcgctttttagtatttacttcatattacttcaggtattcacccgnacgcagagcttcaatacgtttatccagcggcgggtgagtcataaacaactcactgagcgatttcgacttaccgttaatgcagaaagccatcatgctggttgcttcttgcggttcatagctggttttcaggcgctgcagcgcggcaatcattttctcgcgaccaaccagttttgccgaaccggcatcagcatggaattcacgatgacgcgagaaccacatggtgataatgctcgccagaataccaaacaccagttccagaaccgttgcaaccgcaaagtagatcagcgggttgccgttgctctcttcaccttcatcacgatttccgcccataaaacccgcggcaagctgcgccaggatacgggaaataaagataacgaaggtgttcaccacgccctgaatcagcgtcatggtgaccatatcaccattggcgatgtggctgatttcgtgagcaattaccgcctcggcttcatccgggctcatgttctgcagcaaaccggtgctgacagcaaccagagaggcatcacggcgcgcaccggttgcaaaagcgttgatgtccggcgcatggtagatagccacttgcggcatagcgatccccgcctgacgagcctgggttgctacagtattgaccagccaacgttccctttcgttacgcggttgctcgatcacttccccgccaacagatcgtaatgccatccatttggacatcagaagcgaaacgaaggaaccaccaaaaccgaacagcaaggccatgatcatcagcccctgaacgctgctcgactgtatccctgtcaggctcagtaccagcccgaaaacgaccattacggccaggttcgttagcaggaagagcgcgattcgcatcataattttctttttacctcagtttaacaaaacgcaatatgcgatacccacatcgtatgggttacgcgactattttcaagtctggatagtgcgtaagtcaccagaaagacacaactttacattttgtagcatctgatttacggcatcttgccgctgttaaaaaatcaggcacaatttcttgtgcctgattgatattacttgacgggtgcgggttgttccgcgggtctggctttttcaagcttcgccagatcgagtgcgatattcaccgtctcatccagataaggatccggctcctggtaatctttcggtagatcatccagtttcttcaactccggtttaccttcgcgtttaaagcgttcgttcaaacgcgccaaacgcgtcgcatcatcttcattattctctttctcacgcacagcgtaattcagagaaacgatattgcgcttgtccttcatagcgttgaagcgcgcgatatccttcatgatgttctggaactcaggatctttcgcgatacgcgcattatgttccttcagtagctccggttcaaaggccgttaaatcgcctgatttcacataagtcgcggcatcaatgctatcccacggcagcgcgttatcttcgaatttctcacccgtttccgtttcttcattacccgtcggcatgatgatgtctggcgttacgcctttacgttgcgtactgccgccgttaacgcgatagaatttctggatcgtgtactgcacagaacccagcgctggccattcaggacgtaacatctgatcgtaaatacggttcaatgaacggtattgctgaacggtgcctttaccaaacgtcggttcacccacaaccagtgcacgaccgtaatcctgcattgccgcggcaaagatttctgaagccgaagcactgaagcggtcaaccagtaccaccagcgggcctttatagaaaacctgtccgtcggtatcgctgtcttcacgaactttaccgttgttatcacggacctgaacaataggacccgcaggaataaacagacctgagagcgataccgcttcggtcagcgccccaccaccattgctacgcagatcgatgatcacactgctgacattctgtttttccagtttctgcagttgcactttgacatcgtctgtcaaacccacatagaagccaggaatatccagcacgccgactttctctttaccgacggtcttcaccgacattttaaccgcgcggtcttcgagacgaatacgttcacgggtcaatgttacagtgcgggtcttggtccctttaccagcaggtaaaatttccagacgaactttactgcccttcggccctttaattaaggcaaccacatcatcaagacgccagccaatcacgtcaaccatcggcttgcctgtttgaccaacaccgacaattttgtcaccaacgctgatagctttactcttcgctgccggaccacctgccaccatcgaattgataacggtgtagtcatcatccatttgcagcactgcgccaataccttccagcgacaaactcatttcagtgttgaactgttcggtattacgcggggaaagatagttggtatgcggatcgatttcacgcgcaaacgccgtcattgccagcgagaaaacatcttcgctgttggtttgcgccagacgacgaatggcaaatttgtagcggcgagtcagggtttcacgaatttctttatccgtttttcctgccagcttcaggcttaactcgtcgaatttgactttactgtcccacagcgcgttcaactcagcctcgtttttcggccagggcgctttgctgcggtcaaggttataagtgtcgttgccggtgaaatccatcggcttttccagtaccgacaaagcgtattggtaacgttcaaaacgacgcttttgcgccagattgtagagatcgtagaaaacgtcgagtttgcctgaacgcagttcatcgcctaactcggttttctttttcgcgaactgttcaacatcgcttgccagcagcacgttgtggctgtaatcgagcagattcaggtagcggtcaaagattttggccgaaaatgcctgatcgaggtcgaactggcgataatgagaacgggtgaagcgcgacgttacgcgctcactcaccgtcgcatgctgcgtctcttcctttaataccggaatttgatcagcacgcgtgatatcttctacagcgaaggtctggcctgctattgcaagcaggccagctaacgcggtaagcctaaaaaacatgttcatgcctggcccggcctccgtttcagaacaccaggtgnnctnngcgcacaatcaaagacatacccgaattcagctggacgcggacgccgtctttggtgatttctaatacggtggcatccatcgcgttttgacccgctttcaccttcagggcttgtccgacagtcagagctgaaatgtcagaaactggggtgtgctgttcttcgcgaggtgcttttgctgtttttggcgctttctctaccggcttttgcgcacgaggtttacgttcagcgccttctttgcggcgtggcgtggtcggacgtggcttgcgttcgcgacgcggtgcgtcttctttctcaccagcagctgcggcagcttcgcgttttttcgcttgctgttcagcacgctgtgcctgaacacgcgctttcgcttcttcaagctgcttgcgagcatgctctacatgttgctcgtccagctcaccgcatgggttgccgtcaagatcgacacgcgttgcgccgggtttaacaccgtaaaggtaacgccagctcgaagtgtagagacgtaaagcggatcgtaattgcgttttgctcaggttcatttccccggcaacacgatcgaccaaatcctgaaaaataccgattttcagcggacgcgcttcaccttccgcactgaaacagtggggaaaacgttcggccagaaacgcgattacttctttactgctattcaacttaggttgattttccatgaaatttcctgattacaacggacgtagccaacaagcgcaggcatgaacaggcgtcattataatgacgctatcagtaaatgctacgttatccgttgattatcctgcgacgctcgcaaagaattttttgtaatccgtcgttgcaagcactttttcaagctgtgccacaagctgacgtaagccttgctcgtcctcgtctgtnaagcgaccgaagacggtactatcgatgtcgagaacaccaataatctgatttttcaccaccagcggcagaacaatttcagaattactcgccgcatcacaggcaatatgcccgtcaaacgcatgaacatcctcgatacgctgcacttgattgcgggcaaccgcagtgccgcacacgccacgcccgacgggtatccggacacaggcaattttgccctgaaatggtccgagcaccagtgtatcgtcctcaagcaaataaaaacctgcccagtttacgtcagtgagacgctcatataacaacgcactggtgttcgcaagcgttgccagaaaactggtttctcccgccatcagcgcgttaaagtcgcg

SEQ ID NO: 882 - DNA, 9308 bp, Escherichia coli
  Strain O55:H7
  modified_base (138)..(138): a, c, g or t
  modified_base (311)..(311): a, c, g or t
  modified_base (1340)..(1340): a, c, g or t
  modified_base (2120)..(2120): a, c, g or t
  modified_base (3780)..(3780): a, c, g or t
  modified_base (4035)..(4038): a, c, g or t
  modified_base (7833)..(7833): a, c, g or t
  modified_base (8370)..(8370): a, c, g or t
aatccgcgtaaaattctgttttgttcattatataatcacttggttgtcttacctggaactgccagcctattaaaataagcattaaatgcgttaatgctcaagatcattcccatcatgggttaagattaatgttaattnttattacatttggcacgtcatggctcttaacacaccacaaattacgccgacaaaaaagataacagtgagggcaatcggcgaggaactgccgcgtggtgattaccaacgttgcccgcaatgtgacatgctgtttagcctgcccgagataaattctcatcaaagtgcctattgtncgcgctgtcaggcaaaaattcgtgacgggcgcgactggtcgctaacgcgcctggcggcaatggccttcaccatgctgttgctgatgccgtttgcctggggcgaaccgctgttgcatatctggctgttaggcattcgtattgacgccaacgttatgcaaggcatctggcaaatgaccaaacagggcgatgcgataacggggtcgatggtctttttctgcgttattggtgccccgctcattctggtgacctccatagcttatttatggtttggtaaccgactgggaatgaatctacgcccggtactgctgatgcttgagcgacttaaagagtgggtaatgctcgatatctacctggtcggcattggcgttgcttctataaaggtacaggattatgcccatatccaggcgggtgtcggcttgttctcttttgtggcgttggtgattttaacgacggtgacgttgtcacatcttaatgtcgaggagctgtgggagcgattttatccgcagcgccccgctacgcgtagggacgagaaacttcgtgtctgtcttgggtgccattttaccggctatcctgatcagcgtggtcgctgcccgcgttgtcatattccgctacgcctgcgtcgccgtcatagtctgcaaaaatgctgggcggcgctgttagcgtcaatcgttttattgttacctgccaacctgttgcctatttctatcatttatctgaacggaggacggcaggaagatacaattctttccggaattatgtcgctggcaagtagcaacattgcggttgcaggaatcgtgtttatcgccagtattctggtaccgtttactaaagtgatcgtcatgttcactttactgttgagcattcattttaaatgccagcaaggtttacgcacacgcattctgttactgcggatggtgacctggattggtcgctggtcgatgctcgacctgtttgtcatatctttaaccatgtcgctgattaatcgcgatcagatcctcgcttttactatgggaccggctgcgttttatntcggcgcagcggtaattttgactattcttgctgtggaatggctggacagccgcttactttgggatgcacatgagtcaggaaacgcccgcttcgacgactgaagcgcagattaaaaataaacgccgtatctcacctttctggctgctgccgttcatcgcgctaatgattgccggttggctgatttgggacagttatcaggaccggggtaataccgtcaccatcgactttatgtcggcggatggtattgtcccgggccgtacgcctgttcgttatcagggcgttgaagtcggaacagtgcaggatatcagcctcagcgacgatcttcgtaagattgaagtcaaggtcagcatcaagtccgatatgaaagatgcgctgcgcgaagagactcagttctggctggtgacgccaaaagcatcgttggcaggtgtctccgggctggacgccctcgtcggtggtaactatatcggcatgatgccaggtaaaggtaaagagcaggatcactttgtcgcgctcgatacccaaccgaagtatcggctggataacggcgatctgatgatccacctgcaagctcccgatctcggttcgctgaacagcggttcattggtctatttccgcaagatcccggtgggaaaagtctacgactatgccatcaatcccaataaacaaggcgtggtgattgatgtcctgatcgagcggcgttttaccgacctggtgaaaaaaggtagccgtttctggaacgtttcaggcgttgatgccaacgtcagtatcagtggcgcgaangtgaaactggaaagtctggcggcactggttaacggtgcgattgccttcgattcaccagaagagtcgaaacctgccgaggcggaagatacctttggtctgtatgaagatctggcccacagccagcgtggcgtaataataaaactggaactgccgagtggggccggattaaccgccgactcgacgccgttaatgtatcaggggctggaagtcggacagctgactaaactggatttaaatcctggtggtaaagtcaccggagaaatgaccgttgatcccagcgtcgttacgctgttacgggaaaatacccgcatcgaattacgcaacccgaaattatcccttagcgatgccaatctcagcgccctgctgaccggaaaaacctttgagttggtgcctggcgatggcgagccacgcaaagagttcgttgttgtgccaggcgaaaaagcactgctgcatgaacctgatgttctgacactgaccctgacagcaccggaaagttacggtattgatgctggtcagccgctcattcttcacggcgtgcaggtaggccaggttattgatcgtaaactcaccagcaaaggcgttacctttaccgtcgccattgagcctcagcatcgcgaactggtaaaaggcgatagcaaatttgtcgtcaacagccgtgtcgatgtgaaggtggggctggatggcgttgagtttctcggtgccagcgcctcagaatggatcaatggcgggatacgtattctgccgggcgataaaggtgagatgaaagccagctatccactgtatgccaatctggaaaaagcgctggagaacagccttagcgatttacccaccacaaccgtgagtttgagtgcagagacgctgccggatgtgcaggcaggatcggtagtgctgtaccgtaaatttgaagttggtgaagttattaccgtgcgtccgcgagctaacgcgtttgatatcgatctgcatattaagccggagtatcgcaaccttctgaccaacaatagcgtgttctgggcagaaggcggggcgaaagttcagctgaatggtagtggcctgaccgtacaggcatccccactctccagagcattaaagggagccattagcttcgataacctcagcggtgccagcgccagtcagcgtaaaggcgataagcgtattctgtatgcttccgaaacagcggcccgtgcggttggcgggcagattacgcttcacgctttcgatgccggaaaactggcggtcgggatgccaattcgctatctcggtattgatatcgggcaaatccagacgctggatctgattaccgcgcgcaatgaagtacaggcaaaggcggtgctctatccggaatatgtccagacctttgctcgcggtggtacgcgcttctcagtggtcacaccgcaaatttcggcagctggcgttgagcatcttgatactatcctccagccgtatatcaacgtcgaaccaggccgtggcaatcctcgtcgcgactttgaattacaagaggccaccattactgattcgcgttacctggatggtttaagcattattgttgaagcgccggaagccggttcgttaggcatcggtacgcctgtgctgttccgtggtctggaagtcggtacggttaccggaatgacgctggggacattgtcagatcgcgtgatgattncgatgcgcatcagtaaacgctatcaacacctggtgcgtaacaattccgtcttctggttggcatcgggttacagtctggactttggtctgacgggcggcgtagtgaaaaccggcacctttaaccagtttatccgtggcggcatcgccttcgccacgcctccgggtacgccactggcaccgaaagcccaggaaggcaagcacttcctgttgcaggaaagtgaaccgaaagagtggcgtgaatggggaactgcgcttnnnnaataatgcccactgctccggcgtgcctgcgccggagcgtttatgctaaactgcgcgcctgttttttttgccagtggtatatgctcgtggcccaacacaccgtttatttcccggacgcctttctgacgcaaatgcgcgaagcaatgccttcgacgctctcttttgatgattttcttgccgcctgtcagcgcccgttgcgccgcagcattcgcgttaatacgctgaaaacctccgttgctgatttcctgcgattaaccgctccttatggctggacgcttacgccaattccgtggtgtgaagaaggtttctggattgaacgcgacgatgaagatgcattgccattgggtagtaccgccgagcatttaagtggcctgttttatattcaggaagccagttcaatgttgcccgtcgccgccttgtttgctgacggtaatgcaccacagcgggtgatggatgtcgctgctgcgccaggctccaaaacgacgcaaattgccgcgcggatgaataacgaaggggcaatccttgccaatgagttttccgccagtcgggtaaaagtgttacatgccaatatcagccgctgtggtatcagtaatgttgcgctcacacattttgatggccgcgtgtttggtgcggcattgccagaaatgttcgatgccattttgctggacgctccctgctccggcgaaggcgtggtgcgtaaagatcccgatgcgctaaaaaattggtcaccagaaagcaatcaggaaatcgcagctacccaacgggaactgatcgacagtgcctttcatgcattacgctctggcggtacactggtttactcgacctgtaccttaaaccgggaagaaaacgaatccgtttgcctgtggcttaaagagacttaccccgacgcagtagagtttttaccacttggcgatctcttccctggtgcaaacaaagcgctgaccgaagaaggctttttgaatgttttcccacaaatttacgactgcgaaggcttcttcgttgctcgtctgcgtaaaactcaggccattcccgccttacccaccccaaaatacaaagtgggcaatttcccgttcagcccggtgaaagatcgcgaagccgcacaaattcgtcaggcggctgcaagtgttggcttaaactgggatggaaacctgcgactctggcagcgcgacaaagaagtgtggttgtttccggtaggcattgaagccctgatcggtaaagtccgattttctcgcctggggattaaacttgccgaaacgcacaacaaaggttatcgctggcagcatgaagcggttattgcccttgcctcccccgacaacgagaacgcttttgaactgacaccgcaagaagcggaggagtggtatcgcgggcgcgatgtttacccgcaagccgcgccagtggcggatgacgtgttggttactttccagcatcagccgattggtttagccaaacggattggttcgcgactgaaaaacagctacccgcgtgaactggtgcgggacgggaaactttttaccagtaacgcatgacagcgcacaaaaaaagcgcactttttgactggcacattcggcggcctcaactaggctgaaaaatggtgcgatcggactggtcgtaccacaaccggcagctaaatggagagcacgaagatgaaaaccagtgtgcgcataggcgcttttgaaatcgacgacggcgaattacacggtgaatcgccgggtgatcgaacgttaaccattccttgtaaatcagaccccgatttatgtatgcaactggatgcctgggatgctgaaaccagtatccctgccctgctaaatggcgaacactctgtcctttaccgtacccgttacgatcaacaatctgattcctggattatgcgtcttgcctgatccaaaaagaacccgtcggcatggcgggttatttgtcctggttattcccccgttgtaaaatctctcctaaacttaacggtacggcaccacacttcggggatgaaatgttcgcgctggtactttttgtttgctacctggatggcggttgtgaagatattgttgtggatgtctacaacacggaacagcagtgtctttattctatgagcgatcaacggatccgtcatggcggttgttttccgattgaggattttatagatggtttctggcgaccagcacaggagtatggtgatttttaattattgcaattgcacgaaagtcagttcgcccccaaagacagcgccggtatcaatataatgcaggttgccaatatccacgcgatggcgcaacggtgtatgaccaaaccagaaatgatcagcacctgtaattccctgccctttttggcgttcacttaatcgcgagcggctccacaagacctgatgcaaatcaacgtccttttgccattcataaacatcatctggataatcggcatgagcaataacatgtttgccggtgcggctgtgtacttcaagaataaagggcaaatgctgacatttttccagcgccgttttcgcttgtttctgttgattatctgccagcgcaataaaccagtcgccgccattcatcaaccacaaagacatctgctgggatgccagcgcatccatcgccatctgttcatgattgcctcttaccgcacgaacccaatgttgttccagtaactgcagacaacgtaaactttgcggcccacgatcgataacgtctcccactgagataagtaaatctcgccacggatcaaaacgacaatgccataatttgcggcgcaactgctcaagacaaccgtgtatatcgccagaaagccagatatgtcgccattgatgacccgcaattctctgataaacgggcgcaggctgtttcatcaatattttcctcccgcgctaaagatcacataatcttaacaagaatgttaaaaaacgctggactcagacagtagagtgtgtgttatggttgactataaagtcagcgaaggaaatgcttctggcttttaacagataaaaagagaccgaacacgattcctgtattcggtccagggaaatggctcttgggagagagccgtgcgctaaaagttggcattaatgcaggcttagttgccttgccctttaagaatagatgacgacgccaggttttccagtttgcgtgcaaaatggtcaataaaaagcgcggtggtcatcagcttaaatgttaaaaaccgcccgttctggtgaaagaactgaggcggtttttttattggaaatcaaaaggctattttaggtaattaacagagtttttcagctcgttctataaacggtgccagactcattttttcgccgggattgttgggatcatcaatctgaatcaccgaaatgggttgggctttagtcttcccactggcaacttccttctgtgcgacatcgtttaaaggatactgcacgagggtacttgggttgatgacatacaaagcattacccggtcggcaagtcagcatcacctcttcgcgattaaacgcccatttgtctttacccacttcaaaacggctgacggtaatcacctgcggtgcagccagcgccgctgcagaactggtgagtaacagaaacgccagaatactttttttcatcattttcgtaatccatcaaaaaggttcgagagtcgcaagcaggctgatgatcagcagcactaccgcacctatcgcccattcgagtttagtcatccacacaaaccagggtgccgcacgatcttcatcctgcctcatgcgcggtacaagaacataacgattagccagcgcaatgaccaccataatcatcaccaggatggctttgagcaataagagttggccccagtaagtngtaagcgtggggggaaatccggtaatcaacaatgcattaagcacgccgcttgccagtacgccgatcaccgcaaaatgcccgcaccaggaaaaacgcatcagcgcctgaatagcctggtgtcgccaacggcctttgatgagttgcatacaccagagcaccggcagtaatcccccaaaccacgccgccgcacaaatcaggtgaatcgcgtgattagtctgatggattttcgccgttaccccttcattcagcgtcgcatgccccactcccgccagcagaataaattgcgcggtagtgagcataaacagcaaacgtggcatattccgcggttgcataagggcgacgatcaacgttacgagggcgagaacaatttgccataaccagacgccaccaaactgcgtttgcaaaacagcctgccaaatgtttggcgaaaatacatctttccatcccgttcccatcaacccgccctgaacggcgagcattgcagtggcactgatcaaactccagacggcagcgtgctgttgtaaacgcagaaaacgnttcgtcagcaagcgacgaatcgttaagggtgccagccaggcaccgtacattgcgaagccaaagaccagcatcagcgaggtgaaatggataaatcgcagcgcgatccaggtaaacgccagcatgatttatttcacgctaaaggtgtagtgtcctttcgttttatgcccgtccaccgaaacaacatgccagtcaacggtgtaggttccgggtttcagcgaatcggccagtggaacaatcagtcgcttttggtcctgctcatttcgcttcgccggtaatgttttaatattttcgttttttggccccgtgatttttgcaccactgaatcctgtttcaacaccttccgagaagtttaaagtgattgcctgcggtgcagctgtcacttgcgcgtttgccgcaggatactgatgcgttaaatgcgcatgtgcccagacggaaggtgtcaccaacgaagtggtcaggattgccagcgcgtagcgaagggagcgtgcagttgaagccatattatctattcctttttgtaataacttttttacagagcataaccttgtctaatgtctgagtcgaggatcatcaattccggcttgccatccaggctcactcttagtaacttttgcccgcgaatgatgaggagattaagaatgctgaagaatctggctaaactggatcaaacagaaatggataaagtgaatgtcgatttggcggcggccggggtggcatttaaagaacgctacaatatgccagtgatcgctgaagcggttgaacgtgaacagcctgaacatttgcgcagctggtttcgcgagcggcttattgcccaccgtttggcttcggtcaatctgtcacgtttaccttacgagcccaaacttaaataaaacttatacagagttacactttcttacataacgcctgctaaattatgagtattttctaaaccgcaccca

SEQ ID NO: 883 - DNA, 10927 bp, Escherichia coli
  Strain O55:H7
  modified_base (35)..(35): a, c, g or t
  modified_base (66)..(66): a, c, g or t
  modified_base (99)..(99): a, c, g or t
  modified_base (102)..(102): a, c, g or t
  modified_base (110)..(110): a, c, g or t
  modified_base (166)..(166): a, c, g or t
  modified_base (2627)..(2627): a, c, g or t
  modified_base (3173)..(3173): a, c, g or t
  modified_base (4272)..(4272): a, c, g or t
  modified_base (4532)..(4532): a, c, g or t
  modified_base (4599)..(4599): a, c, g or t
  modified_base (4630)..(4630): a, c, g or t
  modified_base (4936)..(4936): a, c, g or t
  modified_base (4955)..(4955): a, c, g or t
  modified_base (7348)..(7348): a, c, g or t
  modified_base (7395)..(7395): a, c, g or t
  modified_base (7440)..(7440): a, c, g or t
  modified_base (7483)..(7483): a, c, g or t
  modified_base (9820)..(9820): a, c, g or t
gcagccattttgaaaaggaagtcattatgtcgttntggaaagttgcagcagcgcaatatgagcctngtaaaacctcactcaccgaacaggtagctcatnatntggagttngtgagggccgccgccaggcaacaatgtcagctgttagtttttccatcgctttcttnactggggtgtgattattcgcgacgtgcccttcctgccccacccgatctctcactgttagacccgctttgttatgccgcaacgacctggcgaatgaccatcattgccggccttcccgttgaatataacgatcgctttattcgtggaattgcggtgttcgcaccgtggcgaaaaacgcctgggatctaccatcagagtcatggtgcatgtctgggccgtcgttccagaaccatcacggtggtcgatgaacaaccgcaaggtatggatatggacccgacctgttcactgtttacgacagggcaatgtctgggagaacccgacctgcaggcatcggcccgtcgcttacaatttttttcacatcagtactcgattgctgtgctgatggcaaatgcccgtggtaacagtgcactatgggatgaacatggtcgtctcatcgttcgcgccgatcgtggttcattattgttagtcggtcagcgttcatcacagggttggcaaggcgatatcattccattacgctaggctttttcggcctggagcatgccatgttgcgcattatcgatacagaaacctgcggtttgcagggagggatcgttgagattgcctctgttgatgtcattgacgggaaaatcgtcaaccccatgagccacctggtgcgccccgatcgtcctattagtccacaagcgatggcgattcatcgcatcaccgaagccatggtcgccgataaaccgtggattgaagatgtgatcccacactattacggtagtgaatggtatgtcgcgcataacgccagctttgaccgccgcgtactgcctgagatgcccggtgagtggatttgcactatgaaactggcccgtcgtttgtggccagggatcaagtacagcaatatggcgttatataaaacacggaagctcaatgtacagacgccgccgggcctgcatcatcaccgcgcgttgtatgactgttatatcaccgccgcgttgcttatcgatattatgaacacctccggctggacggcagaacagatggccgatataaccggacgtccgtcgttgatgacgaccttcacctttggcaaataccgtggcaaagcggtttccgacgttgccgaacgcgatccgggctatctgcgctggttgtttaataacctggacagcatgagcccggagctgcgtttaacactgaaacattatctggaaaatacctaatccgcaggcctagcgggtaatgttccctgcgccagcgcgaccagaaaagcatattccatcgctacgccttcgtacgatttaaagcgaccagatttaccgccatggcctgagtccatgtcggtacagagcaataaaagatggttatcggttttcagctcgcgcaacttagcgacccattttgccggttcccaatattgcacctgagaatcgtgtaaaccggtcgttaccagtaaatgtggataagcctgtgcggtgacgttgtcatacgggctgtagcttttcatatactcgtaatattgcggatcctgcggattcccccactcttcaaactcaccagtggtaagaggaattgattcatcaagcatcgttgttacaacatcaacaaacggtacctgggcgataacgccgtggaataattccgggcgttgattaattgcaacgcccatcaacatgccccccgcactcccgcccatcgcataacaaagcgaaggagagccatagcccagttttaacaatgcatcgcaggcatcaagataatcattaaacgtatttttcttcttcagaaatttaccgtcttcgtaccattgttgccccagctcaccgccgccgcgaacatggacaatggcgtagacaaagccacgatctaacaaactcaagcggctaaaactgaaatcggcatcaatacttgcgccgtaagaaccgtagccatacaccagcagcgggttgtgtcctttgtgaaaatgattgcgatggtagaccaacgaaaccggaacttcgacaccatcacgggcgactatccacaggtgttcactgcggtaattcgccgcatcaaaaccaggaacttctgtttgttttaatacacgacgctcaccggtatccatatccagttcaaacaaagtgtctggtgtggtcatggaagaataaccataacgcaatcgcgcggtttcaggttctggattgtaggcaatccaggtcacataggctggatcatcaaaggcaataccaatgacttcccgggtcttgcggttaatttggcgcaaactggttaacccgcgctgacgctcttcaaccaccagccagtcggtaaacagcgtaaacccttccagcatgatgttttcgcgtggcggaattaactcttcccactgttgctcatcacgcatacgggtacggtataagccaaagtttttgccgtggcggttggaacgcagataaaaacgatgctggtagtgatcaaggctgtattcgtgatctttgcggngcggcagaaaaacaaacggctcggcatcggccatttccgcgtccagcaggcgaacttcactggtggtggcgctggccaaatgaatgactacatagtgctttgaggtcgttttatgcaggctgacgtaataggtatcgtctttttcttcgtaaatcagtttatcttgcgatgctggcgtaccgatggcgtgacgccagacctgataaggcagcagcgtcaccggatgcttgcgaacatagtagaaagtccaggagtcatttgcccagacaaagctgggttcaacgttatccagcagttccgggtaccagttacctgtttccagattacgaaaacgaatgccgtactggcgtcgggaaagaaaatcttctgccagcgccataatggtgttatagggcgtaatcgccattccgcccatcgaataaaactcactatgagccgcgcgcttgttggcatcgagcaatatttcccactcgtcccactcttcactgaacgccgattgacgctggtagatagcatattcacagcctggttcataaatatgccganagcggtagccatttttgatgtagggcgcagaaacttctcgttgcggaatgcggtcgatgatttcctttaagatgcgatcctgcaaggcttgttgtgaggccatcacccgatgaccgtaactattttcttgttgcaggtagtccaggacttccggctgagaacgcgtatcgtcccgcagccagtagtaattatcgatgcgcgtatcgccatgaagcgtcatggcgtggggaatgcgggcggcttttggtagcatgttattgttctttctggttgaaacatcttataagggtggcaaaactcaccggggatgcaagcgaaacagggcagtcattgcttagatgatgacaggtaatggcgcgaatatcgaatgttatgcagacagagaaaatcagcctgttcaaatggctgtgctgttctggatagcccgaaatagtcaacttcaggctatccagagagcggaattattccgccaaagtgcgtttttgctgttcgagatcgcgttcaatgccttcacgaacatcctgggggattttcagcgcgtcacccagtgcattcaggtaactgcgttccataaaatggtcaatatcaatagccgcgcagctcaggaaatagatttccagcgcctcttcttcattgcggaccccggtagccaggcgttgtggatccagcggttgttcgattgcctgctcaatgagtacccgcccctgctcttccacgccggcttcacgcaattgctggtcgattgccgcacgttctttggcatcaatatgaccatcacttttagcggcaaagactagcgcaaggatcaaacgttccgtacgctcatccagcggcgtactttgcgagccaaactgcggttcgtcctgatgcgccgcgcgaattttatctttgtatttattccacagcaccgtacccgctaccgctccgccgccaatcagcaacgcgttggtgccatatttcgtaagaagtttacgtgctgatttatttgcgaccagcagtccagccagtccgcctaatgcgcccggcactaaaagtttgcccaatccctgatccgcagacgaggaggtagaagaactgctttgcccaagcagggattgcngttgatttaaccagttagccatatttgctcctcaataaccatttttagtgcctgtagcatagaggatgaggatgtcagaaaatgtatatcgagacaaaagatgcgcaaataagcggggcggtaggccgttattcaaagaaattcgcgccaggtaaggtatttactgtatatcaggtgataagggtattttaggtgaaagtagtttgtcgttttgagtggcattgtttgatgctgattgcccgatgcgacgctgttgcgtnttctcaggcctacgattgtggtgcgttctggggcggacaaggcactcgcgccgcatccgccaacggncaatcgaattatcagaacccattaacgccgntgatattccgccattcccgctttgcagtccacgctgacctggtaatgaatatcggcacttttaccacgtacggttagcggtactgaccatttatcatctttaccctgaatgtcctgcaaactgacccatgccacgggatcggcctgaccgacaattttttgatcatctgcccagcgcgccacgcgattttgttgataatcacgttttacgctcgcggcaattccggcagcatccagaccttcacactttgggaaagtgaccgacttgctggtttcattattggcagcgaaaactgatgcgcaggcngaaaccaacaacagccctnaaaacgcccctctttttttcatgtttttctccatagcacaatgattcaggagaaagcatggtacaaattgtcaggagcgcaagttgcttcaggccgcgtgtgaggcatcttcctcttcggattcagcaccgacgacctgtggggacggtaatttgccggttttcagaatggtgctcagcacatctttttgttctgccagccatagcgaaagggcttcacgttgctcgtcttccatttgcactggagaatttgtcagccaggtgtcaagcagatccgccgtatcaagcattttgtcataagtatcggcttcctttttgctggtaaacgacattttctcttcgccctcacgaatgactacgtatttaacttcaaccgccatttgcagcctctcataataactgtgattttatacagtatatttcttttcggttgagaaatcaacaccagcaataaagacacacgcaaacgttttcgtttatactgcgcgcggaattaatcaggggatattcgttatgacgttattaggcactgcgctgcgtccggcagcaactcgcgtgatgttattaggctccggtgaactgggtaaagaagtggcaatcgagtgtcagcgtctcggcgtagaggtgattgccgtcgatcgctatgccgacgcaccagccatgcatgtcgcgcatcgctcccatgtcattaatatgcttgatggtgatgcattacgccgtgtggttgaactggaaaaaccacattatatcgtgccggagatcgaagctattgccaccgatatgctgatccaacttgaagaggaaggactgaatgttgtcccctgcgctcgcgcaacgaaattaacgatgaatcgcgagggtatccgtcgcctggcggcagaagagctgcagctgcccacttccacttatcgttttgccgatagcgaaagccttttccgcgaggcggttgccgccattggctatccctgcattgtaaaaccggtgatgagctcttccggcaaggggcagacgtttattcgctctgcagagcaacttgctcaggcatgggaatacgctcagcaaggcggtcgcgccggagcgggccgcgtaattgttgaaggcgtcgttaagtttgacttcgaaattaccctgctaaccgtcagcgcggtggatggcgtccatttctgtgcaccagtaggtcatcgccaggaagatggcgactactgtgaatcctggcaaccacagcaaatgagcccgcttgcccttgaacgtgcgcaggagattgcccgtaaagtggtgctggcactgggcggttatggtctgtttggtgtcgagctgtttgtctgtggtgatgaggtgattttcagtgaggtctcccctcgtccacatgataccgggatggtgacgttaatttctcaagatctctcagagtttgccctgcatgtacgtgccttcctcggacttccggttggcgggatccgtcagtatggtcctgcagcttctgccgttattctgccacaactgaccagtcagaatgtcacgtttgataatgtgcagaatgccgtaggcgcagatttgcagattcgtttatttggtaagccggaaattgatggcagccgtcgtctgggggtggcactggctactgcagagagtgttgttgacgccattgaacgcgcgaagcacgccgccggacaggtaaaagtacagggttaaacccggcaaataaacgctacaaaaatgcccgatcctcgatcgggcattttgacttttacagcttagcgccttctacagcttcacgcgccagcttagtaatgcggtcgtaatcgcccgcttccagcgcatctgccggaaccagccaggaaccaccgatgcacagcacgcttttcagcgccaggtagtcacggtagttagccggagaaataccacccgtcgggcagaaacggacctgggagaacggacccgcgatcgcctgcagggctttcacgccgccgttagcttcagccgggaagaatttgaactctttcaaaccgtagtccatacccagcatcagttcggaaacagtgctgatccccggaatcagcggaatagtcccttcggtagcagctttcagcagcggctcggtcagacccgggctaattgcgaactgtgcacccgcttcagtgacttctgccagctgctgtggattcagcaccgtaccggcacccacaatcgcttcaggcacttctttggcgatagcacggatagcgtcaactgcacactcggtacgcagagtcacttccagaacgcgcaccccaccagcaaccaacgcttttgccatcggcaccgcgtgttccagtttttttaccacgataaccggtacaaccgggccggtggtcaggattgattctgcacttgttttccagtttttcatcaganttttctctcgcctgattacaaatttgtcgtcttaaaaagtgatacangttgcgccctgttcggcaccggacagtttttcacgcaaggcgctnaataattcacgtcctgttcccacgcgtgacgcgctcaggtcangaatgtgtggttcgcgagcagccaattccgcttcgtctaccagcagcgtcagttcgcctgtctgtccattcacacgaatgatgtccccgtcgcgcacttttgccagcagcccgccatcgtaagcttctggtgttacgtggatagctgacggcactttacctgaagcgccggagagtcgtccatcggtaactaacgcaattttgaaacaccggtccaataatacaccaagtggcggcatgagtttatgtaattctggcattccgttcgcttttggcccctgatgacggacaacaacgacacaatcgcggtccagcaaacccgcttcaaaggccggcataacgtcatgctggctttcaaaaacaaccgctggcgcttcaatcacctggttctcaaccggcacggcagaggttttcataaccgcacggcccaggttaccgcttaacacttttgtcccaccatgatgagagaaaggttgttcgaaggaagcgatcacattgctgtcgagtgatttttccgccccttcccgccagtccagttcaccattattcagccatggttcaagggtataacgagacagaccaaagcctgccaccgtattgacatcttcatgcagcaggcctgctttgagcagttcacgcaccagaaccggtacgccacctgccgcctggaagtggttaatatcggccggaccgttcgggtagagacgtgccatcagcggtacaacatcagaaaggtcagagaagtcatcccagttaatctgaataccggccgcgcgcgccatcgccaccaggtgcatggtgtggttagtggaaccaccggtcgccagcagtgcaacgataccgttcaccaccactttctcatcgatcatcttaccgatcggcatccattcattaccattaccggtcatgcgtgtaacctgacgcgcagcggcagcggtcaaagcatcgcgcagcggagaatccggatgaacaaaagaagagcctggcaactgcatccccataaactccaccaccatctggttggtgttggcagtaccgtagaaagtacatgttcccggcgcatggtaagacgcggcttctgactccagtaaggccatgcggtccactttaccttcggcataaagctggcgaatacgcactttttctttatttggcaaaccgcttgccatcggtccagacggcacaaacaccgcaggcaaatgaccaaacgacagggctgccatcgtcagacccgggacaatcttgtcgcacaccccgaggaacagagcaccatcaaacatgttatgggacagcccgacagccgcagacatcgctatcacttcgcggcttagcagcgacaattccattccatcctgcccctgggtgacaccatcacacatcgccggaacaccgcccgcaacctgaccaaccgcattcgcttcatgcagggctttacgaatgatttctggatagtgttcataaggctggtgagcggagagcatgtcgttataggaggtgatgatggcgatattgttacgcaacatgcttttcaaagaggctttgtcttctggctggcaggcagcgaaaccgtgtgccaggttaccgcatgccaactgcgaacgatgaacggtcgacgttttcgcttgttctatccgggcgagataagcagagcgagtctcgcgcgaacgttcaatgattcgatttgttacgcgtaacaattgtggattcataaaggctcctgaaattgagttgtcagagcaggatgattcacaacgcgtttcattcagaggatttatgagtgaaacgcctgtaaccggagctcatagggcaaaaacgtttcagtcagtgtaataaaaaaagcctcgtgggtgaatccgcacgaggcctgaaagtgtaaaaattgttctacaatctgtgcaagatcatgttaccggtaaaataaccataaaggataagcgcagatattactcaaactcattccaggaacgaccatcacgggtaatcatcgccaccgaggcaacgggtccccaggttccggcctgatacggtttcggcgcatcattgtccatcgcccacgcctcagtaatggagtctacccatttccaggcttcttccacttcatcgcgacgtacaaacagtgcctgaataccacgcatggtttccagcagcaaacgttcataggcatccgccagatgcgtctgattaaaggtttctgaatagctcagatccagcttggtgatttgcaggttatgtttgtggtcaaggccaggaactttattcagtacctggatatccacgccttcatcaggttgcagacggatagtcagtttattctgcggcagatcctgccacgactctntaaacagattcagttcaggtgttttgaaatagaccacgacttcagaacatttggtcggcagacgtttaccagtacgcaggtagaatggcacaccggcccagcgccagttatcaatgtcgacgcggatcgccacgaaggtttctgtattgctgctcttgttcgcgccctcttcttccagatatcccggcacttttttgccctgggcgaagcccgcagtatattgcccgcgtacggttttttcgcgtacgttggagcggtcgatgcggcgcagagacttcagtactttcactttttcatcgcggatgctgtctgcgctcaggtcagacggcggagacatcgcaatcatgcaaagaatttgcagcaggtggttctggatcatgtcgcgcatctgaccggctttatcaaaatagccccagcgcccttcgatccccacttcttctgccacggtaatctcaacatgatcaatggtgcgattgtcccagttattcacaaacagggagttagcaaaacgcagcgccaacaggttcagcaccgtttctttaccaagatagtggtcgatacggtaaacctggcactcctcgaagtattcgccaacctgatcattgatttcctgcgaggtcgccagcgacgtccccagcggtttctccatgactacgcgtgccggtttagcattcagttttgcctcgccaagccctttgcaaattgcgccaaaagtgctgggcggcatggcaaagtagttaatggtgatacgatttttttgatccagcatcgcgccgagacggctgaatgcagcagtgtcattgacatcgagattacaaaaatccagacgtgcgctcagggtgtcccataaaccttcatcaatggtttctttcatgaaagtttcgagcgcctcgcggacaactttggtatatgccgctttatcccagtcagcacgccctacgccgataatccgggtgtccgggttgagctgaccggctttttccagttgatacagggaaggcagcaatttacgacgcgcaaggtcgcctttcgcgccgaaaatgaccaggtcacaggcctgggctgtttgcgttaccgccatgtcattctccttaagttaactaaccc

SEQ ID NO: 884 - DNA, 7883 bp, Escherichia coli
  Strain O55:H7
  modified_base (2152)..(2152): a, c, g or t
  modified_base (4041)..(4041): a, c, g or t
  modified_base (6628)..(6628): a, c, g or t
  modified_base (7880)..(7881): a, c, g or t
taagccagggtatacttgtaattttcttacggtgcactgtactgcttttacgagcttgcgaaaactgtaaacgcttatccccccgtgcgattacggtaaaagcgcgcaaagtgcggcaaaactgataaaaaaatcatcgttttccattgggtaaaaatctgacactgatcatgttatgaaaaaaaataacaacttttttatctgcttttgtcattaacacagcacacaggcgtaatatctgacaaaactgcatttcgatttctttcagtgcggaaatcgtcattacccgtgagtctctttacatcatgaatatgctggaaaaaatccagtctcagctggaacatttgagcaaatcagagcgcaaagttgccgaggtcattctggcttcgcccgataacgcgatccattcgagtattgctgctctggcactggaagccaatgttagcgaaccgacggtgaatcgtttctgtcgcagcatggacacgcgcggttttcctgattttaaacttcatctggcacagagtctggcgaatggcactccctatgttaatcgcaacgtcaatgaagatgacagcgttgaatcatacacagggaaaatatttgagtccgcaatggcaacgctcgatcatgtccgtcattcactggataaatctgccatcaaccgcgccgtcgacttgctcactcaggcaaaaaaaatcgcctttttcggattaggctcttcagccgccgttgcccacgatgcgatgaataagttctttcgttttaatgttccggtggtgtactccgatgatattgtgctgcaacgcatgagttgtatgaattgtagcgacggagacgtggtggtgctgatttctcacaccggaagaacaaaaaatctggtcgagctggcgcagctggcacgcgaaaacgacgctatggtgattgccctcacctctgcgggtaccccgctcgcccgggaagcaacgctggcaattaccctcgacgtaccggaagatactgacatttatatgcccatggtttctcgacttgcacagctgaccgtgatagatgtgctggcgacaggatttactttgcgacgcggtgcaaaattcagagataacttgaagcgggtcaaggaagcgctgaaggaatcgcgttttgataagcagttacttaatttaagtgacgatcgctaaaagcgactgtcactgttctaatcttatacgacatccgaatgagattattttatcgccatcgcggcgttatttcattcggatttcatgttcaagcaacacctggttgtttcagtcaacggagtattacatgtccagaaggcttcgcagaacaaaaatcgttaccacgttaggcccagcaacagatcgcgataataatcttgaaaaagttatcgcggcgggtgccaacgttgtacgtatgaacttttctcacggctcgcctgaagatcacaaaatgcgcgcggataaagttcgtgagattgccgcaaaactggggcgtcatgtggctattctgggtgacctccaggggcccaaaatccgtgtatccacctttaaagaaggcaaagttttcctcaatattggggataaattcctgctcgacgccaacctgggtaaaggtgaaggcgacaaagaaaaagtcggtatcgactacaaaggcctgcctgctgacgtcgtgcctggtgacatcctgctgctggacgatggtcgcgtccagttaaaagtactggaagttcagggcatgaaagtgttcaccgaagtcaccgtcggtggtcccctctccaacaataaaggtatcaacaaacttggcggcggtttgtcggctgaagcgctgaccgaaaaagacaaagcagacattaagactgcggcgttgattggcgtagattacctggctgtctccttcccacgctgtggcgaagatctgaactatgcccgtcgcctggcacgcgatgcaggatgtgatgcgaaaattgttgccaaggttgaacgtgcggaagccgtttgcagccaggatgcaatggatgacatcatcctcgcctctgacgtggtaatggttgcacgtggcgacctcggtgtggaaattggcgacccggaactggtcggcattcagaaagcgttgatccgtcgtgcgcgtcagctaaaccgagcggtaatcacggcgncccagatgatggagtcaatgattactaacccgatgccgacgcgtgcagaagtcatggacgtagcaaacgccgttctggatggtactgacgctgtgatgctgtctgcagaaactgccgctgggcagtatccgtcagaaactgttgcagccatggcgcgcgtttgcctgggtgcggaaaaaatcccgagcatcaacgtttctaaacaccgtctggacgttcagttcgacaatgtggaagaagctattgccatgtcagcaatgtacgcagctaaccacctgaaaggcgttacggcgatcattaccatgaccgaatcgggtcgtaccgcgctgatgacctcccgtatcagctctggtctaccaattttcgccatgtcgcgccatgaacgtacgctgaacctgactgctctctatcgtggcgttacgccggtgcactttgatagcgctaatgacggcgtagcagctgccagcgaagcggttaatctgctgcgcgataaaggttacttgatgtctggtgacctggtgattgtcacccagggcgacgtgatgagtaccgtgggttctactaataccacgcgtattttaacggtagagtaagtacgttgccggatgcggcgaaaacgccacatccggcctacagttcaatgatagttcaacagatttcgaatattctgaagcaaacttgaacttatcatcaggcgaaggcctctcctcgcgagaggcttttttatttgatgggataaagatctttgcgcttatacggctggatttcgcccggtttgcgagttttcagcaattttagtatccaggtgtattgttctggtcgcggaccaacaaaaatctcgacttcttcattcatccgccgcgcaatcgtatgatcatccgcctctaacagatcatccatcggtgggcgcacctgaatcgtcagacgatgcgtcttgccatcataaatcggaaacagcggtacaacgcgcgcacggcacactttcatcaaacgaccaatcgcgggcaacgtcgctttataggtggcaaagaaatccacaaattcgctgtgctctgggccatgatcctgatcgggtaaataatatccccagtacccctgacgtaccgactggatgaatggtttaataccgtcatttctcgcatgcagacgaccgccaaagcgacgacgcaccgtgttccagacataatcaaaaaccgggttgccctgattatggaacatcgctgccattttctgcccttgcgaggccatcagcatggcaggaatatcgacggcccaaccgtgcggcactagaaagataactttctcgttattacgccgcatctcttcgatgatctccagcccttgccagtcaacgcgcggctgaattttctccggcccgcgtattgccaactcagccatcattgccatcgcttgcggcgcggtggcaaacatctcatcaacaatcgcttcgcgttcagcttcactacgttctggaaagcagagcgacagattgattaacgcacgacggcgtgagctttttcccagtcgtccggcaatacgtcccagccgtgccagaatgggatcacggaactttggcggcgttaaagcgatacccgccatcgctgctacgcccagccatgctccccagtagcgcgggtggcgaaaggatttatcaaactcaggaatgtattcgctattattttttttcgtttccatgcttttccagtttcggataaggcaaaaatcaatctggtgatagtgtagcggcgcaacttgccccgcaccaaataaaaaaagccggtactgactgcgtaccggctgcgaatggatgttaattaatcaaaccgtagctgcggcacaatctctttggcctgcgccaggaattcgcgacgatcggagccggtcagccnttcggtacgcggcagttttgccgtcagcgggtttacggcctgctggtttatccatacttcatagtgcagatgcggcccggttgaacgtccggtattaccggaaagcgcgatacggtcgccacgtttcaccttctgccccggtttcaccagaatcttgcgcaagtgcatataacgcgtggtgtagctgcgaccatgacgaatagccacataataacctgctgcgccactgcgtttggcaaccaccacttcaccgtcacccactgaaagcactggcgtaccctgcggcatggcgaaatcaacacctctgtgtggtgcaacgcgaccggtcaccggattagtacgacgcgggttaaagttagacgagatacggaactgtttcgccgtcgggaatcgcaagaatcctttcgccagaccagtaccgttacgatcgtagaatttgccatcttcagcgcggatagcgtaataatctttaccttctgaacgcaaacgtacgcccagcagctggctttgctcacgtttaccatcaagcatttctcgagacattaataccgcaaattcatcgccttttttcagtttgcggaaatccatttgccactgcatggctttaatcactgcgctcacttcggcgctggtcaaaccggcgtttctggcgctggcaacaaagctccccccgacggtacctttcagcagattgttaacccactctccttgctgcatttcgctggtcattttaaaaccgttagcggcagtacggtcataggttcgggtttcacgacgagacacttcccaggtgaggcgctgcagttcgccgtccgcggttaatgtccaggagagttgttgaccgattttcaggttacgcaattctttgtcggccgcagccagttgggtgatatcacccatatcaataccatactgattgagaatgctgcttagcgtatcgccagtggaaacaacatattcatgcacgcccgcttcaccggcgattttgtcatccagttcgtcctggggaatggcttcatcttcttgtgcagcttgatcaatcggctcactggcttcaggtaagagcgaacgaatttcgttctgttccagctcaatggttttgacaattggcgtggcatcgcggtgataaacatagggccgccagacagcgacggccagagtaagaacggtgagcgaccccaacataacgcggtgtggtcgcggtaaattattaaacgccagggcgacagagcgggctatctgttgcacgtaatcacttcctcattaatctcctttcaggcagctcgcatactggttggctaaatgactcaggaattctgaatagcttgttttacccagtttgatattcgtccccaggggatccaacgttcccatacgaacggatgtccctcgtgcgacgctctcaacgaccgctggcctgaactgtggctcagcaaaaacgcaggttgctttttgctcaaccaactgtgttcttatttcatgtaaacgctgcgcgccaggttgaatctcagggttaacggtaaaatgaccaagcggtgtcagtccgaactgtttttcgaaatagccgtaagcatcgtgaaaaacgaaataacctttccccttgagcggcgcgagctcgttaccaacctgcgtttcggttgaggctaattgtgcctcaaaatccttcaggttggcgtcaagtttggctcgactttgcggcataagttccactaattttccatggattgcaaccgctgtagcccgcgctatctctggggaaagccaaagatgcatgttgaaatcgccgtgatggtgatcttcgtcacttttttccgcgtggtcgtgatcatcatcatcgccgttaatacttttcatcagtagcggtttcacatcttcaagctgcgcaatcgttacctgcttcgcttctggtaatttgcttaccggtttttgcataaacgcttccatctccgggccaacccaaacgactaagtccgcgttctgtaagcgttttacatccgatggacgcagtgaataatcatgttctgaagcgccgtcaggaagtaaaacctccgtttctgttaccccatcagcaatggcagaagcgatgaacccaacgggtttaagcgaagcgacaacggcggcatctgcggcctgtgttgcaccgccccagagagcggcgaataatgctgcgaaaagaagcgtttttttatgtaacataatgcgaccaatcatcgtaatgaatatgagaagtgtgatattataacatttcatgactactgcaagactaaaattaacatgacaagtctggtttccctggaaaatgtctcggtttcttttggccaacgccgcgtcctctctgatgtgtcgctggaacttaaacctggaaaaattttgactttacttgggccaaatggcgcaggtaagtcgacactggtacgggtagtgctcgggctggtaacacccgatgaaggggttatcaagcgcaacggaaaactgcgcatcggctatgtaccgcagaagctgtatctcgacaccacgttgccactgaccgtaaaccgttttttacgcttacgccctggtacacataaagaagatattttgcctgcantgaaacgtgtccaggccgggcacctgattaacgcaccgatgcaaaagctctctggtggcgaaacgcagcgtgtactgttagcgcgagcattgttaaatcgcccgcaattattagtgctggatgaacccactcaaggcgtggatgtaaatggccaggtggcgttatatgaccttattgaccaactgcgtcgtgaactggattgtggcgttttaatggtttctcacgatcttcatctggtgatggcaaaaaccgatgaagtgctgtgcctgaatcatcacatttgttgttccggcacaccggaagttgtttccctgcatccggagtttatttcaatgtttggtcctcgtggtgctgaacaactgggtatctatcgccatcatcataatcatcgtcacgatttacagggacgaattgttttgcgtcggggaaatgatcgctcatgattgaattattatttcccggttggttagccgggatcatgctcgcctgtgccgcgggtccgctgggttcgtttgtagtctggcgtcgtatgtcttatttcggtgatacgctggctcatgcctcattacttggtgtcgcgtttggtttgttgctggacgtgaatccattctatgcggtgattgccgttacgctgctgctggcgggcggtctggtatggctggagaagcgtccacagctggcgatcgacacgttattagggattatggcgcacagtgccctgtcgctgggcctggtggtcgttagtctgatgtctaacattcgtgttgatttgatggcttacctgttcggtgatttactggcagtgacgccagaagatctcatctctattgcaattggcgtggtcatcgtggtggctattttgttctggcaatggcgcaatttgctgtcgatgacgattagcccggatctggcgtttgttgatggtgtgaaattacagcgagtgaaattgttgttgatgctggtgacggcattgacgattggtgtagcgatgaaatttgtcggtgcgttgattattacttcgttgctgattattcctgcagctactgcgcgtcgctttgcccgtacgccggaacagatggctggtgtcgctgttttggtggggatggtggcagtaactggcggtttaaccttttccgcgttttacgatacgccggcgggtccgtcggtggtgctatgtgcggcactgttatttattatcagtatgatgaaaaagcaggccagctaatctatcgctgaacacatttgtcggatnngg

SEQ ID NO: 885 - DNA, 2051 bp, Escherichia coli
  Strain O55:H7
ttatccgacctacggttcgctatctctggtaggcctggtaagacgcgaacagcgtcgcatcaggcacactgccaatgtcggatgcggcgcgagcgccttttccgacctacggttcgctatctctggtatatgcctgataagacgcgaatagcgtcgcatcaggcacactgccaatgtcggatgcggtgcgagcgaccaatccgacttacggcatttctggcggcgttatgccaaagtgattccacgcccgcgtcgtcgccatacgcccacgcggtgtacgctgcaaaaagccttgctgaatcaaataaggttccagcacatcctcaatggtttcacgttcttcgccaatggctgccgcaaggttatccagacctaccggcccaccaaagaacttatcgattaccgccagcaacaatttgcggtccatataatcgaaaccttcagcatcgacattcaacatatccagcgcctgagcagcgatatctgccgagatggtgccatcgtgcttcacttcggcgaaatcacgcactcgacgcagcagacggttggcaatgcgcggcgtaccgcgagcgcgacgagcaacttccagcgcgccgtcatcactcatctcaagccccataaagcgtgcgctgcgactgacgatatattgcagatccggcacctgataaaactccagacgttgcacaataccaaaacggtcgcgcaacggtgatgtcagcgaacctgcgcgcgtggttgcaccaatcagggtaaacggcggcaaatcaattttaatggagcgtgccgccggaccttcaccaatcatgatatccagttggtagtcttccattgccgggtacagcacttcttcaacaactggcgataaacggtggatctcatcaataaacagcacgtcatgcggttcaaggttagtgagcatcgcagccaaatcgcccgccttttccagcaccggaccagaagtcgtgcgtaaattaacgcccatttcattggcgacaatgttggcaagcgtagttttacccaaccccggaggaccaaaaatcaacaaatgatcgagggcatcgccgcgcagtttcgctgctttgatgaaaatctccatctgtgaacgaacctgcggctgaccaacatactcttccagtaatttagggcgaatggcgcgatctgctacatcttccggcaaagtggtaccggcagaaatcagacggtctgcttcaatcatcctttacctcataacgcggcgcgtagggcttcgcgaattaatgtttcactgctggcgtcagggcgagcgattttgctcaccatgcggcttgcttcttgtggtttatagcccagcgccaccagcgcggcaaccgcttcttgttcagcatcgtcggtcgccgggctggcaggagacgtgagtaccaggtcggcggctggcgtaaagagatcgccatgcaaacctttaaatcggtctttcatttcaacaatcaagcgttcggcggtttttttgccaatacccggcagtttcaccagtgcccccacttcttcacgctcaacggcattaacgaactgctgcgctgacattccggagaggatcgccagcgccaacttcgggccgacgccgttggttttgatcaactctttgaacaacgtgcgctcttgtttattgttaaaaccgtacagcagttgcgcgtcttcacgcaccacaaagtgggtgaaaacgatcgcttcctgacccgcttcagggagttcataaaaacaggtcatcggcatatgcacttcatagcctacgccgcccacttcaattaacaccagcgggggttgtttttcaatgatgatgcctctgagtctgcctatcacatgacgctcctgcgtaatgaatcaaagataatgctgtatgataaaaaaatgctggatagatatccagcgaaggatgaagaaaacttgcgaggtgtctcgatgaactgaaaaatggcacagtataatttattctacaggttatattggaagtaaatattttaatattacatattcagtgaagaaatgcgtaataaaaatatacattgcgcctcctg

SEQ ID NO: 886 - DNA, 8259 bp, Escherichia coli
  Strain O55:H7
  modified_base (2580)..(2580): a, c, g or t
  modified_base (3956)..(3956): a, c, g or t
  modified_base (4171)..(4174): a, c, g or t
  modified_base (4562)..(4562): a, c, g or t
  modified_base (5368)..(5368): a, c, g or t
  modified_base (5512)..(5512): a, c, g or t
  modified_base (8194)..(8197): a, c, g or t
  modified_base (8204)..(8204): a, c, g or t
taaattttttatgctattacgtatattcgtatctatttcaatggaatgacaacgtgaatattaattaccctgctgaatatgaaattggagataacgtctttacatgtataggtgctgccttatttggtcaaatatcagctgcatcaaattgctggagtaatcacgtcgggatcattatcggtcataacggtgaagacttcctggttgcagaaagccgggttcccctttcaaccatcaccacgctatctcgttttattaaacgttcgtctaatcaacgctatgctataaagcgattagacgctgggctgacagaacaacaaaaacaacgaattgttgaacaggttccctcccggctacgcaaactttaccacaccggttttaaatacgaatcttcgcgccagttctgttcaaaatttgtttttgatatttataaagaagcgctatgtattccggtgggtgaaatagagacgtttggagaattgttaaatagcaatccgaatgcaaaactcactttctggaaattctggttcctgggttctattccgtgggagcgtaaaaccgtcacgccagccagtttgtggcatcatccaggtttggtgttgattcatgcggagggagtggaaacgcctcagccggaactgaccgaggcggtataacttaacgcagtcgccctctcgccaggttcagccgcgattcgctcatctgcatcgcattctgactaacgtggcagtgggtgatggcaatcgccagcgcatcggcggcatccgcctgtggattagcgggcagtttcagcaaggtgcggaccatatgctgcacctggcttttttcggcactaccaatacctaccaccgtttgctttacctgacgtgccgcgtattcaaatactggcaactcctgattcaccgccgccacaatcgccacgccgcgcgcctggcccagtttcagggctgagtcagcgttctttgccataaagacttgttcaatggcgaaataatcgggctggaactgggtgatgatttccgtcacgcccgcatagatgagtttcagacgagacggtaaatcatccactttggtgcgtatgcatccgctacccaggtaggacagttgcctacctacctggcggatgacgccgtagccggtcacgcacgaacccggatcaatgccgagaataatagccatcacgcgtctccgttttgctgtttagcaggcctcatcagagagtcgctgcgacctcatcagagatttcaccgttatggtaaacttcctgcacgtcgtcgcaatcttccagcatatcgatcagacgcatcagtttcggtgcggtttctgcatccatatcagctttggtagacgggatcatggaaacttccgcgctgtctgctttcagacctgccgcttccagagcgtcgcgcactttacccatttcttcccatgcagtgtagacatcaatcgcgccgtcatcataggtcacaacgtcttcagcacctgcttccagtgctgcttccatgatggtgtcttcatcgcctttctcgaaggagatgacgccttttttgctgaacagataggctacggaaccatcagtaccgaggttaccgccacatttgctgaatgcatgacgcacttcagcaacggtacggttgcggttgtcagacagacattcaatcatgattgccgtgccgccaggaccgtaaccttcgtagatgatggtttccatgttcgcatcatcatcaccgcccacaccacgtgcaattgcgcggttcagagtgtcacgggtcatgttgttagacagtgctttatcaattgctgcacgcagacgcgggttagcgtccggatcgccaccgcccagcttagccgcggttaccagctcacgaatgattttagtgaagattttaccgcgcttagcatcctgcgcagctttacgatgtctggtgttggcccatttactatgacctgccataaaaatatctccagatagccctgcctgttcaggcagcgttaattacaaactgttcaatcgcctgccggttgctccaggacttagtgagcgccgccgcagcaggcgcatcaagccacttgtaagccagatgttcagtgaaaacgatctgccgctcatgcggaagcgcaagacagaaccatgattccgtattacgcgtcacgcccggcgcatagcgatgacgtaaatgagaaaaaatttcaaactctaccgtgcgctgacagtcaattaaggtcagttgttcagcgacaacatcaatggtgacctcttcctttacttcgcgcatggcagcttgcggcgcggtttcaccctcttccacgctgccggttaccgactgccagaaatcggggtcatcacgccgctgcaacatcagcacccgtttcgtatcttgtgcgtagatgaccactaagatcgaaacgggacgcttatacactttatccttcacgctgcctcttcgttgactgccttcgctcatcccattcacatagttatctatgctcatgggagttcactcagttgccgcctcgatgcaacgcgaatgatttcgtgtatttgagtcatatcagttattctcagccttcttcacaacntgaatgctcagctcagccagtgcagccgggttagcaaagctcggtgcttcagtcatcagacacgctgccgccgtggttttcgggaaggcgataacgtcacggatattgtcggtgccggtcagcagcatggtcagacggtcaagaccgaatgccagacctgcgtgcggcggagtaccgtatttcagagcgtcgagcaggaagccgaatttctcgcgctgttcctcttcgttgatacccagaataccaaacaccgtctgctgcatatcaccattatggatacgtactgaaccaccgcccacttcgtaaccattgatgaccatatcgtaagcgttcgccaccgcattttccggtgcagctttcagctctgcagccgtcatgtctttcggtgaggtgaacggatggtgcattgccgtcaggccgccttcaccgtcgtcttcaaacatcgggaagtcgataacccacagcggtgcccatttgctttcgtcggtcagaccaaggtctttacccactttcaggcgcagtgcgcccatcgcgtcggcaacaattttcttgttgtcggcaccgaagaaaatcatatcgccatcttgcgcggcagtacgatccaggatggcttcgatgatttctgcattaaggaacttcgctaccgggctgttgataccttccagacctttcgcgcgttcgttaactttgatgtaagccagacctttcgcgccgtagattttaacgaagttaccgtattcgtcgatctgcttacgggtcagcgatgcgccacccggaacacgcagagcggcaacgcgacctttcggatcgttcgccggacctgcaaatactgcaaactcaacagatctcagcagatcagcaacgtcggtcagttccatcgggttacgcagatccggtttatcagaaccataacggcgttcggcttccgcaaaggtcattaccgggaaatcgcccagatctacgcccttcacttccagccacagatggcgcaccagcgcttccatcacttcacgcacttgcggcgcggtcatgaaagaagtttccacatcgatctgagtaaattcaggctgacgatcagcgcgcaggtcttcgtcacggaagcatttaacgatctgatagtagcggtcaaagccggacatcatcagcagctgtttgaacaactgtggggattgcggcagtgcgtagaatttacctttgtgcacacgagaaggcaccaggtagtcacgcgcgccttccggcgtggctttggtcagcatcggagtttcgatgtcgaggaaaccgtggtcatccataaaacggcgcaccaggctggtgattttagcgcgggttttcaggcgctgagccatttccggacgacgcaggtcgaggtagcggtntttcagacgcgcttcttcggtgttgacgtggttagagtcaagcggcagaacatctgcgcggttgatgatagtcagcgaggacgccagcacttcgatttcgccggtcgccatatcgcggttaatatttttttcgtcacgcgcacgtacggtgcccgtgacctgaatgcagaactcattacgcagttcagaggccagctttaacgcgtccgcacgannnngatcgaaaaatacctgcacgataccttcgcggtcgcgcatatcgatgaagatcaggctaccaagatcacgacgacggttgacccaaccacacagagtcacctgctgccccacgtgggacaaacggagctgtccacaatattctgtacgcatgagatatcccttaacttagctgccggcggatgccccctgctgcgcaggtgaccaagtcgcagcgttagctgtatgtcacaactgaatgaaaaaaggcggctattatactggaaattctgccgcaccgtaagagcctggcccgcgctggaacgcctcgttaccactttatatcgggcctgaaatcagactctacgccagtttgctataaaggtgttgcccgaactcataaaaattaanaaaatttgtcgttccgccatcggctaatcgcattaaggtgtgaggcacgattttgttttttcaggagtcatcatgcttgaacttaatgctaaaaccactgcgctggtggtgatcgatttacaagaaggcatcttaccttttgccggtggtccacatactgccgatgaggtagttaatcgcgccgggaagctggcggcgaaatttcgcgccagcggtcagcccgtgtttctggtgcgcgttggctggtctgccgattacgccgaagcattaaaacagccggttgatgccccttcccccgctaaagtgttgcccgaaaactggtggcaacatccagctgcattaggtgcaactgacagtgatatcgaaataatcaaacgtcagtggggtgcgttttacggtacggatctggagttgcaattacgccgccgaggtatcgatacaatagtgttatgtgggatctcgaccaatatcggagttgaatccaccgcccgcaatgcctgggaacttggctttaatctggtgattgccgaagatgcctgtagtgccgctagcgccgagcagcacaataacagtatcaaccatatctacccgcgcatcgcccgtgtgcgtagcgtggaagagatcctcaacgcgttatgatttacatcggtctaccgcaatggtcgcatcctaaatgggtgcggttggggatcaccagccttgaagagtatgcccgtcactttaactgcgtggagggcaacaccacgctttacgccctgccgaaacccgaggttgtcctgcgctggcgtgaacagaccacagatganttccgcttctgttttaagtttccggcgaccatttcgcatcaggcagcattacgacattgcgatgatttagtgactgaatttttgacccgcatgtcaccgttggctccgcgcattgggcaatactggctgcaactgcctgccacnttcggcccacgggagctgcctgcgctttggcattttctcgattctctccctggcgaatttaattatggtgtggaagtccgccatccacagtttttcgccaaaggggaagaggaacaaacgcttaatcgcggtttacatcagcgcggcgttaatcgggtgattttagacagccgcccggttcatgcagcacgtccacacagtgaagctattcgcgacgctcaacgaaaaaaacctaaagttccggtacatgctgtactgacggcgacaaatccgctgatccgttttatcggtagtgatgatatgacgcaaaaccgggaattatttcaggtctggttacaaaaattagcgcagtggcatcagaccactacgccttatctttttttacatacgccagatattgcccaggccccggaactggtacataccctgtgggaagacttacgtaaaacgcttccagagatcggagcagttccggctattccacagcaatcttctcttttctgaatttgccacctatcatagacaggtgccatcggccattttaaagggagtttgtatggtaagcgcgctgtatgccgttttaagtgcgttgttattaatgaagttctcttttgatgtcgttcgcctgcgaatgcagtaccgcgttgcctatggtgacggtggttttagcgaactgcaaagcgctattcgcattcatggtaacgcggtggaatatattcccatcgcgattgtgctgatgctgtttatggaaatgaatggcgcagaaacctggatggtgcatatttgcggcatcgttttgcttgctggtcgtctgatgcattattacggttttcatcaccgtctgttccgctggcgacgttccggcatgagcgccacctggtgtgcgctgttgctgatggtgctggcgaatctttggtatatgccctgggagttggttttctccctgcgttagcgcacaatacgccactttctttttcccggatttttacgttatgtctcaccgcgacacgctattttctgcccctatcgccagactgggcgactggacctttgatgaacgggtagctgaagtcttcccggatatgatccagcgttccgttcccggctattccaatattatttccatgattggtatgttagccgagcgcttcgttcaacctggtacgcaggtttacgatctgggttgttctctgggcgcggcgacgctctcggtgcgtcgcaacattcatcatgataattgcaaaattattgccatcgacaactccccggcgatgattgaacgctgccgtcgtcatattgacgcctataaagcccctacgccagtagacgtcattgaaggtgatattcgcgatatcgccattgaaaacgcatcgatggtggtgctgaattttaccctgcaattcttggaaccttccgagcgccaggcgttactggataaaatttatcaagggctgaaccccggcggcgcgctggtgctttcggaaaaattcagtttcgaagatgccaaagttggtgaactgttgttcaacatgcaccacgactttaaacgtgccaacggttacagcgaactggagatcagccagaagcgcagcatgctggaaaacgtgatgctgaccgattccgtggaaacccataaagcacgcctgcataaagccggttttgagcatagcgagctgtggttccagtgctttaactttggttcactggtggcattaaaagcagaggacgctgcatgatcgactttggtaacttttattctctgattgccaaaaatcatctttcacactggctcgaaacgctgcccgcgcagattgctaactggcagcgcgagcagcagcacgggttgtttaagcagtggtcaaatgcggtggagtttctacctgaaattaaaccgtatcgtcttgatttattgcatagcgttacggcagaaagcgaagagccactgagcgcagggcaaattaaacgcattgaaacgctgatgcgcaacctgatgccgtggcgcaaagggccgttctcactgtatggcgtcaacatcgataccgaatggcgttccgactggaaatgggatcgtgttctgccccatctttctgatttaaccggacgcaccattctggatgtcggctgcggcagcggttatcacatgtggcgcatgattggcgcaggcgcgcacctcgcggtggggatcgaccctacgcaactgtttctgtgccagtttgaagcggtgcgtaaactactgggtaatgatcagcgcgcgcatttgttaccgttaggtattgaacaacttccggcactgaaagcctttgataccgtcttttcgatgggcgtgctttatcatcgtcgttcaccgctggagcatctctggcagttgaaagatcaactggtcaatgaaggtgaactggtgcttgaaacgctggttattgatggcgatgagaacacggtgctggtgccgggcgatcgttacgcgcaaatgcgtaatgtctatttcatcccttccgcgctggcgctgaaaaactggctgaagaagtgtggttttgtagatatccgcattgcggatgtgagcgttaccactacagaagagcagcgacgcactgaatggatggttaccgagtctctgtccgatttcctcgacccacatgatccgagtaagacagttgaaggttatcctgcgcctaaacgcgcggnnnngattgcncgcaagccgtaaaggtctggtattactgccggatgcggcgtgaacgccttatcca

SEQ ID NO: 887 - DNA, 3884 bp, Escherichia coli
  Strain O55:H7
  modified_base (10)..(10): a, c, g or t
  modified_base (468)..(468): a, c, g or t
  modified_base (1575)..(1575): a, c, g or t
aaaaccttgntaattcaatatattgcagggactatgtaggcctgataagcatagcgcatcaggcagctttatgtttgcataacctcagcgcccgtttccgggcgcttttcacgtcttatgcctgaacagctggctgatcaaacgccgttaacttcggtgcgttacccgtatatttttcgatatacaccagcgcagagttaccggcacaggcatttgccagctgcgagctggggatatccgccgttaacacgttcgcactgccgtttttacacaagccattttccagatctggccatgcaccttcatgcacgcataccacgccttttttgatcccgtcagtcaccacagcgcctgtcaaaatctgaccacgtttgttccagacacggaccagatcgccattcgcaataccaaagcgagcagcatcttcggtgtgaatagtgattggttcacgatcggcaaccgcatatnttttacgcagttgcgcatagttaagctgactgtgtaaacggtgtgccggatgtgcggtcagaagctgtaactgcttctcgtcggcggtacctttccactcatcaggcgcaagccaggttgggtgtgccgggcaatccttatagccaaatttttccagcgttttggagtaaatctcaattttgccgcttggcgtacccagcgcatttttcaccggatcggcgcggaaatcaccataacgaacgtactgttcgttcttctcgctgcggcgcatttcgatcagtttattttgctgccagaaggcattaaacattggcatagtgacgcgttgcgcacgggcacctttctgagcggcatcatagaaaaatttcagccacgccatttcatctttaccttcggtatagatctcttttccgcctggtttcagtaattccgcaagttcggcaaacacgtcaaaatcgtttcgcgcttcaaattgcggagcgacagcctgcttcatcggtacaatatgctggttgctgtaatcaccggtcatcgtcaagtcattgcgctcaaacgatgtggtgatcggtaatacgatatctgcatgtttagcagctgcggtccagtagcattcagaaacgacgatcatctccggtttctgccatgctttgatcagacgattagtatcctggtgatgggtaaagttaccgccacccgcccaccagatcattttgatattcggatacgtttgttctttaccgttatgctgatatttgccgccaggattttccagcgcatcgacgatacgggcaacaggaatcgccgtcattccgccatcatcagcggcctcgctggcctgtccggcaatcgccgcagacatttccggcagcacgccgccaacacgcgtcgggttgccaccgttggagtaatgataagagaaaccaaaaccgccgcccggtgtaccaatctgccctaacatcgccgccagcgtcaccagcatccagtgtttctgttcaccatattgctggcgctgaattccccagcctgccatcagcattgtgcgattcgccgccatcagttcagcgagtttgactatctgcgcttccggtacgccagtaatttccgccncccaggccgcgctcttcggagtattatcgctcttacctgtcagatactcttcaaactgcggatacccggtggtgtatttttcaaggaacactttatcgtgtttgccttgtgtcatcagggtatgcgcaatccctaacatcagtgccacgtcggtgcccatattcggcgcgatccaggtggcattatcgccaaagaactcgatggtttcagagcggataggatcaatggcaatcactggtttgccagattttttcagctgatggaagtattccagcccttgctcatcggtactgctccaggcaatttttaaggtattcagcgggttcattccccacagcaccacaacctggctgttttccagaatcagcggccaggaggtctgctgttcatacacctctacagaaccgaccacatgcggcatgatcacctgtgctgccccggttgaataatcgccgctatgcccggaataaccgcccgccaggttcatataacgttgcagtaaggtttgcgctttatgcaacacgccagaagagcgccagccgtaagatccggcaaaaatggccgatggtccgttagctttacgaatacgctcatgttgctcatgaatcagttttaatgcctgttcccagctcacctgtacataggtatcttcgccacgacctttcgccggttgcagtggattgtcgagatagctttttctcaccatcggatgctgaatacgcgccgtggtgtgtacctgatccgccgccgtagactgtaaggagttcggtatggttttcgccagcgcgcctgtcgaagaaacaatcttgccgtccttcacttctacgttcatcgctccccaacgtcccgcggtgaggattttaccgcccttctcttctgcccatgcgggtagcggtgctgccgatgtcaccaccagcgctccagcggcaataccgctgtgtttaataaattcacgtcttgttaatgtcataacttcctccctgatcaacgaggatcactgtttctcggtaatatctttggcgttgtactggaaataccgcgttaaaatgtccagttcgttttcgctcatgctggttcgtgcccccattcctttggcaatggacggccacgcattgacggtgtaatggtcggcggcaataggggcatgacaaccagcgcaataggtatcgtcaagtttttcagcgtattgccatagcagtttacggtccgctaatgcgggatcggtaagcgcaccctgtaaagacgcctgacgccattgattgccgtattcgtcagcctgccattccccgtttaccgtgagcgccttgataccttcttcacttaatgtggctagcgccagccgttgacctgccgccaggtagagcgtgttttcactgccctgcatttgataaccctgcaacagaacgatcggctgtttgccactggcatcaacgacggtgagatcggtaccaggattcacggtagccagctcgcctatgcgagaagttttgaaaggataaatatgtgcgccattagtcactgaagtagcggcctgactttccagctcatgcgccgcgttgtcatccatttttatttctggcggaaaatgggcaatgcctttatgacaatcgatacaggtttcgccgcccttttgtgctttgttatgcattttctgcgcagattcactttgcgaggcaatatccatggcatcaaaagaatggcaactacggcacgttgcagagtcagttgcttttaattctttccatactgtttcggccatttcctggcgatgagcttcgaacttatcgtcactgtctattttgccgctaacaaattcatgataaatatctttagatgcttttaatttagcgaataaataatccatccctgactttggaatatggcaatcggcacattccgcacgtatccctttctggttcgaaaagtggacagttccctgatattcctcaaaaggtttactcatcgagtggcaggaaaggcaaaatgctgtatccgacgttttatgtaaggctttttgcgccagcaagaacccgccaccaccaaccacaaccgctatcagcaaaaacaataacccaatgcgttttttccctcgcatagattcctctaattaaattccagaacaccgaaatcattgtataaataaatatacaacgaattgactacttgcttaattcggcacaacactgcctgaaataatcgctaaagaatatgatttattacaatgtaatcattaattgctaaggaataatccagttgttatttagaatatatatttgtcagttttagcaatttaaatcacataattaatg

SEQ ID NO: 888 - DNA, 22 bp, Escherichia coli
  Strain O55:H7
  modified_base (2)..(2): a, c, g or t
cntgtcacccgctcaacagatc

SEQ ID NO: 889 - DNA, 1712 bp, Escherichia coli
  Strain O55:H7
taatcgttcattttttatactattcagggataaaaaaaggcccctgttgaaattgcaggggcctggtacgagcaagcatcatattgggcgacatgatgcaacggtaaaaatcatttggcctgatggcgttcaatgattcctttcatttcagcaaccgccgccccgtctacgacataacgcgaatactcgtccgcgtgtgcatctgatgacatggacaatccttgattacgataacgcatcggtgaggcttgccacgctcccgcggagctatggacttccagcactccggcatcgaggaagtggtgcaggttttctgcacggactcctgctccggccataatgattggagcatcacgatgggcaataagttccataatttttgataaaccttgcagtgcgtctgatttttgccctgatgtcagtacccgggcaatgcccaattccgcaagattattgagtgtatttagagggttagcgcacatatcaaaggcgcgatgaaaagtcactgccagcggaccggcagcagccattattttttccattcgtgacatatcgacattaccgtcaacatcgagcacgcccgtcaccagtccaggaaaacctaattcgcggaccgtgcgcacatcctcaagaatggcggcaaactcaccgtcgctgtagcaaaaatcaccaccgcgtgggcgaattatcggatgcacagggatcgtcacccgctggcgcacggatttcagtacacccaacgacggcgttaagcccccctcttttggggctgcgcataattcaactctgtctgcgccgttttgctgcgccgttagcgcgcattccatgctgtaacagcaaatttccagtaatgccatttttgctccttaattacgccgactgctcgctggcaacaatctcttcaatggaccacggatgaaatttaatggtcgttttgccatcggtgaccgccagcgtcggattcggtaatcgttcatgctcaccttttggcgaactggttttaactgagatccccggtaggctgagtccttcatcagaaagcaatgccagcgcacgggcattcagcgtttctggatcacccggcaaaacgatttcaatatgttcccaaccttcgtgcgggtaacgtttttccccaggccacggtagctccacaatagaaaactgccagtgtgcaacctgtaccggttcatgcaatttaaacagacaaatcggtctgccattgatcatattttctgacaaaagctcgccacactgttcaaacccgcgacgccagcgctcagcagtggcgttttgatggcaacgcaaagaaatgtgatcggcagtcagcggagtgatattcaaccccagacggcgggaaagttcatctaatgcgtgggtaaatcgcggtaaatccgatgcaatatcctgcagctcgtcgatagattgccagttcgccataatcactcttcgtctttcagtaaaagcgttaatttaccctgttgccctgcgccaaccaaccgctgatttcacgccgcttctgatgcaatagtgaaaacggcaatacgccacgcgcacgttgctgacgaaaacagccatttgcagtatactcccgccctaatttctttaactggtgcgggcaatttttgctcgcttcatcaatgtaaggtattccggtgaatattcaggctcttctctcagaaaaagtccgtcaggccatgattgcggcaggcgcg

SEQ ID NO: 890 - DNA, 4139 bp, Escherichia coli
  Strain O55:H7
  modified_base (846)..(846): a, c, g or t
  modified_base (1078)..(1081): a, c, g or t
  modified_base (1444)..(1444): a, c, g or t
  modified_base (4137)..(4137): a, c, g or t
tgcgaaccgcaggttcgtcagtcagcaaaagttcagttcggcgactatcaggctaacggcatgatggcagttgctaaaaaactgggtatggcaccgcgacaattagcagagcaggtgctgactcatctggatcttaacggtatcgccagcaaagttgagatcgccggtccaggctttatcaacattttccttgatccggcattcctggctgaacatgttcagcaggcgctggcgtccgatcgtctcggtgttgctacgccagaaaaacagaccattgtggttgactactctgcgccaaacgtggcgaaagagatgcacgtcggtcacctgcgctctaccattattggtgacgcagcagtgcgtactctggagttcctcggtcacaaagtgattcgcgcaaaccacgtcggcgactggggcactcagttcggtatgctgattgcatggctggaaaagcagcagcaggaaaacgccggtgaaatggagctggctgaccttgaaggtttctaccgcgatgcgaaaaagcattacgacgaagatgaagagtttgccgagcgtgcacgtaactacgtggtaaaactgcaaagcggtgacgaatatttccgcgagatgtggcgcaaactggtcgacatcaccatgacgcagaaccagatcacttacgatcgtctcaacgtgacgctgacccgtgatgacgtgatgggcgaaagcctctacaacccaatgctgccaggaattgtggcggatctcaaagccaaaggtctggcagtagaaagcgaaggggcgaccgtcgtattccttgatgagtttaaaaacaaggaaggcgaaccgatgggcgtgatcattcanaagaaagatggcggctatctctacaccaccactgatatcgcctgtgcgaaatatcgttatgaaacactgcatgccgatcgcgtgctgtattacatcgactcccgtcagcatcaacacctgatgcaggcatgggctatcgtccgtaaagcaggctatgtaccggaatccgtaccgctggaacaccacatgttcggcatgatgctgggtaaagacggcaaaccgttcaaaaccnnnncgggtggtacagtgaaactggccgatctgctggatgaagccctggaacgtgcacgccgtctggtggcagaaaagaacccggatatgccagccgacgagctggaaaaactggctaacgcggttggtattggtgcggtgaaatatgcggatctctccaaaaaccgcaccacggactacatcttcgactgggacaacatgctggcgtttgagggtaataccgcgccatacatgcagtatgcatacacgcgtgtattgtccgtgttccgtaaagcagaaattgacgaagagcaactggctgcagctccggttatcatccgtgaagatcgtgaagcgcaactggcagctcgcctgctgcagtttgaanaaaccctcaccgtggttgcccgtgaaggcacgccgcatgtaatgtgtgcttacctgtacgatctggccggtctgttctctggcttctacgagcactgcccgatcctcagcgcagaaaacgaagaagtgcgtaacagccgtctgaaactggcacaactgacagcgaagacgctgaagctgggtctggatacgctgggtattgagactgtagagcgtatgtaatcgatttttcgtgagagtgaagcctgatcaggtttagccgatcaggcttttttattaccatctaaatgtattctgaaaataggcatgccattgttttctcgctgttgagtaagaggccagaagcgtaatatccagctccagggaaacggtaacggttcaatttaaggaataccgcagtgtttaaatttcttgtattaacattaggcattatctcttgccaggtttacgcagaagatacgcttatagtaaatgatcatgacatttcagccatcaaagattgttggcaaaaaaattcaggtgatgatactgacattaacgtgatcaaatcatgtctgcgacaagaatacaatctcgtcgatgcgcaattaaataaagcttatggtgaagcttatcgttatatagaacaagtgccacgcacaggtgcaaaaaaacctgatactgaacaacttaacttgcttaaaaaatcacaacgagcctgactggattttagggacaaagaatgtgaattaatcctttcaaatgaggacgttcaggatttaagtaacccttattctgaatcagaatggctatcatgtatgatcatacagaccaatacgcgaactcgccagttgcagctataccgtaactctgaagatttttatccaagccctttgacaagaggataattcacatatttttggcatgttttgttgcaagctattcctgataaatgattgcaacaaaacatccagcctttttcactgagttattaaacatactcgcgagcgcgtaatttttttgtccttcagcgataattcacaatcacttcattacgttgtactttcagcgacggaattaaccgcccaccgccaggcacttcccagataaagcgcaacggttctgctgccgctataccggaaaaggccacggtggttccgctctgcccatctaattcgacacaacgagattgcgaacacaagcgaacccgcagtcctgcaggtgtcgggccgataagctgataccgccacgccaccagcgtcatcaatcctgaagcaggttgtcgcgtagaaagaggtgcagacgacatcgactcaccgcgatgatttagcgtaattccgacactacttgcctgccacatcccctccccggcggcttgcaccagcagcggaaacaataatattgctaataaggttctcatcatttaccgccaattgtcgccgtcatgcggatatgtcggttatcagacagttccagattcgacagcaccactaactgcggcaagctgcggcgcagaaagcgagacaataatggtcgcagcgcgtggttcaccaataaaactggcggcgcacccaacatctcctgacgggatagcgcttcctgagtttgcgccagtaaacgatccgccagccctggctccagtccgcccccgccctgcaacgcctgtagcaacaaacgttccagcggtgtatcgaggccaataacatggacttcatctttgccaggaaaccactgctgggtaatcgcccgtcccaacgccacgcgcacgacggcggttaattcatgtggatcgctttggatgggcgcatgttccgccagcgtttcgagaatagtgcgcatatcgcgaatcggtactttttcatcgaggagattttgcagcactttatgcagtgtggtgagcgtgacgacgccagggacgagatcttccgtcagctttggcatctcctgggcgacgcgatccagcagctgttgcgcctcctgacgaccaaacagctctgcggcatgctggctaatgaggtggttaagatgcgttgctaccaccgtgctggcctcaaccactgtgtacccctgaatctgcgcctgttcttttagcgcactttcaatccagatagcattcaggccaaatgccggatcgacggtcgcctcaccaggtaacgtcccggcagcggttccagggttaatagccagccagcgccccggataagcatcaccactgcctatctccacgcctttcatcaaaatgcgatagcgggcaggttgcagatccatattgtcgcgaatgtgcaccactggcggcagaaatcccatctcctgggcaaatttcttgcggatactgcgtatacggcccaacaactcaccatcctgctggaaatcgaccatcgggatcagtcgataacccacttccattcccagagaatcttccagttgtacatcgttccacgtcgcttcgacaacggcattattctctgccatttttaccggttttggttcggcaggcgctttttgttcgcgtccacggatccaccaggccagccccagcaatccggcagtgaacagcaaaaataccaggttcggcattccaggcaccaggccgagtaaaccgagcacggcagcgcttaacaacataacgcttgggttactgaaaagctgattcaccatctgctcgccaacatcctgatcggtgctgacacgcgtaacaatgacccccgcggcggnag

SEQ ID NO: 891 - DNA, 20345 bp, Escherichia coli
  Strain O55:H7
  modified_base (5)..(6): a, c, g or t
  modified_base (1003)..(1003): a, c, g or t
  modified_base (1582)..(1582): a, c, g or t
  modified_base (1634)..(1634): a, c, g or t
  modified_base (2009)..(2009): a, c, g or t
  modified_base (3082)..(3082): a, c, g or t
  modified_base (4180)..(4180): a, c, g or t
  modified_base (5898)..(5901): a, c, g or t
  modified_base (5903)..(5903): a, c, g or t
  modified_base (7381)..(7381): a, c, g or t
  modified_base (8598)..(8598): a, c, g or t
  modified_base (8600)..(8600): a, c, g or t
  modified_base (9401)..(9401): a, c, g or t
  modified_base (11955)..(11955): a, c, g or t
  modified_base (12932)..(12932): a, c, g or t
  modified_base (15410)..(15410): a, c, g or t
  modified_base (16363)..(16363): a, c, g or t
  modified_base (18226)..(18226): a, c, g or t
  modified_base (20185)..(20185): a, c, g or t
  modified_base (20205)..(20205): a, c, g or t
  modified_base (20343)..(20344): a, c, g or t
ccagnnccgggatttgtgccaccagaccgtcaccaatggtcaagagcgtataactttccgccgcgtgtcccatgctcatgccatgttgcagcacgccgaccagcaacccgccgacaacgttaatgaccatgatgaggatcccggcgatggcatcgccgcgaacaaacttacttgccccgtccattgagccgtaaaaatcggcttcctgagtgacttcggagcggcgttttttcgcctcatcttcaccaatcaatccggcgttaaggtcggcgtcaatcgccatctgcttacccggcataccatcgagaacaaagcgcgcacccacttctgcgatacgcccggcacctttggtaatgaccataaagttgatgatcacgagaatgacaaacaccacgataccgatagcgaaattgccaccaacgaggaagtgaccgaacgcttcaaccaccttccctgccgccgctgcgccggtatgcccttccattaaaatgatacgggttgaagccacgttaagtgccagacgcaacagcgtggtaaacaacaaaatggtcggaaacgcagcaaactcaagcgtgcgctgggtaaacatcgccaccagcaacaccatgatcgacaaggcaatattgaaggtaaacaacaggtcgagtatgaatgcgggcagtggcagcaccatcatcgacaagatcaacaggatcaaaatcggtccggcaaggatctgccattgtgtcgatttcaggtttgtgggcaggcgcagcatcgcggccagattactcatgggtcggtttctcgttaataaaatccagggcttccggcaccggaagatgagtaggttgtacagggcgctgtccaccagccagacgccagcgtttcagttgccagacccaggccagcacttccgccaccgcggcgtacagttgacccgggatttgttgaccaatctccgcatgtcgatacagcgctcgcgccagcggcggcgcttcaagcgtcgggacgttattttcancgccaatttcacgaatgcgcagcgcgaccagccctgcacctttagcgaccactttcggtgcgctcattttgttttcgtcatactgcaacgctaccgaatagtgggtcgggttattgacaatgacatccgctttcggcacatcggccatcatccgacgccgtgcggcagctcgctgcatctgacggatccgccctttaacatgggggtcgccttcgctttgtttgaactcatcacgaatatcctgccgcgacattcgcagctttttcaggtggctgaagatttggaaaaagacgtcaaatcccaccattggaatgacaccaagcaccaccagcagtgcgcatagccctaccaaatccatcgcattacccatggcggtaatcggagactcggccattaagcgcatcatatgcggccagtgatgccagagaaaaaaccccgtcacgctgccaaccaggatggttttcaaaattgctttaagcaactccgcgccagtctgtgccgagaacatccgttttatgcccggtagcgggttgagtttggaaaacttcggctgcaaggattttccgctaaataccagcncccccagcataaccggagaaatgagcgccaccagcaccacgccgctaatcancggtagcagcgccagcatggcttctctgatcagcagaataatttgcccgaggatcagattagggtctttgataatactgtgatcaaaatgcagcccagcggagagcatgcccgacaatcgacgggccagcgacacaccgccaaaccagataacactaacgcccaccagcaaaatcagcagtgaggtcagttcacgggaacgcgggatttgcccctcttcccgcgctttttctagtcggtgaggtgtgggggcttctgttttgtcgtcgctctcgtcagacacgtcgccaatcctggaaagagtattaagcgtaaatgatgccagagcgcaaagcgttcaatggtttgagtaaggggcaaaacaggcgggatttanggcttttgctgccacacatcaagcatagtgtgcgtttgtcggatgcggcgtcatcgccttatcagaccgcctgatatgacgtggtcacgccacatcaggcaatacaaatcaaaatccaagactatccaacaaatcgtccacctgatcctgactggctaccacaccggctttgctggtatcgacctgaggtccattaagcaaactctggttttcacgttttggacgcgactcctgttccgggatgttttccaacagcaccatcagcaactggcgttcgatctcctgaatgacatccatcatccgcttaatgacctgcccggtgagatcctgaaaatcctgcgccatcatgatttccagcagttgcgcgttagtaaagctggtatgcgcgggtacatctgccagaaatttccgcgtatctgttaccagttcacgggcgtcggcaaggtcaatcggatcggcaaaccagtcatcccaacgttgggttaacgcttttgctgatttctccatttgatcctgatgcggttgtgacgcctcaacactgttcagcgcccgctccgcagcctgggcggtcatctgcacaacatagtacaaacgatcgcgcgcatcggggatggcttccgccgcttcggcaatggcctgatccagtcccagttcccgcaaactgtcgcgcagcatacgcgtcaggctgccgatgcgcgcaatgatatcgccagctgaatgctcgtcagcaggtttgattgatggttgcatcatagtcgcatcctcacatgcccagtttctcaaagattttgttgagtttttcctccagcgtcgcggcggtaaatggcttcaccacatagccactggcccccgcttgcgccgcagcaatgatgttctctttcttcgcttctgcagtcaccattaacactggcaatgccgacatcgcgccatccgcacgaatcgttttcagcaattccaggccatccatgttgggcatgttccagtcggagataacaaatccataaccgcctgcctgcaacttattgagagcgtcgacgccatcttccgcttcctcaacattattgaatcccagntctttcagcaggttacgcactatgcgtcgcatggtggaaaagtcatccacaaccaaaaatttaagttctttatccgccatttcacactcctgatttaaatacgtatcgcctgtccggcactaatttttgccaacatttgctggcttacctggttaagatcgaccacttcgcagacaccacccatattgatggcctcgcgcggcatgccgaacaccacgcaacttgcttcgttttgcgcaagggtccatgccccagcctgacgcatcgccaacattcccgccgcgccgtcgttgcccataccggtcaggatcaccccaaccgcattacgccccgcctgtttggcgacagaatggaacaacacatctaccgaaggccgatgacggttaaccgccgggccatcgtgaattttgatttggtaatttgcgccactacgcgccagctccatatgccgatcgcccggcgcaatataggcatgccccggcaaaacacgttccccgtcttcggcttctttaaccccgatctggcaaagcttattaagtctgtcggcaaaagagcgggtgaaaccgggcggcatatgctgggtaattaacagtgccgggctggaaagcggcaacggttgcagtacgtgacgaattgcctcagttccacccgttgaagcaccaatcgcaatcagtttttcagaactcaacaacggccctgccttcagcgttgtcggtgccgacaatggcttatgtgctgcaaggctcgcctttgctgctgtacgcaccttttcagcaatcatttcgctgtacgccagcattccttcgcgaatacccagttgcggtttggtgacaaaatctattgcccccagctccagcgcgcgcagcgtgacttctgatcctttgccggtcagggaagaaaccatcacaacgggcattggacgcaaacgcattaatttttcgaggaaatccagtccgtccatccgcggcatttcaacatccagcgtcagcacatcgggattgaatttcttaatcaagtcacgcgcgaccagcggatcaggcgcggtcgccaccatttccatgtcgctatggctgttgatgatttctgtcatgatctggngcatcagtgccgaatcatcgacagataacaccctgattttgctcatcgttaatccttacttagcgcatacaccgtttgaccacgcagcgtgaagcggcgctcgaggtggctaaagttttcagagtgacccgcaaacagcaatccgtcgggtttaaggagcggaacaaagcggcgcaaaatctcctgctgggtagtttgatcgaagtagatcatgacgttacgacagaagatcgcatcaaacggccccggcacggtgtactgtttcgccaatagattcagcgaggcaaaatcaacatagttcgccagctcctgacgcacgcgtaccagcccttcatgcggtcccgtccctcgcatgaaataccgttgcagttgctgcggcgtcaggtttttcaactcttcatggcgatagataccgcttctggctttttccagcacttcggtgtcgatatcactggcaaacactttccagcgtccgggcgcggtgcccaatgtgtcagccagcgtcatcgcaatgctgtacggctcttcgccggtcgaagccgccgcgctccatacgcgatactcgccagaacggcgacgtgcgtgatccgcgagcagagggaaatgatgtgcctcacggaaaaatgccgtcagattcgtggtcagcgaattgataaacgcctgccactcaccgctgtgctgattagattccagcaagttcagataatgaccgaaatccgtcagtcccagcgaacgcaaacgacgaaccagtcggttgtaaaccatgtcgcgtttatggtcagccagaacgatcccggctcgttgatagatcaattgacttatccgccgaaaatgcgcgtcggaaagcgccaggcgctcggtcatctgtaacaataaagacgtttgcccacagggcagagatgaagtcatagcgccttctcaatcacttcaggataccactggcgcaatttgtaactgcgccgactcatgtcgtgctacttcatgttcttcaagggtaaataccgccacacgcgacgaaagatggtcggcctgattcgccagttgttccgttgccaccgccgcttcttctaccagcgaggcgttctgctgtgtcacctgatccatctggctgacagcctgcgcaacctgctcaatcccccgccgttgttcttccgaggccgaagcaatttctcccataatgtcgttcacgcgggtcaccgaactgacaatatcggtcatggtcgcggcggcgttattcaccagtttcgaaccctgctggacacgattgactgactcttcgatcagccctttgatctcttttgccgcctgggcgcttcggctggcaagattgcgcacttctcctgccactaccgcaaaaccacgcccctgctctccggcgcgagccgcttctactgccgcattcagggccagaatattggtctggaaagcaattccgtcgataacgctgataatgtcgccaattttttgcgagctggtggcgatctcctgcatggtgtgagtcatggtactgacctgaacaccgcccgcctgcgccgttgtcgcggcattttttgccagttccgacgcctgtcgtgcgttatcggcgttttgccctaccgtggcggttaattgctccatactggcggccgtttgtgccagcgatgccgcctgctgttcggtacgacttgagagatcgttattgcctgcgacaatctccgcgataccaatgtgcatctccnnnntncccttacgcacatcacttaccgtcccacgcaaagcctgctgcatggtcttcaggctggcaaaaatggcggtgatctcattacgaccatataccgcaatcggacgcgccagattacccgcagcaatgctgtcaaaatggctaccgataatggccagtggttgaacaatcatcttgcgcgtccaccacagcgcactgctgatgtagatcgccgcaacaataatcatgctgataaacaccagcgccgaaatctgatagttacgctggctttgcgcactggcggcttccagcacatggatgatctccagctgccaggcctcaaagttaacgtcaaacgcattctgtgatccctgcaccggcgcagtgaggaaatccgaaagttgattactttcaagccaggtcgcctgatgttcgagatcgttgtgccagcgggcaaaacttttctccgtctctttttgcaatgccctgacgtgctcgttgcccgcagtcatcgccataaaacttttaaacagcgtggtggattgcgtcagactggcacgcgccgtcgtcatcaacgttttaatgtcatccgccggatagctaagcgctgtcagagtgcctgctttgttcagcgtggtactggcctgtaacattaccgcccgagtttgcgctaatgccgcacgttgctgattgctctgctcgacctgattcagtcgttgcaaatcgtcgcgaaatgcccaaaaagacatgccgttactgccaatctgcaagatcccgcagagaatcaaaattaaaaacagcgtggtcgaaattcgaatacgattaaacatcaacgctccccatcaggcggcaatgaccgcgttagtaaatactcgtcaaaatgtttcccagtttggatcttgttcagcaattcgcagtcgtggctgtgccggtggttgctcactggcaggacgggatggtgtttgcggtttattggtgagtgggctggctgccagacgaaacgcggaaaccgcttgcgttaaacgactagcctgttcttccagcgcagctgcagcggcagctgattcctgcaccagcgatgcgttctgttgcgtgacgtgatccatttccgaaaccgccaatgcgacttgatcaatgccacggctctgttcatccgatgccgatgcaatctcgcccataatgtcagtcacgcgagtgacagcattgacgatattgttcattgtttccccggcgctttcgaccagcaccgaaccggtatcaacgcgcgagacggagtcttcaatgagagctttgatctcttttgccgcctgggcgctacgactggcaagattacgcacttcgcccgccaccacggcaaaaccacggccctgttcacccgctcgcgcggcttcaacagcggcattcagcgcgaggatattagtctggaaggcaataccgtcgattacgctgataatgtcggcgattttcttcgaactatcggcgatctcatgcatcgttttcantacgccatccaccactttgccgccgtgctgggcggtgtcggaggcactttgcgccagttgcgaggcctggcgggcgttatcggcgttttgcttcactgtcgcggtgagctgctccatgctggcggcagtttcttccagcgcggatgcctgctgttccgtacgggaggaaagatcggtgttgcccgccgcaatttcacgggtaccggcatagatggcatctgaaccttcgcggacatgagtgacggtgtcagtcaaagagcgttgcatatgtgaaacgctctgcgccaggtcgcccatttcactgcgcccgtcaatggtcagggtattcgccaggttaccaccggcgatttcgcgaatgtgagcaataatttttgccagcggtgtaagcaacatacggcgaatgccataccacgccaccagcagaatcaataccaccaccagcgcgataaccgccagttgccactgggcaaatcggtaatcatctgcgttgtcagtgacgatatcgcgatacagtttttcactgctgagggcgtactgagcaaacgcttcgcccattgcattttgcattccctgggttggctgagcgaaataagctccagtattgccataatcaagataatcaatcagttcagttaacgctgtgtaatagtttttatatttttcatcaatattacgactggtagcgaccatttcaggtaacggtgccatgcttttgaattttttataatgagtcgcggcctgggccaatgttttcctggcgctatcgagcaattcaactttggcattactttgttgattggaggaatccatcatcattcgcaccgctgaacgactcaggttaatgcgcgtttgcagcattaaattccaggttgacgtcagctcgccctgctgttctcgtaattgattggaaaccacaaagctcttctggctatggtgaagggaagaaaaaaacagactgccggaaataagctgtaacagtgcgaatacccccagcaccattaccaacagcgtgactacgcggatacggttaatcataaggcaccttcctgaaaacaagttgatctcgttatcggcaaggaagggggaaactttattgctgatgccacccgccgcgaaattgaaataaaacccgatgcgcagatcatcgggttcatttcaattgaggaaatcaggagaattacgccacttctgacgccgcgctatctaacagcgccatntnttcgctgttcagcagtttttcgatgttcaccagaatcaacatacggtcgcccagtgcgcccagtccagtgagatattctgttgaaagcgtcacggcaaactctggtgccggacgaatttgctccgccgtcaatgaaagcacgtctgaaacgccgtcaaccacgatgccgaccacccgctgtccgagattcaggacgataactaccgtgttgtcgttatagtccacatccacctggctgaacttaattcgtaagtcaacaatcggcacaataacgccgcgcagattcgtgacgcctttgataaacgctggcgtgttcgcaatccgtgttacctgatcgtagccacggatctcctgcactttcaggatatcaataccgtactcttcatcaccaagggtaaataccagaaattcctggcctgacggctcgctggccagctttgttacattcgtcataccggtcatattgttacctttttactcattcaggcggcggtgttcgccatacgttgttcgcggtttatcgcctgcaaggcggagacatcaacaatcagtgccacgctgccgtcgccaagaatggtcgcagcagaaatgccggggactttgcgatagttactttcaaggtttttaactacaacctgatgttgaccaattaattgatccaccagcaaggcgtagcggcgaccgccactttgtaagatcaccacaattccctgggtagcttcggttttcgcgcccgcgacgttgaacactttccacagttcgacgatgggcagatattcaccccgcacttccagcacccgntcgccgccggccagtggatgcagatcggcttcacggggttgcagtgattccataacagcattcagcggcagaatgaatacttcatccgcaacgcgtacggacatgccgtcgaggatggccagcgtcagcggcagtaaaatgcggatcgtagtgccagtaccctgcttcgactggatttcaacatgaccgcccatctcctggatattacgtttaacgacgtccatgccgacgccgcgcccggagacgtcggtgacctgctctgccgtggagaagcctggtgcaaatatcagcatcgcgacttcgtcgtcgctcatgttttcgctgacagtcaaaccttgcgaggccgcttttgccagaattcgctcacggtttagccccgccccatcgtcggtcacttcaatgcaaatgttgccgccctgatgttcggcagacagaattaaatttccgacgctgtttttacctgcggcgagccgtttttctggcagttcaataccgtgatcgaggctattgcgtaccaggtgggtcagcgggtcgataatgcgttctatcaggctcttgtcgagctcggtggaactgcccaccagcgtcagttctacctgcttgccgagttttcccgccagatcacgcaccagccggggatagcgactaaagacatattccatcggcatcatgcgaatcgacatcactgattcctgcaaatcacgggcgttacgttgtaactgccccatgctggtaatcaaatcaccatgattaaccgggtccagttcgctggaacgctgggcaagcatggactgggtgataaccagctcgccgacgaggttaattaattgatcaaccttttctaccgctacacggatgctggtggattcactgctacgcgtcgttttttcccgctccacgcgaccggttggcgcttgttcggctgccagtttaagcactggtggggtggatatttttggcgagacttctactgtttcaaaggtaatctgatcggcttcaatcacaaaacagagtaccgctgtgatgtcatcttcggcgatatcgcccggtaatattgccgagagagaatccgcccctttcaccacgtcagttaacgttgtcagatgccccagctcttcttccagcaggtcgacttcgctggccttcaggcgcgaaaggataattcgtcgcggcaactgactgcgactctgctcatcttgcggttcacttttggcaaccacacttaatcgggtcactgcggatggcgtttcgcctttcgcttctaatgccagttgacgcaaggcctggcagatataatcgaagctggcggcatccggctcttgcgactgtttataagcgtcgagctgttcttgcatgatgtccttcgtttccaaaaacagattgataatgtcggtgttgagttgcatctcacctcgtctggcttcatcgagcaggttttccatcagatgcgtggtttcctgcaaaacgctgaagccaaaagttcctgcccctcctttgatcgagtgggcagcccgaaagatggcattcaattgttcggcatctggcgcttccggctgcaaaaccagcagatgctgctccatatcagccaacagttcgtccgcttcatcaaaaaatgtctgataaaaatcgcttatatccatgctcacgctgtcacctcggttcggctgatggcattgtgggaacactgacctgtggtgcaacctcaggtttttccagggcgcttactggctcattctggctttcggcgttttcatgcaaaatggcctgttcggcttgtttgttcagtaccagcaggctgatgcgacggttgacggcatcatcaggtccgcgatcgcttaagcgcatcgttgccgccatgccgaccacacgtaacactttgccgctatccaaccctccgaccatcagttcgcggcgggatgcattggcccgatcggcagaaagctcccagttgctgtaacctttctcaccactggcgtaggggaaatcatcggtatgacccgaaaggctaatacggttgggaataccattcagaacgggcgcgatggcacgcagaatgtcgcgcatatagggttcgacgtcggcactgccagttctaaacatcgggcgattctggctatcgatgatctgaatacgtagaccttcctggaccagatcgattttgagatgtggacgtaacgcccgcagtttcggatcggactctatcaattggtcgagatcgccacgcaatttccgcaatcgactttgctccatgcgttttttcaactcttcgatgttcggctgcttattcacttccccctggctttgggtgtaatcatcgccaccgccgggaattgggctttcactattagaaatgcgatcgccgcccgtaaccgcagtcgccagtggagtccggaagtactccgcaatctgaatcaactcttttgggctggagatggagatcagccacatcaccagaaaaaaggccatcatcgcggtcataaagtcggcataagcaatcttccacgatccatgtgctgccccgtggcttttggctttgcgtcgtttgacgacaatnatcggatgcgcttgattcttcatgcttcctcggttgtcgtctgttgttgcggatttttcaccgcacgcacatgctcttccagttcaataaacgacggacgttcgctggaatagagcgttttgcgaccaaactcaacggcgataggcggtgcgtaaccgttcagattagaaagcagtgtgactttgacgcactgcatcattttgctggtttcggcgcttttctgacgtaaaacactcgctaatggggaaataaatccgtaagccaataaaatgccgaggaaagtccccaccatcgcatgtgcgataagcgcccccagctcggcggcaggacgatcggctgaacctaacgcgtgaacgacccccattacagccgcgacaataccaaacgccggaagtgagtccccgaccagcgccagactgttcgccgggacttctgcctcgctttcgtgcgtctcaatctcttcatccatcagggcttcgatttcgaaggtgttcatgtgaccgctgataatcaggcgcagataatcgacgataaaatcaagcatgacgctatccgcgatgatgcgtgggtagctggcgaagatctcgctctcacggggattttcaatatcacgttccagcgaaaacatccccatctgccgcgatttcgccatcaaccgataaagcagagccagcagatccatatacattgctttggtgtatttggagcgacgaaacagcaacggcagcgctttcagcgtgcctttaatcgcttttccattattgccgacaataaacgacccaattcctgcaccggcaataatcaccagttcagcgggttgatagagtgctccaaggcttccaccggtcatcaaataaccgccgaaaactgtaccgagaacaaccaggtaacctaataagataagcacgacatcatccttccactgttgaccatgacaggatgttcagtcgtcaggcgttaacgcgcgattggggcanaaaaaagcagcggtacgtcgttaccgctgctggaatgttgcgccacaccgtatcagttaaacagcctgtactctctgttcatccagcagttgtgggataatatcggcaggattctgggaaagtttacgtctttttactgcccgggatggcggttgacataagctgcaggcaaagctgccaacaggctggtgagcgtgggtaataaaattgccgccgcagcagttgcagctggaaagttgcagtaatccactttcaacaaaccgcaccaatgtccaggcacgggttaatgccagcagcggtccttcttctgcttgcgggcactgttcaaggtataaacggtaggctttgatcaccgcatcgacgccattacacaaaccggttttcagtaaaaactgccatgcattacagaacatcgaagcatgaacgttttgttcccaagtcataaaccagtcggttgagaatggcagcatgcctttcggcggtgggcttccgcgcagttctttataaagttttatcaggcgtccgcgacttaactgtgtttcgctttccagcatctgcaaacgagcgcccagggtgatcaattccattgccagctgaatatcccgcgcttcctgaacaatgcttttttcactcatgatcaggcccttttcttgcgcagcgcttcttcaggctgattaacatcattcagcaagcgtgttgagagcatgatgccggtatgaatttgctggagatcgtcaacgcgggaatcttgcgtcaactgagtaatcgtctggtggctgtcaaaacggaagtgacaaaccagctgattggtttctgccagcttaaccatttgcggaagagtcagtgccgctaatgttgtcgccatttcttcatttatgccgagacgaaacatagcggacgctttgtcctgaacaatcagacgctgtgcaagtagtaaatatgacaagttgatgtcataaatgtgtttcagcaactcggaggtatgcattattcccacccagaataaccaactttatttttatgcggtttcaccgcaccccgtgatgtcgccgggaagccccggtaaaaaataattagcattagaatagttgcgataagctgcaataagcagagccacctttttggtttaataagtccttacaaatagaagggggtctttacacttatctaagatttttcctaaatcgacgcaactgtactcgtcactacacgcacatacaacggaggggggctgcgattttcaataatgtgtgatgcagatcacacaaaacactcaattacttaacataaatgtataagtcatacttttgttttgggtgtatttcaatctgttaaaaagtttttcgctacgctagcaagcaaaaatgaaacaggaataatcgaaatgggatgttgcgcacagttaaaataactcaccgtaaagaatcatctgctataaataatcactttcatgcaataccagataagctatttttaaacagacacttaccgcacaacaaactaattaaatacaaagaaaggccacaatcaacttaatgttaataaaatgttttgcatacattaaccacttgtttaatgcggggaatcagtacattattttcttataattacagttgaaatcatatgatcaccgagagtgattgattaattgtctttactaataatcagactaatatttacctgtttgactgagttgggattgcgtcgtttctccattaggagtaaagctttaatgtcacctgaagttcacagaataaggaacaggttatgagctatagcaatattcttgtcgctgttgcggttacaccggaaagtcagcaactgctggcaaaagcggtatctatcgccaggccagtaaagggacacatcagtttaattactctcgcttccgacccggaaatgtacaatcaattagctgcgccgatgcttgaagatttacgcagcgtgatgcaggaagaaacgcaaagctttcttgataagttaattcaggatgcggggtatcccgttgacaagacgtttattgcctacggtgagttaagcgaacatattctggaagtttgtcgcaaatatcatttcgatttggtgatttgcggtaatcacaatcacagtttcttttcgcgagcatcctgctcggcgaaaagagtgattgcctcaagtgaggtcgatgtgctgttagttccacttacgggagattaaccgctcctacgcaagcttaggaaaggtagcaactttatcgcgctgctggctttccgcgcttcgcggaactatctgctttaggtcgctaatgaagcactcctgccagtggttaatatcgtttttcacgataacgtccagcatttctgcatgacgggaaatacgttccgccagcgacatagtcaatgcacgatccagcgcagctgcaacttcgtcacgatcgtagggattaacaattaacgccgacgttaactcgtttgccgctcccgcaaattgcgaaagaanaagaacgcccgggttggctgggtcctgagcggcaacatactcttttgctaccaggttcatcccgtcacgcagtggcgtcactaagcccacgtcagagtagcggaatattttcatcagtaatttacggtcaaaatgctgattcaaataataaagcggcgtccagcctaattgcccgtatttaccattaattcgtccggcttcattttcgagctgatgacgaatatcctgataggcttgcacatcaccacgcgacgttggtgcaatctgggtataacgaattttaccatgatgctgcggatatttttccagcaacgcttcataggcgagaaaacgctctggcaaacctttggaataatccagccgttcgacagaaaagatattttgtacgtttttcagttccgctttaagttgcgccagttttggcggcagtggcccggcagcctgtttggctatttcttttggctcaatgccaatcgggtaaacttctgttcgaaacgctttgccccaggctgtatggctttttgcgctacgtgtcgtgacgcgggtcaggttagaaaggcaatccaggaacgccagacgatcgttttctgtctggaaacccagcaaatcataatcacaaagctgttcaagcaaggtgtcatatgtcggcagcgcgttgaagatttccggtgtcgggaaaggaatatgcagaaagaaaccaatgcgattattcactccccgtttgcgtaattcatgcgcaaatggcaacaggtgataatcgtggatccagataatgtcatcgtcttgcaacagcggcagtaatttatctgccagcaacgcatttacgcgtagatagccgtcccaggcaggacgctgaaattgcaccagatcgaggcgataatgaaaagcaggccagagaacggcattggagaattggttgtagtattcgtcaaggtcctgttcgctgaggttanaaaaggcccacgtaatgttaccctttttcaccttttttagcggctgatcctcattccctgtttcaccactccagccaaaccacagtccgcctgcggctttcagtgcccccagtatgccaacggcaaggccaccggcactggcggcgtgctcatctggtggtgcaatccggttagatactacgactaaacgactcatagtcatcactcctgttattttctcttttttgttgtaatgcggtggttatcatttcaagccagctccagacatccggtacgcccgccagtcgccatgatgcctgagttgcgcctgtgccaatttttactgacattccgcccagtcggttaacgactgcgaagccagattcatcggttaaatcatcgcccagaaatacgggcgttcgcccgataaagggagcttcctgcataaaggcagcaatcgcctcacctttactggtacctctcggtttgatctcgacaacacactttccctgctgtaacgccatttgtggccagatctgagtaatacgttgcgctaatgtcattaatgcgtcttcatgctgcggagcctgacgataatgcagcgcaaaagccatccctttcgtctccagctccgcaccgggatactgggcgatgaccgtatgcagttgcacgttaatatcacgtgcaatcgcatccggcagatgaacgatatgcgttttaccattgatgtcacggcgctccgccccatgcacgcccgctaacgggaagcgataaggttttgccagtgcgtccagctccaccattgagcgccctgatatcaatgccaatgcaccatcacttgcggttgccagtagctgaagtccttgcagaatattgtcaggtacgacgacctgatcgggatgcggtttgatttccgccagcgttccatcgagatcaaaaaaccaggcatatttcgcggatagttcaggggtttcggttaacggttctgtcacccggttctcctccttctcttttcttattgtgttgcgcagaacgcgctttacagacatgtaagtatagacagtgtgacgggggtcgccatttgcaacgaagaacagccaaccgttgtggcggctggctgtggtgggaaaaaacgttaaattgttgtggaaaaaagcatcagacagtgcgtttcgctttttgcttgtaacggtcgaagatcaccgctgccagcaggattaagccgcgaaccacgtactgcgcgaaaggagaaatattaagcaggttcatggcgttttccacggtgcctaaaattaagatacccgccaccacatatgagatttttccgatgccacctttcagagaaacgccacctaaaacgcaggcggagataacaataagctcataaccaatcgacgtcattggctgcccactggtcatacgtgaagccagaataattccggctatcgcagataccaggccagagagaacaaagataataattttggtgcgaacaaccggtacacccgccagacgcgcagcctcttcgttcccgccaatcgccagggtattacgaccaaaggtagttttattcagcagcaaaccaaagataatcagacacgcgacggtgagccagattggcgcaggcagaccgaaccagttggcgtaaccaagggcaaagaagctttcatcttcgataccgaccgctttaccgtcggaaatgatgtacgccagacctcgaacaatctgcatcgttgccagtgtcgtgatcagagcatttattttcagtttggcgataacaaagccattgaccaggccacagagaatgccaagcagcaaccccgctgccacgccaatccacaggctttcagtcaggttgataaccaccgccgtggtgacacccgnacaggcaattacggaggcgacagaaaggtcaaagtcaccggaagcaaggcagaacaacatgccacacgccaccatccccgacatggaaattgccaggcccaaccctttcatattaataaaggtggcaaagttcgggacaaaaatggcacaggcgataaaaagcaccgcaaacaccaccagcatgccgtactgatcccagatacgcccgaagctgaatgacgacttaggtgcgccagaacccgatgtagaaacagaagacatcatactctccttactcaggcaactgcctggctgactttaggcatcgcaaggctcagtgcctgacgctcatctgcctgctcgtgtaacaattcaccggcgatttcaccttcgcgcatcaccacaatccggtcggcaacgccgaggacttcaggtaagtcgctggaggcaaacagcaccgccacaccctgcgccgccagcgcataaatcacgttatatatttcgtgcttagcaccaacatcaatgccgcgcgtaggttcatccagcaaaatgaccttcatctcttccgataaccagcggcccagaatggctttttgctgatttccacctgagagattcataatcagttgctcagcgcccggcgttttgatgttgagcgaacgaatgtggtgatcggcattgttttcttcccaaccgttgttgattacacaaccgccgagcacatgtttacgtctggcactgatgttgatattgtcgcgaacggagtgcacaggaataatgccttccgctttgcgatcttccgggcagagcatcatgcctgcggcaatggcgtggctcggtttacgaatatcgatcggctgttggtcgatataaacctgaccggcggtgatttgcgtcccgccaaacatgcctttcattaattcgctacgccccgcccctaccagaccaaacagcccaacaatttcaccactgcgaaccgccagacttattggcgtacgcacgcctggtgctttcacagcatcaagacgcaggcgctcctcgccataactacgcggttgccagccgtagatatcgccaatgtcgcgcccgaccatcgcctgcaccagcgcgtcgtggtcaacctgctgcatatcggtaaaggttttgacataacgtccatctttaaagacagtgatggcatcgctgagggcaaatatttcttccatacggtgagaaacgtataagatcacccgcccctcttttcgcagttcacgaataacgcggaaaagattgtcgatttcgcgggcagaaagggagctggttggctcatcaaaggcgataattttagcgttacgcgccagcgccttggcgatttcaaccatctgccactgaccaatggagagatatttcagcggcgtgtccgggtcaatatccataccaagatgtttaagttgtaaacccgcctcataattcagcaatgagcgattcacaatgccgcctttatgcggcagctggccgagatagatgttttccgcgacggtcatttccggcacgagatgcagttcctggtaaataatcgccacacccgcgttaagtgctgcggtcgtgtcggaaaaggacatttcctgcccattaatcactacagaacccgtggttggcgcatagttgccgctgaggatttttaagagagttgattttcctgcgccattttcacccatcaacgcatgaacctgaccggcatagcagtcaaaactaatatccgtcagcgccttaacgccgggaaacgttttaccgatgccgcgaaatgagagatacggggtagactgttgcataacgtctccgtgaatcactggtcgttcacaccccctctgcatcatgcagaggggaatttttccggcaaattacttaccgcctaaaccttttttctccagttcttctttaaagttgtcacgcgtgatcagcaccacgtcggtaacttcggtgaatttggtcggttcaacnccttttgctacccagttgtnaagcatttcgctggacttataaccatgtacgtccgggcttggcaacagggaaccgtagaagccggttgcctgtgccttagacagttcgctcaccgcatccacaccgttaataccgataccgatgatatcggccgcttnna

SEQ ID NO: 892 - DNA, 9263 bp, Escherichia coli
  Strain O55:H7
  modified_base (749)..(752): a, c, g or t
  modified_base (3246)..(3249): a, c, g or t
  modified_base (4740)..(4740): a, c, g or t
cttccgtcgcgcgtacgccgcccagcacggtgctgtcgttcataccgacgatcagccaatgtttaacttccggatgttgaaccagcattgagttggcagcgtcaaatgccccggggatgtcgttagatttggtaggtacctgataaatttgtttttccgggaatcctgcagctttcagcgcatccatagaacccgtagtacggcgacgagccgtatccagttcgttggaggtaatcgccatcaccgcgctttctttgacatcccagccacgtttctgcatctctttatacagttcctggccctgacgttcgccaattttggtcgccgccatcatcaccagaggaacggtatccattggcttacctttggcgttaacaaactggtcatccacggcaatgactttcatatcgtagccacgcgctttcgccacgatggcagagccgagtttcgggtccggagtacaaataacgaaaccttttgcgccactggcggccaggctatcgatcgcgttcaatgttttttcgccatccggcacggcaatcttaataacctcaaaccctaaatccttcccggctttatcggcaaacttccattcggtctggaaccacggctcttccggttgcttcaccaggaaaccgagcttcaggttctccgccatagcggattgtgacataacggctgccagaccaatggctgccagggctttagtaaatttgtgcatggttctctccagctttagtgtcgttttnnnnagggcaaaaacgaatgacattcgttaaattaatcggaaaacaaagcattaccttttaactaaaagataagtgactgtgttgacatagttttagcgagaaattaattctccataggagagcaatatcacatcgcagaattacagtgagaacgtgcataaatttagcgggaaaagacataaggaaaagccaatttgtcagacaaattgttgaatgcacagcagattaatccataagattagcctggaaatccttgttgtctttggtacccatgcgggatgtcttctttttcaccagtcaataggccgcattacctggcgttgagtttttgaaatggtgtaataaccgcaactcaaagatgtggaaaatgcacgtcattcatttcgtcattaattatcactgtgctcattaattaacagaacacgtataatgagagccatctcgcaaaaatgaaaaaacgttttataaaatcatcacttcatcatgaattcaaattcattgattaatatcaacaagatacaaaaagcactatcattaaaattcattgcagttacattgatttcatcaatgaaatgtaaaaatatataaacttgatgatttaagcattttcttatacccgttcagacgttattcttatttcagatcatcgtcagaattgactccacgatcacatttcggaccggcagaaaggaattattctgcaaacagtaattatggtgttttgatttatcttgcacctctccacttctggatataaggatattaggtatggcaaccgctggaatgcttctcaaactcaactctcaaatgaaccgcgagttttacgcatccaatctctaccttcacctgagtaactggtgttctgaacagagtctgaacggcaccgccactttccttcgcgcccaggcacagagtaatgtgacccaaatgatgcgcatgtttaactttatgaagagtgtcggcgctacccccatcgttaaagccattgatgttcccggtgaaaaactgaactctctggaagaactgttccaaaaaacgatggaagaatacgagcaacgttctagtacgttggcacagttagccgatgaagcgaaagaactgaatgatgattcaaccgtcaatttcctgcgcgatctggaaaaagaacagcagcatgatggcctgttgctgcaaaccattcttgatgaagtgcgcagtgcgaaacttgcgggtatgtgcccagtgcagaccgaccaacatgttctgaatgtcgtgtcgcatcagctgcattgatcatacatcgacgctaatgcattgcaccgatgaagtttttgagaaaccgctgcctcatcttttttgaagcagcggttttttaatgggattcgccttgtggggtaaacttgagctcaatcagcgcgatggctttttggattgcccgcatggtgaccgggtctgcggcagcgggatgatgagtaaagtcgatattcttcagctgactggacattttttcacgaacttcaacgggcgcgattacatcgagaacatccagaatttgtttgataaccaactggcaagcaaccacatcagaaaccagttcctgatcggcattcagcgtctgggacatcgtaaactcctgatagcattttgaaagccgttatagtagcggcttcacatcttcaacgatagtcacatccaccctcatcaggacacaaaaaaacctgccggagcaggttttttgttatcggaacatattgcctggcggtacgtctttgaacgtcttgcaatagttattgaacatacttttcaggattttgcgcagtttcatcgcggcactccgaccatttgttatacaggtgttattgtctttgcgcttataatatgacaaccatcacaaaaatcaatctttatgtgatacaaatcacataaatacccctttaatgttataaaaatgataatcaaagaacagccccctatttctgacacctacagatggcaagaaatagcgcctgccaggcgtcttttccggccattgtcgcagcgctgtaacgcgtaaaatagtgctttctcttactcttctggctggaccatgagacttctgattctgactctttcattaataacgctggcggggtgtacggttactcgccaggcccatgtgagcgaagttgacgcggcaacaggtattgtacggttggtttatgaccaggcttttttgcagcatgcccataccgatcgttatgtcagtcgcgggatctccgatcgcgcatgccaacaggaaggctatacccacgcgatcccctttggtcagccagtaggcaactgtagcctttttgcgggttccttatgtttgaatacggaattcactttgtcatatcagtgccatcattccgccttccctgtctttctctaaatattttaatcagcgaggggatcttcgctgattaaagaaatagcggtaatgcgttttattcccattcgtatttttaataattgaagtttatattttaccttttgcaannnntaaaataacaaattatagtgacgccacagcaacaaatataacctttgtggagcactatcatgctgaaaccagaaatgattgaaaaacttaatgagcagatgaacctggaactgtactcttcactgctttatcagcaaatgagcgcctggtgcagctatcataccttcgaaggtgctgccgcgttcctgcgccgtcacgcccaggaagagatgacgcatatgcagcgtctgtttgattacctgactgataccggcaatttaccgcgtattaataccgttgaatctccgtttgctgaatattcctcacttgatgaattattccaggaaacctataaacacgaacaattaatcacccagaaaattaacgaactggctcatgctgcaatgaccaatcaggactacccaacatttaatttcctgcagtggtatgtttctgagcagcatgaagaagagaaactgttcaaatcgattattgataaattaagcctggcaggcaaaagcggcgaaggtctgtattttatcgacaaagaactctctaccctcgacacacaaaactaatgctctccggcggcaggtttctgccgccatttcaaatcagtgacggcaaatcttactctgatcggtcgaaaaaccttcttctgaaggtataaatttgccttttgctgccagaaacgctaccagctctcccgctgtcatcccttctgccgagcaagtgtgaaaacgtgcctgttcaccaaaacgcgctttaatcgcagcttccagactggcatgcgtatattgctcgcctgattcaatcatcatatttaacacttcatgaccgtgaatagagtccatcgttcctcctcaaaaaaaagcctagcgtagcgattgccgcttatgaagactttgcgccagcgcaggactgaatgctttttattgtacatttatgtttacaccatatgtaacgtcggtttgacgaagcagccgttatgccttaacctgcgccgcagatatcactcataaagatcgtcaggacagaagaaagcgtgaaaaacagaaccctgggaagtgtttttatcgtggcgggaaccacaattggcgcaggcatgctggcaatgccgctggctgcggccggtgttggttttagcgttacgttaatcttgttgattgggctttgggcgttgatgtgctacacggcgctattactgctggaggtgtaccagcatgttccggcagataccggtctgggcacgctggcaaaacgctatctgggacgctacggtcaatggctgacgggcttcagtatgatgttcttaatgtatgctctgactgcggcatacatcagcggtgccggtgaattgttggcctccagcatcagcgactggacaggtatttcaatgtcggcaaccgctggcgtgttgttgttcacttttgttgccggtggcgtggtttgtgtcgggacatcgctggtcgatttatttaaccgttttctgttcagcgccaaaattatttntctggtggtgatgctggtattgctgctaccgcatattcacaaagtgaatcttttaaccctgccgttgcaacaggggctggcactgtctgcaatcccggtgatttttacgtcgtttggttttcacggtagcgtgccgagtattgtcagctatatggatggcaacattcgtaagctacgctgggtgtttataaccggtagtgcgatccccctggtggcatatattttctggcaggtggcgacgcttggcagcattgattcaacaacctttatgggattgctggctaatcatgccggattaaacgggctgttacaggcgttacgcgaaatggtggcctctccgcatgttgagctggcagtgcatttatttgctgatttagcccttgccacgtcatttctcggcgttgcgttaggcttatttgattatctggcagatttgtttcagcgttcaaataccgttggtggacgattgcaaactggagcaattacctttctgccaccgttggcgtttgcactgttttatccacgaggatttgtgatggcgctgggttacgccggtgtggcgctggcggtactggcattgattatcccttcgctgttgacctggcaaagcagaaagcacaatcctcaagcgggttaccgggtcaaaggtggtcgtccggcgctggtggtggtgtttctctgtggtattgctgtgattggcgtgcaatttttgattgcggcagggttgttaccagaagtggggtgattagatagcctcaaattccttattgggtgccagaattaacgctgacacccaatttgacttcttaatgcaggcagcactgcttaaattttttaccactaccgcacgggcaaggatcgttacgccccggtttctcttctgctttgatcggttgctgaacagctttttcctgcggatgcgccatccagtacgcatgtagatcaagcgccgccagtcgaatggcatctacgctctcttcaaacgcttctggcgacatcttctctacccgctcgaagttttcctcagtaccgtgcagcgctatcgcctccagcgctggttttaacgaatcgggcaatgttgaccagtcagaaagtgccacgccccgcatatagccaaagcaccactcctcaacaatcgtcagctcgctgccatcaacttctcgcaagccgaataacggctcaaactgctccgggaattcgttcagacgctctgcggtatcggccatatgttgaaaagccaggttcataaagcgcgtcatctctttctctgacgcccagcgcggcacatagtcagccccaccccacacggcaaccagccactgtgccggttcaatctcttgcggagaactcaacaccgccgtcaataaaccgtccagctccgccacatcaaggatggcgtggtcagtgttgtatttggtcagaatatcgtccagccattccaactcactttcgtttaacggtcccgttttcatacgcttttccttgtggatctcaactcgccagcacctatcttacatgccggtccgtatcagagatactttttgagtggctttgccggtgattaaaaatcaaggagggtgtaacgacaagttgcaggcacaaaaaaaccacccgaaggtggtttcacgacactgcttattgctttgattttattcttatctttcccatggtacccggagcgggacttgaacccgcacagcgcgaacgccgagggattttaaatcccttgtgtctaccgattccaccatccgggctcgggaagaaagtggaggcgcgttccggagtcgaaccggactagacggatttgcaatccgctacataaccgctttgttaacgcgccaaattcttcaggcctttcagccagacatccgctgacgccgatgtcttttaaactggagcgggaaacgagactcgaactcgcgaccccgaccttggcaaggtcgtgctctaccaactgagctattcccgcattcatcaagcaatcagttaatcacttgattttattatcgtctggcaatcagtgccgccgttcgatgcgttgcattctacttacctggcgcgatgagtcaacgatatttttcaccacttttgatcgtttgctgaaaattgcgccgaaacgatcactgatcaagcaaatctgcacgcgcagcgctcaaatattgcaacattgaccacagagtcagtaccgcagccacaaagaaaagtgcaataccggcgtactcaacccaaatgttcggacgccacagcagccatgccaacgccaccatctgggcagtggttttcactttcccaatccaggagacagccacgctactgcgtttacccaactccgccatccattcgcgtagcgcagaaataataatttcacgggcgatcatcgttgccgccggtaaggtcacccaccagctgtggtaatgctcggttaccagcaccatggcgatagccacgagaactttatctgctacagggtcaaggaaagcaccaaaccgggtactctggttccagcggcgtgccagaaaaccatcgaaccagtcagtcaccgccgcgacgcagaaaatgagcgcggcggcaaacggcgaccaggtgacaggcagataaaagaccaatacaaagaatgggataaggatgacacggaacagtgtaagcaacgtagggatattaaattgcataatgacgggtaactatctgttgtcagtaagattacccctatgttgctacagagacatcaatgtttcaacgaccagaagatcttttctgccagaccttgcgaaatacccggcacttttgcaatttcctcgacgctggcgttacgtaaaccttgcaaaccgcccatatatttcaacaacatttgccggcgttttggcccgacgccttcaatggtttccagggaactggtatttttgaccttcgcccgttttttacggtgcccgccaatcgcgtgatcgtgtgattcatcgcgaatatgctggataacatgcagcgcgggagaatctggcggcaaactgaatccctcaccttccggctcaaagaacagcgtttccagcccagccttacgatctgctcctttggcaacaccaagtagcagcggatgatttttatcccatgagacatccagttcggcgaagacatttttcgcctgcgcaagctggcctttgccgccgtcgataagtatcacatccgggatcttactgtcgtcgatggctttaccataacgccgacgcagcacctgattcatcgccgcataatcatcgcccggcgtgatgccagtaatgttatagcgccgatactccgcacgcagcgggccgttagcatcaaacaccacacaggaagcgacggtttgttcacccatggtatggctgatgtcaaagcactccatccgcttcacttccggcaatttcaacacgctggcaagtgctgtaagccgctggtgaacggtagattgctgcgaaagtttgctggttaaggccgtcgccgcattggtgcgcgcgagtttcaggtaacgcgccctatcgccacgaggtttggtttgaacattaatcttgcgtcccgccagttctgaaagggaatcggcgagcagcgttttatcgctaagattaaaatcgagcaggatctcacccggtaaggtgcgcatctggctgccttgtaaatagaactggcctacgaaggtttctaccacctcgctcagttccgtaccgccaggcactttcgggaaatagctgcggctgccgagcactttgccctgacgaatgaacaatacgtggacacaagccatacccgcatcgaacgccacaccaataacgtcgaggtcgtcgccggtattggaaacgaattgtttttcggtgacgcgtcgcaccgcctgaatttggtcgcgaatacgtgccgcttcttcaaactccagattctgactggcagtttccatacggctaatgagttgcgtaagcacctgatcatctttgccagacaaaaacaggcgcacatactcgacctgctgagcgtattcttcttcactcaccagtccttcaacgcacggtcccagacagcgccctatctgatattgcagacacggacgcgagcgattgcgataaacactattttcgcactggcgaatggggaaaatcttttgcagtagcgccagtgtttcacgtacggcatagccattcgggaacgggccgaaatattcacctttggcatgctttgcaccacgatgcatcgccagacgcgggtgggtatcgccactcaggaagataaaaggatatgatttatcatcgcgtagcaaaacgttgtaacgcggctgatagagtttgatgtagttgtgttccagcaacagcgcttcggtttctgtatgagtaaccgttacatcaatttgctggatctgggcgaccagcgcttcggttttgcgcgaagcgaggttgctacggaaatagctggaaagccgttttttcaggtctttcgctttgccgacatagataaccgtaccaccagcatcgtacatgcgataaacgccaggctggctggttacggtt

SEQ ID NO: 893 - DNA, 2227 bp, Escherichia coli
  Strain O55:H7
  modified_base (1449)..(1449): a, c, g or t
  modified_base (1821)..(1824): a, c, g or t
acgcttttgcgtcaaactgatcactcactgacttgataatgtctccgcattacacagaccatggcgaattgccaggtgagtcagctcaacatcgccatgaatgtttagtttactgaacatacgatagcggtagctgttcaccgttttcggactgagattgagctgttctgagatctcattgaccttctggcccttcgtgatcatcagcataatctgcaattcacgttcagacaaactggcaaatgggctttctgttttttctggttcgatctggcttaatgccatttgttgagcgatgtcagaagcaatgtaacgctgcccagaatagacagaacggatcgcactcacgacttcctgcggagccgcgcctttgctgaggtagcccgcagcaccggcctgcatgactttcgctggtaaagggttttctgtatggacggtaagcatgatgatttttacatcagctgtggaacgcgcgattttacgcgtcgcctcaagaccgccaatgcccggcatactcatgtccattagcaccacgtcaacggcatttgcccggcaccacttaacggcgtcttcaccgcacgatgcctcaccgacgacttttataccctttatatcttccagaatgcgtcgtatccctgcgcgcaccagttcgtggtcatcaacaagtagaacgttgatcaaaggaatatctccagaaatagggataacgctactgatagttagtcattcgtatattagcggtttttattgcaactttgaaacgttaaaaatggtgggtattcgatttttctctcgtttttgtcaattcgattgtccacagttatggtcacgcccgtcaccaacggcttaccggatcgtttcacagtaagccctgcgacgaaatgtgacaaaaattacctttattcagcaaaaatgaaaatcagcccgctgaatatgtaacattaattaacccgaacaatacgggcaaaaaacattcatgataaaaatatttattggtcattatattaacgcatttaatagcaccgttgacggcacgctcaaaaaacaaccactgctatttttagcaaagcttatggtatactccgccgccttaacatttttcaccgcaaattttcattgcaacatgacgaggaaaataaatgagtacgcctgatttttctactgccgagaataatcaagaactggcaaatgaagtctcctgcctgaaagcgatgctgacgctgatgctgcaggcgatgggacaagctgacgcgggccgcgtgatgttaaagatggaaaaacagcttgcgctgatcgaagacgaaacccaggctgcagtattttccaaaacggttaagcaaattaaacaagcctaccgtcagtaatataaaaccggctgatagcgtgcctttcagccggtttttgcatctggcacgcaggacagaaaagagatcaaattaagccagtagnggccgcgtaacaggcaacctgggtcttatttggtgcattaatttttttctgcatgtttttctggtggaaattgaccgtattctcagagattgacaaaatcatcgctatctctgctgatgtcttcccttccgccgtccacctcagaatttctttttcgcgcttgctgaaattcatctctggcgtcatcactatttcatcatttaaacgcatcagagccatcagactttcgcgcaccagtaactgcatttttaattgcagttcatcactaagaatgggtatttcgcgcgcgctgcaacgggaaaaggacaaaaagcccagcgcccggtttggcagcattaaatactgagtgacaccgcggcgtaaaccatgtgnnnncgcggcttcccataacggctgtgcttcgttgaataagtcatcattccacattagatggccctgactaaagttttcagggttcagcaccggatcaattgcgagaaagttttttgcctgataataactaacccacgcctcagggtaattggtgtagaaagccactttaggtcgagtgaatggtaccgggtggcggacacataacgaatagtaatcgtactccagctgctgagcctgaagctcaatttcatggtagacctcttctgcggtctccatcctctgaaaacgcaacagcatcgtgcgacgccagctgaaaaaatccgtatcctgcatagtaaaccgcaacgcccctgagagtgagtatcatttataatgataattcaaactatcacataaataagattta

SEQ ID NO: 894 - DNA, 5096 bp, Escherichia coli
  Strain O55:H7
  modified_base (1424)..(1424): a, c, g or t
  modified_base (2519)..(2519): a, c, g or t
  modified_base (5092)..(5092): a, c, g or t
tttatattattcaggcaatgaattacttttgcaagccatcgcattctcttatgttattaatgagttatgctgatttgttaagcagttttatcaggcttgaaatggcgttccgccccgactgtcgaatcgtcggggctgattttttcttattattgcagcagaaacttctcgaggaactggcgggtgcgaggctgctcgggatcggcaaataacgcttttgcggccccctgctcgactatccgcccctggtccataaaaatcgcccggtccgcaacatcccgggcaaagctcatttcgtgtgtcacaatcaccattgtgcgcttttcctgcgccagctgacggatggtgttcaggacttcgcccaccagctctggatccagcgctgacgttggctcgtcaaacaaaatcacctcaggacgcattgccagcgcacgcgcaatcgcaacacgctgctgttgaccgccagacaaacgacgtggatagctggtttctttaccggccagcccaactttcgccaacagcttgcgagcgcgcgccgtggcctcttctttcggttcgcctttgacgatcaccggcccttcaataatgttctccagcaccgtacgatgcggaaacaaattaaagttctggaagacaaacccgacgtgctgacgcaactggcgaatcagcgatttttgctgacttaatgaacgtgcagtatcaatagtgatatcgccaacggtgatcgttcccgcttccggttgttccagcagatttatgctacgtagcaatgtggttttgccggaaccactcggaccgataattgccaccacttcgccaggctttacctcgaggtcgataccgtgcagcaccgtctgaccgtggaattttttcaccaggttcttaacttcaatggcactcatttgggttctctctcctggcgattaagttgattctcaaaatggttctgcaacgtcgataacacagtcgccatgatccagtagatgagcgaagccgccagatacatggtgaatacctccagcgtacgcgaggtaatcaactgcgcctgacggaacagctccggcacctggattgtcgcggccagcgacgtatcttttaccagactgataaagctgttcgacagcggcggcaacgccacccgcgccgcctgtggcaaaatcgcgcgacgcatagtctgccatggcgtcataccaatactggcagctgcttcccactgacctttatcaatagaagaaatggcggcgcgaagcgtttcggcagtataggcggcagtgttgagcgacagaccaatcattgctgacggaatgggatctaattcgataccaaactgcggcaggccgtaatagatcataaacagttgtgcgatgagcggcgtaccacgaaaaatagagatataaaaacgcgccagccagcgcacgggccanattggcgacaggcgcatcagcgcgagaataaaccctagcagtaaaccaaaaaacatgccgccgatactgagttgcagcgtatacccagcccctttcagcaggaacggcaaggaatcaataaccagttgtatactttcttgcatgagcgttcccggagctaaacgtggggatgataggcgaacagcgcaggcgcgccgccggtatgaataaacagaatcggcccttcatctttgaagcgtttctgactgataccgtcaatcagacccgccatcgcttttccggtatacacaggatcaagcagaatgccttccagccgcgccagcaatttcactgcttccatgccttcgtcgttcggcacgccgtagccaggtgcaaaatagtcatcccagagtaaaatttccgctgatgcggtcagctccagttctttcgcaatcgcctgttgtaggttaaccactttcggcaattgatcggcaacggaacgcgacacggtcacgccaatcagttcgctttcaggcatcaggtgttccagcccaacagccagtccggcgtgagttccggcactgcccgatgcgactaccaccgatgaaatattaaccgccccttcacactgttgcgcgatttccagcgcactctccacataacctagcgcgccaagagcattagaaccgccaaccggaatgacatacgggcgaaagccttgtgcttcgactcgcgtcgccagctcttccagttgggcattgggatcggtcagtgcgtcgcacatttcaatctgggtattgaacagatccagcaacaagcgattgccgttggttaaatagttttctgcggttgtgccaataggattttccagcagcgccacgcagtgcagaccgagtttggcagcgactgcggcagtctgccgcacatggttagactggatcgccccggcagtaatcagcgtatcggcaccttcacgcagagcatctgccgcgagaaattctagcttacgtaatttattgccgcccattgccatgggggtgacgtcatcccgtttgatgaaaatttcccgtcctagataatcagaaaagcgcggcagatattcgagcggcgttggcncgccgataaactccagccgtggaaaacgggttaaattatgcagtggcataacagcctccgatgtgtgttgttgtgattttctcattatgcacgctgaaaacgcgtaaataaaaaaggcgctagtgaaagcgcccttttttgtcattatgctgattatttggtcacatcagcaccaaaccatttttcggaaagggcttgcaaagtgccgtctttttgcatttccgcaattgcatcattcactgctttcagcaggtcttcatttcctttacgcagcgccacgccagactcctgacgggagaatgcttcaccggttactgccagcgtatcgttggttttcttcaccagatccagcgccgccagacgatcaacgaggatcgcatcgatacgccctacgcgcagatcctgatatttggtcgggtcatcatcataggtacgcacatcgacgccctgaacattctgccgcagccactcttcatagttggtgcccagaccgacccccacttttttgcctttcagatcatcggctgttttaatggtgccttcgttaccttttttcaccagcgcctgaataccagaaatggtgtacggggttgagaaatcgtattttttcttgcgctcatcagaaatggtgacctgattaatcaccacatcaatacgtttagagtccagcgacgccagcataccgtcccatttggtcggttttagtgacgcctcaacgccaagatgttttgccagctgttgggcaaattccacttcaaaaccggttaatttgccgtcatccccctgaaaactgaacggcggataagtaccttccagccctaccagcagcgtgccgcgctctttaactttattaagcagaccttcatctgcaaaacttttaacgctcatgcccgcaatcagcgctacggccatcacacccatcaatgcctgacgtcccagatgtgctaatttcatattcaccccgaatgttgttatgtctgtttgcagtgtagagccattgtttgtaaacacaaaaacaactccgctacatcttattcttatttaatatatatcagaagcaggcaggctggaggatttctgcacaagtccggtacaggtttggcgctgatagtgttgatacttccgtaacgcgatgcggtaattgttggtgctggtggtgggcagccacggggcgaggatttcatcaaggaaaccgtcctgcagctgatcgagggaaatattttgctcgtgtagatgattccccaaacggcgcagacgaacgacatattcacgcaccgtaccagggctcatttcagtttgctcaaaaagaaattgcttaaagccgataatatcgaaaaaatcactctgcgttttgcaatgtaaatcaccgcaaaatcggcacaatgccgcccatgatttttgttccgtttgccagccattttcatcaagcagcgtgtccaggcgggaaatctcgattttattcactattttgccgtcgcgaactaaggtaatgcgatcgagcaatttacggcaatgcgcgcaatgggtctggctgtgtttaaagtctttaagatagcggcttaatggccgtcttttcaggtgctgcaccatcattaagaactcctggtagtcaaagttaaagtgcggcatttactgacgttataacttacccagtttagtgcgtaaccgtttaatagcctggctgtgtaactgactgacccgcgattccccgacctccagcactgcaccaatctctttgagattcagctcttcctggtaatagagggttaataccagtttttcgcgctccggcaacgtttcgatagcttccatcacccgctggcgcagattactgtccagtagttgttgtagcgggttttctcgttgatgatcatcagtaaccaattcgatgctatcgccgtgctcttcgcgccactcatcgtaggagaagagctggctgttattggtgtcgagcaacatttggcgataatcggcaatatcgatccctaaacgttccgctacctcagtttccgtggcgttgcggccaagttcctgctccagttgccctattgcctgtgccacttcacgcgcgttgcgtcgcacgctgcgcggcacccagtcacggctgcgaagttcatccagcatagcgccacggatacgctgcactgcgtaagttgtaaatgccgttccttgtagggcgtcatagcgttcgacggcattaagtaacccaatgccgcccgcctgtagcagatcgtcaagttccacgctcgcgggcagtcgaacctgcaggcgcaatgcttcgtgacgcaccagcgggacataacgctgccacagcgagtgtttatccattacaccttcagcggtatagagtgaattcacgataaacagccctgcgttatatgagttatcggcatgattatccgtttctgcagggtttttaatcggacgattagtgggtgaaatgaggggttatttgggggttacaggtaaattccaggcagaaaaaaccccgccggtggcggggaagcacgttgctgacaaattgcgctttatgttgccggatgcggcgtaaacgccttatccggcctacaagnatgt

SEQ ID NO: 895 - DNA, 3880 bp, Escherichia coli
  Strain O55:H7
  modified_base (839)..(839): a, c, g or t
  modified_base (847)..(847): a, c, g or t
  modified_base (3539)..(3539): a, c, g or t
  modified_base (3702)..(3702): a, c, g or t
  modified_base (3874)..(3875): a, c, g or t
aaattgcaattcaacttgtaggcctgataagcgcagcgcatcaggcaatttggcgttgccgtcagtctcagttaatcaggttacaacgattaaccctgcagcagagacagaacctgctgcggtacctggttagcttttgccagcacggagttaccggcctgctgaatgatctgcgctttcgacatgttggacacttcggtcgcatagtcggcgtcctgaatacgggactgcgcttcggacaggttggtagtggtgttgttcaggttggtgactgcggaatccagacggttctggatagcacccagggaagaacggaatttgtcgatggagctgattgcgtcgtccagggcagcaagcgggttggtcgttgcagaaccagcactggtagtctcagtagtgattttacccgcggagttcacatttacagcagtaccaattgctggagcataatctttattggtatcagtcgctgaagcatacccggcaacagtcacagagccgttatccttgttaacgctgtaagagactgtatagtcggcaacgttagtgataccacctttatcatccacataagacttcgcagcatcactggattcacccgcggtaaacccaatagttttgctcagtacaccggaattaaaggtaattgaagatgtcgcggcagccgctttggtttcgctcaatactacatctttactcactgtagcctgataagtaatcccaccagggattaacggagctactggagtggttgtcgcaggagttgcttttgcgatggtatattctgtgccattgaatgtcagagaggcaccgtcactaccttcgctcgctgctttgancagcgctntcatatcagctttagctgcgctaccagcgttgttagtcgtcaagttgcctgcatcgtctacgtatgcctggcttccaccgatggtgatattacctgctgaatccgtttcgaaagaaacagtaccatcttttgtggtgtaagaaccattaacagatttacccacatcagcatgaagggtggcagctaacgcatcacgttttgaagctgaatcagcagcctgcgccgcggcgtctacacccgtaccagcagtagatttagtggtagtaaaatcaccagatttagcgttgtaagtataatctacgccgccaactgtgactttatcgccattccctaatttatcgaatgcagcatcggtagttaacaaggtattttcggttttcagatcataaagacctgtcgtggtgtttaacttcgcgccagcagaagttaaatcacttaccgttgcagctttgttggtaatagtacctttaccatttacgttaaagccattcagacccagagtatcagaatcgatttttttcaggtcgatcgtgatggtttcgccgtcattcgcaccaacctgaattttcattgaaccgtctttcgccagcacgttcacgccgttgaactgggtctggccggatacgcggtcaatttcatcaagacgagatttgatttcgtcctggatggagtccaggtcagaatcggagttagtccctgtagtggcctgaaccgtcagttcacgaatacgctgtaagttgttgttgatttcggacagcgcgccttcggtggtctgcgcaacagaaataccgtcgttggcgttacgggccgcctgagtcaggcctttaatgttagaagtaaaacggttagcaatcgcctgacctgcggcgtcatccttcgcgctgttaatacgcaagccagaagacagacgctcgatagaactcgacagcgcagactggttcttgttgatattattttgagtgatcagcgagaggctgttggtattaatgacttgtgccatgattcgttatcctatattgcaagtcgttgattacgtattgggtttccccccgtcggctcaatcgccgtcaaacctgttatcgtctgtcgtaaaacaacctttagaatttttttcacaaacagccattttttgttagtcgccgaaatactcttttctctgccccttattcccgctattaaaaaaaacaattaaacgtaaactttgcgcaattcaggccgataaccccggtattcgttttacgtgtcgaatgataaaaggaaatcgcatggcaagtatttcatcgctgggagtcgggtcaggtctggatttaagttcaatccttgatagcctcaccgccgcgcaaaaagcgacgctaacccccatttcaaatcagcaatcgtcgtttaccgctaaacttagcgcctacggtacgctgaaaagcgcgctgacgactttccagaccgccaatactgcattgtctaaagccgatcttttttccgccaccagcagcaccaccgcgttcagtgccaccaccgcgggtaacgccatcgccgggaaatacaccatcagcgtcacccatctggcgcaggcgcaaaccctgaccacgcgcaccaccagagacgatacgaaaacggcgatcgccaccagcgacagtaaactcaccattcaacaaggcggcgacaaagatccgattaccattgatatcagcgcggctaactcgtcgttaagcgggatccgtgatgccatcaacaacgcaaaagcaggtgttagcgcgagcatcattaacgtgggtaacggtgattatcgtctgtcagtcacatcaaatgacaccggccttgacaatgcgatgacgctctcggttagcggtgatgatgcgctacaaagttttatgggctatgacgccagtgccagcagcaacggcatggaggtctcggtcgccgcccagaatgcgcagctgacggtcaacaacgtcgccattgagaacagcagcaacaccatcagcgacgcgctggaaaacatcaccctgaacctgaacgatgtcaccacgggcaaccagacgctaaccatcactcaggacacctccaaagcgcaaacggcgattaaagattgggtgaatgtctataactcgctaatagataccttcagcagcctgaccaaatacaccgccgtagatgcgggagctgatagccagagttctagcaatggcgcactgctcggcgactccacgctgcggacgattcagacgcagttgaagtcgatgctgagtaataccgtcagttcttccagctataaaacgttggcgcagattggtatcacgaccgatcccagcgatggcaaactggaattggatgccgacaaactcaccgctgcactgaaaaaagatgccagcggcgtaggtgcattgattgttggcgatggtaaaaaaaccggcatcacgaccaccatcggcagcaacctgaccagttggctttcgacaacgggcattattaaagccgctaccgatggcgttagtaagaccctgaataaattaactaaagactacaacgccgccagcgatcgcattgacgcgcaggtcgcgcgctacaaagaacaatttacccaactggacgttttaatgacctcgttaaacagcacaagcagctacttaacgcagcagttcgaaaacaacagtaattccaagtaatcattattcatcgggagacaggtcatgtncgcggcaaaaggcacccaagcctatgcacaaattggcgtcgaaagcgccgtaatgagcgccagccagcagcagctggtcaccatgctatttgatggagtgctgagcgcactggttagagcgcgcctgtttatgcaggacaacaatcagcaaggcaaaggcgtntctttgtcaaaagcgatcaacatcattgagaacggactgcgggtgagtcttgatgaagagagcaaagacgaactaacccaaaacttgattgctctttatagctatatggtcaggcgtttgctgcaagccaatttacgcaacgatgtctccgcagtcgaagaagtggaaacannaatgc

SEQ ID NO: 896 - DNA, 12861 bp, Escherichia coli
  Strain O55:H7
  modified_base (1417)..(1417): a, c, g or t
  modified_base (1464)..(1464): a, c, g or t
  modified_base (1481)..(1481): a, c, g or t
  modified_base (1495)..(1495): a, c, g or t
  modified_base (1506)..(1506): a, c, g or t
  modified_base (2425)..(2425): a, c, g or t
  modified_base (2903)..(2903): a, c, g or t
  modified_base (2998)..(2998): a, c, g or t
  modified_base (5194)..(5194): a, c, g or t
  modified_base (5574)..(5574): a, c, g or t
  modified_base (6122)..(6122): a, c, g or t
  modified_base (6149)..(6149): a, c, g or t
  modified_base (6163)..(6163): a, c, g or t
  modified_base (6209)..(6209): a, c, g or t
  modified_base (6520)..(6520): a, c, g or t
  modified_base (6737)..(6738): a, c, g or t
  modified_base (6741)..(6744): a, c, g or t
  modified_base (7093)..(7093): a, c, g or t
  modified_base (7231)..(7231): a, c, g or t
  modified_base (7520)..(7520): a, c, g or t
  modified_base (7881)..(7884): a, c, g or t
  modified_base (11418)..(11418): a, c, g or t
attgccgatgcctggaaagagtcgttactctccccttctttgattcaggacccagtctgatgaaccatgcaccgcatttatatttcgcctggcaacaactcgtcgaaaaaagccagctcatgttacgcctggcaacggaagaacaatgggacaaactcatcgccagcgaaatggcgtatgttaatgcggtgcaggagattgcacatttgactgaagaggttgacccgtccaccacgatgcaggagcagctccgcccgatgctgcgcctgattctcgacaacgaaagcaaggtaaagcagttattacagattcggatggatgaactggcgaaactggtcggtcagtcatcggtgcaaaaatcggtgttgagtgcctatggcgatcagggcggctttgtgctggctccgcaggataacctcttttgaatctgaatgagtcgatggctcgcgaataatccgattacggctacgcttctaatgttccccttgaatggagtcgaagaatgcgtaatcccacgctgttacaatgttttcactggtattacccggaaggcggtaagctctggcctgaattggccgagcgcgccgacggttttaatgatattggtatcaatatggtctggttgccgcccgcctataaaggcgcatcgggcgggtattcggtcggctacgactcctatgatttatttgatttaggtgagtttgatcagaaaggcagcatccctactaaatatggcgataaagtacaactgctggccgccattgacgccctgaaacgtaatgacattgcggtgctgttggacgtggtagtcaaccacaaaatgggcgcggatgaaaaagaagctattcgcgtgcagcgcgttaatgctgatgaccgtacgcaaattgatgaagaaatcattgaatgcgaaggctggacgcgttacaccttccccgctcgtgccgggcaatactcacagtttatctgggatttcaaatgttttagcggtatcgaccatatcgaaaaccccaatgaagatggcatttttaaaattgttaacgactacaccggcgaaggctggaacgatcaggttgatgatgaactcggtaatttcgattatctgatgggcgagaatatcgattttcgcaatcatgccgtgacggaagagattaaatactgggcgcgctgggtgatggaacaaacgcaatgcgacggttttcgtcttgatgcggtcaaacatattccagcctggttttataaagagtggatcgaacacgtacaggaagttgcgccaaagccgctgtttattgtggcggagtactggtcgcatgaagttgataagctgcaaacgtatattgatcaggtggaaggcaaaaccatgctgtttgatgcgccgctgcagatgaaattccatgaagcatcgcgcatgggacgcaantacgacatgacgcagattttcactgggacgctggtggaagccgatcnttttcacgccgtaaccntcgttgccaaccangacacccaacngttgcaagccctcgaagcaccggtcgaaccgtggtttaaaccgctggcgtatgctctaattttgttgcgggaaaatggcgttccttcggtgttctatccggacctctacggtgcgcattacgaagatgtcggtggtgacgggcaaacctatccgatagatatgccaataatcgaacagcttgatgagttaattctcgcccgtcagcgtttcgcccacggtgtacagacgttatttttcgaccatccgaactgcattgcctttagccgcagtggcaccgacgaatatcccggctgcgtggtggtcatgtcgaacggagatgatggcgaaaaaaccattcatttaggagagaattacggcaataaaacctggcgtgattttcttgggaaccggcaagagagtgtagtaaccgacgaaaacggcgaagcgaccttcttttgcaacggcggcagcgttagcgtgtgggttatcgaagaggtgctttaaattcatccccggcggcaagccggggagatttcattacggcaatggcgtcggtaacggcgctttatccagcgcagcggcacactctgccgtcgggcgatccacacgctccatcgtcataccatcgtactcaatggtgttaccgtcacgctcaacctcgtacagctcacgttttacggtaacgttagtgagatcatcagacatcaatgtcaacttgcccggcacagcaatcacccgctgccactgacggcaatctagggtatcgccctctttagtgacaatcaggctgcctatcgcttccgggctgaccagcgcacgttgcggccctttggtctgccagtagcccgccagccagtccggcgcgggggttttcacgacattgttatagttttcgacttcggcacagcccgccagcaacatgagcgcgcctgcaattgngagttttttcatcattcgtcctgcatgagaagaaaagaggattgtggcattaaagccctgatgtcgccagcctttccaggttcagagagaaatttgatctaactattatttttgtgaattattaccccgaaaataaatttgcatggtgtatgattcgcgactcttgtttcaaaccttctgagttcagaggctacattcatgtcatggcagcaattcaaacacgcctggttgattaaattctgggcgcccatccccgcggtcatcgcggcgggtattctctccacttactattttggcatcactggcaccttttgggctgtcacgggtgaatttacccgttggggcggtcagctcctgcagctgttcggcgtccatgctgaagagtggggttattttaaaattatccatctggaaggatcgccattaacccgcatcgacgggatgatgatcctcggtatgtttggcggctgctttgccncagcgctgtgggccaacaatgtcaaactacgcatgccgagtagccgtatccgcattatgcaggccattattggcggcattatcgccggttttggngcgcgtctggcaatgggctgtaacctggcggcattctttaccggtattcctcagttctcgctgcatgcctggttctttgccatcgccactgccattggttcatggtttggcgcgcgctttaccctgctgcccatcttccgtattcccgtgaaaatgcagaaagttgctgccgcctcaccgctgacgcaaaaaccggatcaggcgcggcgtcgttttcgtctcgggatgctggtctttttcggcatgctgggctgggcgctgctcacagcgatgaaccaacccaaactggggctggcaatgctgtttggcgtcggctttggtttactgattgaacgtgcgcaaatctgctttacttcggcgttccgcgatatgtggatcaccggacgtacccatatggcgaaagcaatcattattggtatggcggtgagtgccatcgggatcttcagttacgtacagttaggcgttgaacccaaaatcatgtgggcgggaccaaacgcggtaattggtggtttactgtttggttttggcatcgtgctggctggcggctgcgaaaccggctggatgtaccgcgcggtagaaggccaggtgcactactggtgggtcggtctgggcaatgtgatcggctcaacgattctggcgtattactgggatgatttcgctccggcgctggccaccgactgggacaaaatcaacttgctgaaaacctttggtccgatggggggcctgctggtgacatatttgctgttgtttgctgcgctgatgttgattatcggctgggaaaaacgcttcttccgccgtgcggcaccgcagactgctaaggagatcgcatgaaaaatatcgttcctgattaccgccttgatatggtgggtgaaccctgcccttatccggcagtcgcaacccttgaggcgatgccgcagttaaaaaaaggggaaatcctggaagtggtgagcgactgtccgcagtcgatcaataatattccactggatgcgcgtaatcacggctatacggtgctggatattcagcaagacgggccgaccattcgttatttaattcagaagtaatccctcattcccgctgtgacccacagcgggaacatcgttacctttgtatcacatagattttacccgccccctctcctattcttttcagtatgatctcaggaggtttctatgtgtggacgctttgcccaatcccaaacgcgtgaagattaccttgcgcttctcgcggaagatattgaacgcgatattccctatgatcccgaacccattggcagatacaacgtcgcgccgggaaccaaagtcctactgctcagtgaacgtgatgaacaccttcatctggatccggttttctggggatatgctcccggatggtgggataaaccgccgctgattaacgcccgcgtagaaactgcggcaaccagtcgtatgtttaaaccgctctggcaacatggtcgggcaatctgttttgccgatggctggtttgagtggaaaaaagaaggcgacaaaaagcagccttattttatctatcgtgctgatggacaacctgtttttatggcagcgataggcagcacaccgttcgagcgcggtgacgaagccgaaggatttttgattgtcactgcagcagcagaccagggtctggtagatattcatgaccgccgcccgctggttctgtcgccagaagctgcgcgggaatggatgcggcaagagattagcggtaaagaagcctcagaaatcgcggccagtggctgtgttccagcaaaccagttctcctggcacccggtatcgcgcgcggtgggtaatgttaaaaaccagggtgcggagttaattcaacctgtttgataagcctggagattattgatcaacaatactgcgtcataagtaatctctattagacaaagatttcattacctgttggcatattgcaaaaataacaccaatacggaatcgtcatgttcacgattaaaacagatgatctcacccatccagcagtgcaagcattagtggcttaccatatttccggcatgctgcagcagtctccccctgaaagcagtcatgctttagacgtgcaaaaattacgtaacccgacagtgacattctggtcagtatgggaaggcgaacaactcgcaggaattggtgcgctgaagttgctggatgataaacatggcgaactgaaatcaatgcggaccgcgccaaattntttacgtcggggtgtcgccagtctgattttacgccacattttgcaggtcgcccatgacagatgccttcatcgcctgagtttagaaacgggtacacaggctggatttacggcctgccatcaactttatttgaagcatggtttcgttgattgcgaaccgtttgccgattatcaacttgatccacacagtcgatttttgtcattgacgctatgcgaagataatgagttgctttgagccagacgcagcacattcttgcattcgacgtgctgcgtctttatttatcaccaacaggaaacgccttgtccatagacgccccttccacatgcgtcacaagaaacctctattccagtgacacaattacgcctaattaattacatataanatttaattatgaattcctcaccatctattacatgctttttaaccatatcggaatatttatcataatcggcgggattcataacaatatattttcgctgcgatatttcatagcgaatccctgtaagggtccatggcattaaaaatgcctctttaataggattacattccatacaaagtaattttaaattgccaggtatcgcaggaataacctcaatcttattatattcaatatacgcttctttcaaatttttggggaaccatctaatttctttaatattattctcactacaatcaaaaaccttagcggtgtctggtagtgctggtatttccgatagcttattgtgacaaataaaaattttcttagcctttggcggaaatgagtcaatatacgatatcaggttattatttacggagatcagggtaattccatcaggtacttgtggaaattctgtaaggttattgaaatcgagttctaattctttgcatgattcgggcacctgtattgaatcaagttcattataaacaaggctaagcatttcaatccactcnggaagaggcggcacagaacccaaaganaggcttgataagtnaagttcattactgtgaagcttaacacatttaaacattctcaccaangctctatccacattttctttcaagtcattcgatgcgccttctttgactgaactagcccagtcactgaaacctttgcaaagcctggcatctgtaattttggttaacttgtccagcaactctgcaatattggtcgatataaactctaatttatgccgaatgggtaaagtcccctccccctgacttttttctatcgtgatagatcccgtcttatcataagccccataattttcaaacaatagagtataattaccccacctgaaacattgctctctcaataacttaaattcagacagcatattcagtaagttgcngtcttcactaactggtgtaaacttatcatttccaagacaactgactaactcacttgataattcatttatgattgcatcatcagatactaactcgtgttgttttatcgtagactcagtattcgatgtgattttatttaatcgaaccgactgagtttttaacgacagatcatttaatggaaacatttacactcctgtttaataaattatattgcccagnncgnnnnctaaaacacaataaaattgccactatcaaaaatcgctcatttttataacgcagtatattaataaaaataagaacgaagattaagttatccagaggttactgttgcgtctgtggtcgtaacaacatccgacgtggtgatgtgtcaaatgagacattctgatgatcagagggtttatcgcgtatacggatcgtgggtggcagaaaactttcagaatcaggtttccattttaaaccagaaattgagtgagtttgccccatccataaccccacgcggtgagatcggatgtcattaaacaagccaggtcaacaggtcagtatgggaaggcgaacaactcgcaggaatgggtgcnctaaagttgctggatgataaacatggcgaactgaaatcaatgcgtaccgcgccaaattatttacgtcggggtgtcgccagtctgattttacgccacattttgcaggtcgcccatgacagatgccttcatcgcctgagnttagaaacgggtacacaggctggatttacggcctgccatcaactttatttgaagcatggtttcgttgattgcgaaccgtttgctgattatcaatttgatccacacagtcgatttttgtcattgacgctatgcgaagataatgaattgccatgagccagacgcagcgcattcttgcattcgacgtgctgcgcctttatttatcaccagcaggaaacgccttgtccatagacgctccttccacatgcgtcacaagaaacctctattccagtgacacaattacgcctaattnattacataaaatatttaattatgagttcctcaccatctattacatgctttttaaccatatcggaatatttatcataatcagctggattcgtaacaatatattttcgctgcgatatttcatagcagatccctgtcagagtccatggcattaaaaatgcctctttaataggattacattccataaaaagtatttttaaattgccaggtatcgcaggaacaacctcaatattattatatccaatacgcgcttctttcagatttttggggaagtatcgaatttcttgtatcttattatagccacaatcaaaaaccttagcggtgtctggtattgctggtgtttccgatagcttattgtgactaannnnaattttcttagcctttggcggaaatgagtcaatatgcgatatcaggttattatttacggagatcagggtaattccatcaggtacttgtggaaattctgtaaggttattgaaatcgagttctaattctttgcatgattcgggaacctgtattgaatcaagttcattataaacaaggctaagcatttcaatccaatctggaagaggcggcacagaacccaaaaataggtatgataagtcaagttcattactgtgaagcttaacacatttaaacattctcaccaacgctctatctacattttctttgaggtcattcgatccgccttctttgactgaactagcccagtcactgaagcctttgcaaagtctggcatctgtaattttcgttaacttgtccagcaactctgcaatattagtcgatataaactctaatttatgccgaatgggtaaagtcccctccccctgatttttttctatcgtgatagaccccgtcttatcataagcctcataattttcaaacaatagagtataattaccccacctgaaacattgctctctcaataacttaaattcagacagcatattcagtaagttgctgtcttcactaactggtgtaaacttatcatttccaagacaactgactaactcacttgataattcatttatgattgcatcatcagatactaactcgtgttgttttatcgtagactcagtattcgatgtgattttatttaattgaaccgactgagtttttaacgacagatcatttaatggaaacatttacactcctgtttaataaattatattgcccagggsgcattctaaaacacaataaaattaccactatcaaaaatcgctcatatccatagcccggaacatgaataaaaacatcaacaaagattaaattatccagaggttactgttgcgtctgtggtcgtaacaacatccgacgtggtgatgtgtcaaatgagacactctgatgttcagggggtttatcgtgtatacggatcgtggatggcagaaaactttcaggatcaggtatccatttcaaaccagataatgagtaagtttgccccatccatgccccacgcggtgagatcggatgtcattaacaacaggttacacaacctatacctgcatgctcattacttcctgatatgccgccaccagcttattacgcacctgaatccccatttgcatagaaactgaggctttttgcatatcggtcatcacatcgtttaacgccacgccgggttcaccgagagtgaatttttctgcctgcgtgcgggcggctgtttgtgtatcgcttatgcgatcgagcgcggcgtgcagctgcccggcaaaactaatggtcggttgcggcagtgattcctgcgcacgcgcactcatcgccgtagcctgtaactggctgataaccccttcaatcccctgtatcgctgacattttcatctcctggataatttctggtagcaaagcctaccagtaagtcaataagacaaaggcgctaaatagcaacaaaaaaacgggtttattggcggatagaaaaaaacgaaagcacaaataatgggagcgtcaatttttcgagtttgctgacccgggagtgagtcttgttccactttgccaataacgccgtccataatcagccacgaggtgcgcgatgaatgcgactgcagcccagacaaaatctcttgagtggcttaatcgcctgcgtgcgaatccgaaaattccattgattgttgccggttccgcggcagtggcggtcatggtcgcactgatcctgtgggcgaaagcccccgactaccgcacattattcagcaatctttccgatcaggatggtggcgcaattgtcagccaactgacgcaaatgaatattccttaccgcttcagcgaagccagcggcgctattgaagttccggcagataaagttcacgagctgcgcctgcgcctggcgcaacaaggtttgcccaaaggcggcgcggtcggtttcgaactactcgatcaggaaaagtttggtatcagccagttcagcgaacaggtgaattatcagcgggcgctggaaggcgagctttctcgtaccatcgaaactatcggcccggtaaaaggggcgcgcgtacatctggcaatgccgaaaccgtctttattcgtccgtgaacaaaaatccccttctgcatcggtgacggtaaatctgttacccggccgcgcactcgatgaagggcaaattagcgccattgtgcatctggtttccagcgccgttgctggtctgccgccgggaaacgtcacgctggtggatcagggcggacatctgttaacccagtccaataccagcgggcgcgatcttaatgacgctcaattgaaatatgccagcgatgtcgaaggccgtattcagcggcgtattgaagcaatcctgtcgcctattgttggtaacggtaatattcacgcccaggtcacggcgcaactggacttcgccagtaaagaacaaacggaagaacagtatcgccctaatggtgatgaatctcaggcggcgcttcgttcacgccagcttaatgagagcgagcaaagcggttccggttatccgggcggcgtaccgggggcgttgtcgaatcaaccggctcctgcgaataacgcgccaatcagcacgcctccggcaaatcaaaataaccgccagcagcaggcgagcaccaccagcaatagtgggccgcgtagcacacagcggaatgaaaccagtaactacgaagtcgatcgcactattcgtcataccaaaatgaacgtgggcgatgtgcaacgtctgtcagtcgcggtagtggtgaattacaaaaccttgccagacggtaaaccattgcctctcagcaacgaacagatgaaacaaattgaagatctgacccgcgaggcgatgggcttttctgaaaaacgcggtgactcgctcaatgtcgttaactcgccgttcaatagtagtgacgaaagcggcggagaactgccgttctggcaacagcaagcgtttatcgatcagttactggctgccggtcgctggttgctggtactgctggtggcgtggctgctgtggcgtaaagcggtacgcccgcagctaacacgtcgcgctgaggcgatgaaagctgtacagcaacaggcgcaggcccgcgaggaagtggaagatgcggtggaagtccgcctgagcaaagacgaacaactccaacaacggcgcgctaaccaacgtctgggggcagaagtcatgagccagcgtatccgtgaaatgtctgataacgatccgcgcgtggtggcgctggtcattcgccagtggataaataacgatcatgagtaacctgacaggcaccgataaaagcgtcatcctgctgatgaccattggcgaagaccgggcggcagaagtgttcaagcacctctcccagcgcgaggtgcaaaccctgagcgctgcaatggcgaacgtcacgcagatctccaacaagcagctaaccgatgtgctggcggagtttgagcaagaagctgaacagtttgccgcactgaatatcaacgccaacgattatntgcgttcggtattggtcaaagctctgggtgaggaacgtgccgccagcctgctggaagatattctcgaaactcgcgataccgccagcggtattgaaacgctcaactttatggagccgcagagcgccgccgatctgattcgtgatgagcatccgcaaattatcgccaccattctggtgcatctgaagcgcgcccaggccgccgatattctggcgttgttcgatgaacgtctgcgccacgacgtgatgttgcgtatcgccacctttggcggcgtgcagccagccgcgctggcggaactgaccgaagtactgaatggcttgctcgacggtcagaatctcaagcgcagcaaaatgggcggcgtgagaacggcagccgaaattatcaacctgatgaaaactcagcaggaagaagccgttattaccgccgtgcgtgaattcgacggcgagctggcgcagaaaatcatcgacgagatgttcctgttcgaaaatctggtggatgtcgacgatcgcagcattcagcgtctgttgcaggaagtggattccgaatcgctgttgatcgcgctgaaaggggccgagcagccactgcgcgagaaattcctgcgcaatatgtcgcagcgtgccgccgatattctgcgcgacgatctcgccaaccgtggtccggtgcgtctgtcgcaggtggaaaacgaacagaaagcgattctgctgattgtgcgccgccttgccgaaactggcgagatggtaattggcagcggcgaggatacctatgtctgataatctgccctggaaaacctggacgccggacgatctcgcgccaccacaggcagagtttgtgcccatggtcgagtcggaagaaaccatcattgaagaggctgaacccagccttgagcagcaactggcgcaactgcaaatgcaggcccatgagcaaggttatcaggcgggtattgccgaaggtcgccagcaaggtcataagcagggctatcaggaaggactggcccaggggctggagcaaggtctggcagaggcgaagtctcaacaagcgccaattcatgcccggatgcagcaactggtcagcgaatttcaaactacccttgatgcacttgatagtgtgatagcgtcgcgcctgatgcagatggcgctggaggcggcacgtcaggtcatcggtcagacgccaacggtggataactcggcactgatcaaacagatccaacagttgttgcagcaagaaccgttattcagcggtaaaccacagctgcgcgtgcacccggatgatctgcaacgtgtggatgatatgctcggcgctaccttaagtttgcatggctggcgcttgcggggcgatcccaccctccatcctggcggctgtaaagtctccgccgatgaaggcgatctcgacgccagtgtcgccactcgctggcaagaactctgccgtctggcagcaccaggagtggtg

SEQ ID NO: 897 - DNA, 5665 bp, Escherichia coli
  Strain O55:H7
  modified_base (18)..(20): a, c, g or t
  modified_base (22)..(23): a, c, g or t
  modified_base (26)..(26): a, c, g or t
  modified_base (187)..(187): a, c, g or t
  modified_base (1204)..(1204): a, c, g or t
  modified_base (1206)..(1209): a, c, g or t
  modified_base (2250)..(2250): a, c, g or t
  modified_base (2358)..(2358): a, c, g or t
  modified_base (2929)..(2929): a, c, g or t
  modified_base (3821)..(3821): a, c, g or t
  modified_base (3908)..(3908): a, c, g or t
  modified_base (4399)..(4399): a, c, g or t
  modified_base (5663)..(5664): a, c, g or t
ggcaagaactctgccgtnnngnngcnccaggagtggtgtaatgaccacgcgcctgactcgctggctaaccacgctggataactttgaagccaaaatggcgcagttgcctgcggtacgtcgctacgggcgattaacccgcgctaccgggctggtgctggaagccaccggattacaattgccgctcggntcaacctgtgtcattgaacgccagaacggcagcgaaacgcacgaagtagaaagcgaagtcgttgcctttaacggtcaacggctgtttttaatgccgctggaggaagtggaaggtgtcctgcccggcgcgcgggtttatgccaaaaacatttcggctgaaggactgcaaagcggcaagcagttgccgctcggtccggcgttattaggtcgcgttctggacggcagcggtaaaccgctcgatggcctgccctcccccgatacgacggaaaccggtgcgctgattaccccgccatttaacccgttgcaacgtacaccgattgaacatgtgctggacaccggcgtgcgcccaatcaatgccctgcttaccgttgggcgtgggcagcgtatggggctgtttgccgggtccggcgttggtaaaagtgtgctgctggggatgatggcacgttacacccgcgccgatgtcattgtcgtgggtttgattggtgaacgtgggcgcgaagtaaaagattttattgagaatatcctcggtgccgaagggcgtgcacgatcagtggtgattgccgctccggcggatgtgtctccgctcctgcgaatgcaaggtgccgcctatgccacgcgcattgccgaagattttcgcgatcgtggtcagcatgtgttgctgattatggactccctcacccgctacgcgatggcccagcgtgaaattgcgctggcgattggcgaaccacccgccaccaaaggttatccaccgtcggtgtttgccaaattaccggcactggtcgagcgtgccggaaatggcattagcggcggcggctcgattaccgcgttttataccgtgcttactgaaggcgatgaccagcaggaccccattgcagactccgcgcgggcgatcctcgacggtcacattgtgctgtctcgccgactggcggaagccgggcactatccggctatcgatattgaagcgtcgatcagccgcgcaatgacggcgttgatcagtgagcaacattacgcgcgagtncnnnncttcaaacagctgttgtcgagttttcagcgtaaccgcgatctggttagcgtcggcgcgtatgccaaaggcagcgatccgatgctcgacaaagccatcgccctgtggccgcagctggagggctatttgcaacaaggcatttttgaacgcgcggactgggaagcgtctctccaggggctggagcgtattttcccgacagtgtcataacccaggagataacggcagatggcagaacatggcgcgctggcgaccctgaaagatctggcagaaaaagaggtagaggatgccgcgcgcctgctgggtgaaatgcgtcgcgggtgtcagcaggcggaagaacagctcaaaatgctgatcgattatcagaatgaatatcgcaataacctcaacagcgatatgagtgccgggatgaccagcaaccgctggatcaactatcagcagtttatccagacgctggaaaaagccattactcagcatcgccagcaacttaatcagtggacgcagaaagttgacattgccctgaacagctggcgagaaaagaaacaacgtttgcaggcctggcagacactgcaggaacggcaatccacggcggcactgcttgcagaaaaccgcctcgatcagaaaaagatggatgagttcgcccagcgcgccgccatgaggaaacctgaatgattcgcttagcgcccttgattaccgccgacgttgacaccaccacattgcctggcggcaaagccagcgatgctgcacaagattttctcgcgttgttgagcgaagcattagcaggcgagacaactaccgacaaagcggccccccagttgctggtggcaacagataagcccacgacaaaaggcgagccgctgatcagcgatattgtttccgacgcgcaacaagctaatttactgatccctgtggatgaaacaccgcctgtcatcaacgacgaacaatccacatcaacaccgttaaccaccgctcagacgatggcgttggctgcggtggctgacaaaaatacgacaaaagacgaaaaagcggatgatctgaatgaagangtcaccgcaagcctgagcgccctttttgcgatgttgccgggttttgacaatacgcccaaagtgactgatgtgccgtcaaccgtgttaccggcagagaaaccaacgctnttcacaaaactgacttctgcgcaactcacaacagcacagcctgatgatgcccccggcacaccagctcagccattaacaccgctggtagcagaagcccagagtaaagcggaagtcatcagcacgccttcgccggtgactgctgccgccagcccgctaatcactccacaccagacacagccactgcccaccgtcgccgcgcctgttttgagtgcaccgctgggttctcacgaatggcaacaatcattaagccagcatatttcgctgttcacccgccaggggcaacaaagtgcagagttgcgtctgcacccgcaggatttaggtgaagtgcaaatctccctcaaagtggatgataaccaggcgcaaatccagatggtttcatcgcatcagcatgtacgcgccgccctagaagcagcgctgccggtactgcgtacgcagctggccgaaagtggcattcagttagggcaaagcaacatcagtggcgaaagctttagtggtcagcagcaggccgcttcccaacaacagcaaagccaacgcacagtaaaccatgaacctctggcgggggaagacgacnatacgcttccggttcccgtctctttacaagggcgcgtaacaggcaacagcggcgttgatattttcgcctaacgtcagaggtagcaccgtaatccgcgtcttttccccgctttgttgcgctcaagacgcaggataattagccgataagcagtagcgacacaggaagacccgcaacacatgactgattacgcgataagcaagaaaagcaagcgatcgctttggatcccgattctggtattcattaccctcgcggcctgtgccagcgcaggttacagctactggcattcgcatcaggttgctgctgacgacaaagcgcagcaacgcgtcgtgccctccccggtcttctatgcgctggatacctttacggtcaatctgggcgatgcggatcgcgtgctttatatcggcataaccctgcgcctgaaagatgaagctacccgctcgcggctgagtgagtatttgccggaagtccgtagccgtttgctgttactgttttcgcgtcaggatgctgccgtactggcgacagaagaaggcaagaaaaacctgattgccgagattaaaaccacactttccaccccgcttgttgccgggcaaccgaaacaggatgtcaccgacgtgctgtataccgcttttattctgcgataacgacatgggcgatagtattctttctcaagctgaaattgatgcgctgttgaatggtgacagcgaagtcaaagacgaaccgacagccagtgttagcggcgaaagtgacattcgtccgtacgatccgaatacccaacgacgggttgtgcgcgaacgtttgcaggcgctggaaatcattaatgagcgctttgcccgccattttcgtatggggctgttcaacctgctgcgtcgtagcccggatataaccgtcgggnccatccgcattcagccgtaccatgaatttgcccgcaacctgccggtgccgaccaacctgaaccttatccatctaaaaccgctgcgcngcactgggctggtggtgttctcaccgagtctggtgtttatcgccgtggataacctgtttggcggcgatggacgcttcccgaccaaagtggaaggtcgcgagtttacccataccgaacagcgcgtcatcaaccgcatgttgaaactggcgcttgaaggctatagcgacgcatggaaggcgattaatccgctggaagttgagtacgtgcgttcggaaatgcaggtgaaatttaccaatatcaccacctcgccgaacgacattgtggttaacacgccgttccatgtggagattggcaacctgaccggcgaatttaatatctgcctgccattcagcatgatcgagccgctacgggaattgttggttaacccgccgctggaaaactcgcgtaatgaagatcagaactggcgcgataacctggtgcgccaggtgcagcattcacagctggagctggtcgccaactttgccgatatctcgctacgcctgtcgcagatnttaaaactgaaacccggtgacgtcctgccgatagaaaaacccgaccgcatcatcgcccatgttgacggcgtcccggtgctgaccagtcagtacggcactctcaacggtcagtatgcgttacggatagaacatttgattaacccgattttaaattctctgaacgaggaacagcccaaatgagtgacatgaataatccggccgatgacaacaacggcgcaatggacgatctgtgggctgaagcgttgagcgaacaaaaatcaaccagcagcaaaagcgctgccgacgcggtgttccagcaatttggcggtggtgatgtcagcggaacgttgcaggatatcgacctgattatggatattccggtcaagctgaccgtcgagctgggccgcacacgaatgaccatcaaagagctgttgcgtctgacgcaagggtccgtcgtggcgctggacggtctggcgggcgaaccactggatattctgatcaacggttatttaatcgcccagggcgaagtggtggtcgttgccgataaatatggcgtgcggatcaccgatatcattactccgtctgagcgaatgcgccgcctgagccgttagtgatgaataaccacgctactgtgcaatcttccgcgccggtttctgctgcgccactgctgcaggtgagcggcgcactcatcgccattattgccctgatcctcgctgctgcctggctggtaaaacggttgggatttgccccgaaacgcactggcgttaacggtctgaaaattagcgccagtgcttcgctgggcgcgcgtgaacgggttgtggtggtcgatgtggaagatgcacggctggtgctcggcgttaccgcagggcaaatcaatctgctgcataaacttcccccttcagcaccaacagaagagataccgcagaccgattttcagtcggtcatgaaaaatttgcttaagcgtagcgggagatcctgatgcgtcgtttattgtctgtcgcacctgtccttctctggctgattacgcccctcgccttcgcgcaactgccgggtatcaccagccagccgctgcctggcggtggacaaagctggtcgctcccggtgcagacgctggtgttcatcacctcgttgacgtttattccggcaattttactgatgatgaccagtttcacccgcatcatcattgtttttggtttattgcgtaacgcgctgggaacaccctccgcgccacctaaccaggtattgctggggctggcactgtttttgaccttttttattatgtcanng

SEQ ID NO: 898 - DNA, 5921 bp, Escherichia coli
  Strain O55:H7
  modified_base (1648)..(1648): a, c, g or t
  modified_base (2696)..(2698): a, c, g or t
  modified_base (3141)..(3144): a, c, g or t
  modified_base (3147)..(3150): a, c, g or t
  modified_base (4438)..(4438): a, c, g or t
  modified_base (4557)..(4557): a, c, g or t
  modified_base (4628)..(4628): a, c, g or t
atttatgtcgatgcgtaccagccattcagcgaagagaaaatatcaatgcaggaggcgctggaaaaaggggcgcagccgctgcgtgagtttatgctgcgtcagacccgtgaggcagatttagggttgtttgccagactggcgaataccggcccgttgcagggacctgaagccgtgccgatgcgcattttgctcccggcctacgtgaccagcgagttgaaaaccgcatttcagataggcttcacgattttcatcccttttttgattatcgacctggtgatagccagcgtgttgatggcattggggatgatgatggttccccccgccaccattgctctgccctttaaactgatgctgtttgtactggtggatggctggcaattgctggtcggttcgctggcgcagagcttttacagctagagaggcaaaatgacacctgaatcggtcatgatgatggggactgaagcgatgaaagtcgcgctggcactggctgccccgctattgttggtagcgttggtcacgggccttatcatcagtattttgcaggccgccacgcagattaacgaaatgacgctgtcgtttattccgaaaatcatcgccgtatttatcgccattattattgccggaccgtggatgctcaatctgttgctggattacgtccgcaccttgttcactaacctgccgtatatcatcgggtagccgtactatgttgcaggtgacaagcgaacaatggctatcctggttaagcctgtacttctggccgttactgcgcgtgctggcgctgatctccaccgcgccgattctgagcgaacgcagcgtaccgaaacgggtaaaactgggtctggcaatgatgatcacgttcgccattgccccatcattacctgccaacgatgttcctgttttttcgttctttgctctgtggctggccgtgcagcagatcctgatcggcattgcgcttggttttaccatgcaatttgcctttgccgctgtgcgaaccgctggcgaaattatcggtctgcaaatggggctgtcatttgcgacgtttgtcgatccggccagccatcttaatatgcccgttttagcgcgtatcatggatatgctggcgttactgctgttcctgacatttaacggtcatttatggttgatttcactgctggtcgatacctttcacaccctgccgattggtggcgaaccgttgaacagcaatgcgtttctggcactcaccaaagcagggagtttgattttccttaacgggctgatgctggcgttaccgctcattactctgctgctgacactgaatctggcattaggtttacttaatcgtatggccccgcaattatccatttttgttattggatttccattaactctgactgtcggcatctctttaatggcggcattaatgccgttaattgcgcctttttgcgaacatttattcagtgaaatttttaatttgctggctgatattattagtgaattgccattaatataattccgtaacgtttatcatgttatcccaaggattatccgaaaaataatacctacgaacatcttccaggatactcctgcagcgaaatatttgttttaagctcactcacatatcgcaacatttactttactttaagacaattccaggcaaattatacaacantttacgggatagtaagtccgcctgaaaaatcgcgagagtggcgcattaggtgacccatgttgttccgtttagtcatgatgaaatattcaggtaaggggaattatcgttacgcattgagtgagggtatgccatgtcaacgattattatggatttatgtagttacacccgactaggtttaaccgggtatctgttgagtagaggggttaaaaaaagagaaatcaacgacattgaaaccgttgatgaccttgccatagcttgtgattcacagcgcccttcagtggtgtttattaatgaggactgtttcatccacgatgcttctaacagtcagcgtatcaagctcatcattaatcaacatcccaatacgttatttatcgtttttatggcaattgccaatgttcattttgatgaatatctattggtcagaaaaaatttattgatcagttctaaatcgattaaaccggaatctctcgacgatatccttggcgatattctgaaaaaagagacaacgataacctcgtttttaaatatgccgacgttatcattgagccgaaccgaatcgagtatgttgcgaatgtggatggcaggtcagggaaccattcaaatctccgaccaaatgaatatcaaagccaagaccgtttcatcgcataaaggtaatattaaacgtaagatcaaaacgcataataaacaggttatctaccatgtcgtccgactgacggataatgtgactaatggtatttttgtcaacatgcgctaacacattctgactggtggtttcccaccagtcaggctgaattagattactctgctttctccacaaagataccgtcctgatgccctgcttcattaaagaaccagatgccgagcgggtagtcttccagcgaaaccaggtacattgtgccttcactaaactcctcaactgccagtaccacgccaggacgacgcggaccgccatccgttttgactgttacccgatcattcaccttcatcgttttcctcctgtggctttgtgccagtgtagaacaatttcgtttttctggcagcgccaggnnngcgcgagtgctgattttctcgacggtctatacttaagagatgccaggcggacttaacgactggcggcaacaacagagtaacggttgcgaggaaagatgatgaaaaccgcaaaagagtacagcgataccgcaaaacgtgaggtcagcgtcgatgtcgatgccctgctggcggcgatcaatgaaattagcgaaagcgaagttcatcgcagccagaacgattctgaacacgttagcgtcgatggacgtgaatatcatacatggcgtgaattggcggatgccttcgaactggatattcatgacttcagcgtctctgaagtgaatcgttgaatgcacaataaaaaaatcccgaccctgagggggtcgggatgaaacttgcttaagcaagaagcacttaaaaaattcgttacaccaggaaatctgatgtgttcatcaccttatccgcannnnttnnnnctgacaagaaaatattcgctatatgaatgattaacgctacttatgaatagaaatgtgacgcacgtcaccccttggtggctctggcgtcagcgggatcgctcccgaaaaaatcatctttgataatttgtgctgttttgagaatcatcctggtaaggggagtactgcgcgactatgttttcaattcaacaaccactactggtttttagcgatcttgatggcaccctgctggacagtcatagttatgactggcaaccggcagccccctggctcagccgtttacgcgaagcaaatgttcccgtcattctctgtagcagtaaaacatcagcggaaatgctgtacttgcaaaaaatgttggggctacaaggtttaccgctgattgcagagaatggcgcagtgatccagcttgctgaacaatggcaggagatagacggttttccacgcatcatctcaggtattagccatggcgaaatcagccaggttttaaatacgctacgcgagaaagaacattttaaattcacgacttttgatgatgtcgacgatgcaaccatcgccgaatggacgggattaagccgtagccaggcggcgctgacgcagcttcatgaggcgtcggtaacgctaatctggcgcgacagtgacgagcgtatggcacaatttaccgctcgtctgaacgaactgggcttacagtttatgcaaggtgcgcgcttctggcacgtcctggatgcctctgccggaaaagatcaggctgccaactggattatcgcgacctatcaacaattgtcaggcaaacgcccaaccacacttggcctgggcgatgggccaaacgatgcgcccttactggaggtaatggattacgcggtgattgtgaaagggctaaaccgtgaaggggtgcatctgcatgatgaggatccgacccgcgtctggcgaacgcagcgtgaaggaccggaaggatggcgtgaagggctggaccattttttctccgcccgttaagcgttatcgctcgcgaatacccgattgcgcccagcctgtttagcgagataaagccgacggtcggccagtgactggagttgttcaaaatcataatcaccggtttcctcgctgctacttacccccaacgaggcactgatgcgtatcgtcgtactcttagcaatcaacatctctttttcatttaacttcaggcgaatacgttctgcgacttccgcagcctccgtcagactcgcacctggcagaatcacacaaaactcctcaccaccgacccgcccggcaacgtcctgcgcacgcaaggaactgntaattaatccggcagcatgagaaagaacacggtcgcccgcctgatgaccaaagcggtcattaatcgctttaaaatggtcaagatcgacctgaatgacagaaaaaggatgttggtgcgtntgacacaatttcgcgagcggacgggctttttcgaacagtgcgccacggttatataaacgcgttaaggtgtngtgccacgcctgccactgcaacgagctttgcagaacatacatgttgctgaccatccggcgaatcacataccaggagatgagtaacatggtggtaaagagcgcccacagcagggttaatgcaatgctgatactgccgaaatcgccgcgcacgccttcgcttaacgtatggacgcgcaccagcacaccgtcgaaatggtccagacgttcccagctaacatagcgactgtccatacgaatgccgccccgcgtgtcatgttccattgcctgcgccagcaaggccagttcacgaggatcaaaaatattccctgttggatggtcaggattggaagaggtcaaaaatctcagcttactgtcatagagctgatactcaccatcgaggtttttatcgatggcgtttcttaaaaattgctgcatagtacgcacgggaatactcatccccagcacgccataccagtagttattactgtctaccggaacactgacggtaacctgcggttcagtattgctggcgtgttccggttgcgaagtgaaccagcgtaccgcgcggtgacgattttctcgttgtgaatggccgataaaccagggttgggtgacatagccgtaataacgcgtcgggacattgcgcgtaaacaaggtcggctgcgtcgaaacgtaaaatccggcacgcgagacatacatcgcctgttctaccatcgacgaggagttgtgtgccagtcgcagcaagtaaccaacttccagtgcagcggtaatttcattgtcgaggctttcattttcgcgagacaggagattcccctcgctgactaatgcatccgatacgccattgactgacagggtgcgtcgtcggttgagttcgatttgccaggcgtgctcgtcgcgatgctgttcgaactcggttacagcatcacgcagagaggtgaaatccagtggcgctacgagagcttcgcgcatgccattacgcaaaaagatcagtttgtcgacgttatactgcaaatgcttatcgagcgcgttggctacgttttccagatgattacgctggctggagatataggcatcttccagcaccactacttcacgccaggtcagcaaggtggaaaaaagcaataccacgataaagcagagattaacgatatgaccaggccctaggcggcgtgcgagttttttcaaccagctctggttttccatttttgtctcgtgctgcaccctgacgactccccacctgcttttttatgattctggcataacctggcgatagcgtaccgcaaaacagcgataattttataatggtggcatgat

SEQ ID NO: 899 - DNA, 5622 bp, Escherichia coli
  Strain O55:H7
  modified_base (674)..(674): a, c, g or t
  modified_base (684)..(684): a, c, g or t
  modified_base (721)..(721): a, c, g or t
  modified_base (911)..(911): a, c, g or t
  modified_base (1726)..(1729): a, c, g or t
  modified_base (2209)..(2209): a, c, g or t
  modified_base (2974)..(2977): a, c, g or t
cgactatcattcattgcaggcattggcacaccaggccggatgtgatccggcctggtcttaatgataccctttcaaacttcttccgcagaacgactcccctcccctggaacaagctcggtttcatgaaaagcttcccgcttgaccccgtaaccgtcataccaacgacactcaaccataccgctggagtatccagtgacaatcatccgcgggccgccctctttaaccgtaacttcctcactaaccataaagctcatactcgcctccttttttcgagtgaaacttgttcaccttagttgaagatggcgaattttgcataatagcctgtgcgagtattaatgtacctgaccgcgcattttcgctacggctttcactcccagcaccacgatgccgccgatgataaatccaagaatcagatttaaaacagtcggtaatatcatcgccaccactgcactttgctgcccggcgaaatgttcaatggcgtgatgcagcggcgcaataccatgtaccacaatcccgccgccgacgaggaacatcgccagcgtgccgacaatcgataacgctttcatcagccagggcgcgataatcaataatcctttacctaatgcctgcatcagcgcgctggatttttccgccagccaataccccaggtcatcaatcttaacgataacccctancagaccgtanacgcccacggtcactaccagcgcgatgcctgaaagcnccagcacctgattaagcaacggcgcttcggccacaatccccagcgtgatggcgacgatttccgcagacaatataaaatcggtacgaatcgccccttttattttgtccttttcaaacttcagcggatcctgcgccgccagcttctccagacgctgctggctctgcgccggatcttctttatgtttacgcgnctccagcatatgcagcactttctctaccccttcaaagcagagaaacgcgccaccgatcatcaacaatggcgtaatcgcccacgggataaacgcactgatgatcagcgccagtggcaccagaatcactttattaatcagcgatcctttcgccacgccccagaccacgggaagttcccggttggcccgcacgcctgaaacttgttgcgcattgagcgataagtcatcccctaatacaccggcggttttcttcgccgccagtttgcccatcacggagatatcgtccagcagtgtggcgatatcatcgagcaacgtcagtaaactactcccggccaaaagcattccctctcatttttattgttgaagggtgtaagtatgaagcaaaaacggcagctctgatacttgcttcacaggtcaacatttttttaacaatcaagtgcaattatatctctcgccagcagaatgattttcacgtttactatgaaccacctttttatttccaccgtgagggattatgcgtttccgccagttgttaccgctttttggcgcgctgtttgcgttgtatatcatttggggctcaacctattttgtcattcggattggcgtggaaagctggcctccgttaatgatggcgggtgttcgattcctggcagccggtattttattgctggcatttttactactgcgcggacacaaactccccccgctacgtccgctgctcaatgccgcgctgattggcctgttattgctggctgtcggtaatggcatggtgacggttgccgaacatcaaaatgttccttccggcatcgccgccgtannnnttgcaaccgtgcccctctttaccctgtgcttcagccgcctgtttggcattaaaacgcgcaaactggaatgggtgggtattgccattgggcttgccggaatcatcatgctcaatagcggtggaaatttaagcggcaatccgtggggcgcgattctgattttaatcggctcgattagctgggcgtttggctcagtttatggctcgcgcattaccttacctgtagggatgatggcgggtgcgattgagatgctggcggcaggcgtggtgttaatgatcgcgtcgatgattgcgggtgaaaaactgacggcgctcccttccctttcaggcttccttgcggtcggctatctggcgctgtttggttcgattatcgccatcaacgcttatatgtatttaatccgtaatgtcagtccggctctcgccaccagctacgcttacgttaacccggtggtcgcggtcttgctgggtacgggactgggtgganaaacactgtcgaagattgaatggctggcgctcggcgtaattgtcttcgcggtggtactggtcacgttgggaaaatatctctttccggcaaaacccgtagttgctccagttattcaggacgcatcaagcgagtaaatgtatcccctgcgtgtcgatctgcgcgctggctccttcgccgcagatccactcttccagacgctcggtaagcgcttcatccttcagcttctcgcgcccacgtaacgcgcactcccagacaatcaatacgcgccagccgagttcctgcaagcgactgatatcgcggcgatcgcgctcaacatttttacctatcttctccagccagaactcggttcgagtcgcaggcactttaaacagatagcagtgatgatgatgccagaagcagccatgggtaaatatcacgcagcgatattcatcaacgacaaaatccgggcgtccgggcagactggcgtcctgaacgcgaaacgccaggccctgcccggttaacagactggcgaggcgcttctcaatcgccgtatcacgcgtggcaatcgcgcgcatatttttgctgcgagtggccttatcgtgaacgtcggccatgttgtgcctcttgctgacgcaacgccaccgcctgtttgatttttggctcaagcagttttgccaccgcggcaaagaccggcacgaccaccgagttaccgaactggcgataggcctgagtgtccgaaaccggaatgcggaatttcgcttctcccggcgcttcaaaacccattannnncgcgcattcccgaggcgttaaccgacgtggacgatgttgctgattcagcggatcgtcaaagtctttctcacccgtggccatatcccagccgcgatcgattaaaatttccgcgccatctttgtaataacgcgcagacagcgtacgggtgacgctttgcggattgttcggataaaccattccataaccgaagccgtttccgcgcgcctgatgttttttcgcatatcgatagaggtacttccacagcaccggcgtcaggatatatttcgcctcgaccatcgggtccaacagctgcgccagcgtcactcgctgtgcagggaaacattcgctgatatcacgcagagtaaaatcggctttcagattaagatcgcgacgaaaacccaccagcacgatgcgttcacggtgctgcggcagaaaatgtttgccatcgatgattttcggatcgtccggcccgttatcttctgcatcagccacgtcatagcccagttcgtccagcgtctgcatgatgatgcggaacgttttaccctggtcgtggcttttcaggtttttgacgttttcgagcacaaacatcgccggacgacgcgcgtcgataatgcgcaccacatcaaagaacagcgtgccctgagtatcgcaggcaaaaccgtgcgcccgcccgagcgagttctttttcgatacgccagccagcgaaaatggctgacaagggaaaccggccagtaaaacatcgtgttcaggaatgtgttgacgaatatgttccgccgcagcctcatcactcacgccttctttatggctgagggtgatgtcgcggatatcttcattaaaatgatgcgtcgccgggtcgcaataatgattggctttataagtgcgtaccgcatgtttgttccattcgctggtaaacacgcactgtccgccaatcgattcaaaaccgcgacggatgccgccaactccggcaaatagatcgataaagcgaaacgcataatgcggatgatgtgccggtggtttgggtaacaacgtttgcagatgggcgaactctttctcacttaaacggtgccatgccgagtcattcgccagcgcacgttttaaaattgccgcgctccagtgattctcacccacaccattaagctgagccaccagcgttttaacatcataaatttgcagcagtttctccagcattgcctgtgcggcattcccggtgctgtatgaatcggttactgatatattttcctgcatagatttaaccggccatctgagatggtcgacaggttaacataattacagccatttagggccacgcgctcagcccgcgggtgaaaacgcatctatcaccttgtgatcgacaccttcattctcccccgccagttcggcactgagcttcgccataaactcgactaaaaaatgcgcgttgtgctgcgccagctgcttgcctcttacggtttgcatgatttgcggtagcttcaacaacttagtctggaaatgatccagcgcgtagcgtttatcatcaagcgggcgatgctgtgcgagcggatcttcggcatcaaacagcgccacgcccaatgcccctgaaacggcaaacacgcgcgccaggccaatcgcccccagggcttccagccgatccgcatcctggacgattttagcttccgttgttaagggggcgatttgcgcgctgaaactgtgagcggcaatggcatgacaaacggcctcgattttctccgccggaaattgcacgaactcttcacggagcaggcgacgcgtctcttctgccgccaggattgaagaacgctgccgttgcggatgatttttcgccaggctcacaatatcgtggaaataacaggcggttaaaatcaccagcatatcgacgtcatcatctgccgccagcttctgtgccgtagcccagacgcggcgaaaatgacacacgtcatgggccgcgtcctggtgctgatgatggtttttcaaccagttttcgaactgtgcctgccagtgttgtaagtccatacgcgctccgttgccaaagagtcgccaccttagcagtttttattcatagcgtctgctacgtgcgggacgaggtcgtgtgtaccaggcaatgctgcctaacaatgccccgaccagagccataaataaaaatccgaccagtgccctaaccactttcccgcggtagagcctaaatcgctttcaaatcccgacacgggggcatcggggatccggctcatcacccagatgtaacgcgccattgcccagacgaaatagccacaccatgtataaaaagcccacaaagccagtttgccgccagggctgcgagagagtctctcttccatctttgtcgaaccgtattccattttgagataacccggaaaattcagacttagtactattatgtgataaaagtcacatttttccacattggatgagccagtcaagactcactcattttttgaacaaatagataatttttgcgcaacggcagtgaatacaggaaaaatcgttttgagcgattttatttatctttgagatcggctttattaattcattcaatcaatatattagcactgattacaattatacctttttattattctgtgtcatgatgcttccgttattagccttttatcgtcttgtttatattttttgggccggcatgatgccggctttttttt

SEQ ID NO: 900 - DNA, 131 bp, Escherichia coli
  Strain O55:H7
  modified_base (6)..(7): a, c, g or t
  modified_base (105)..(108): a, c, g or t
tcattnntgtgcgcgtgatcacaccagccgtttagcgcaacaatcattgataccccccatctttccgatcaactcataacatattgatatacatttataattttnnnnaatatttatatttagaattcata

SEQ ID NO: 901 - DNA, 29 bp, Escherichia coli
  Strain O55:H7
  modified_base (17)..(18): a, c, g or t
  modified_base (20)..(21): a, c, g or t
  modified_base (27)..(27): a, c, g or t
tttgaaatcttttaaanntnnttgttnca

SEQ ID NO: 902 - DNA, 3156 bp, Escherichia coli
  Strain O55:H7
  modified_base (704)..(707): a, c, g or t
  modified_base (1034)..(1034): a, c, g or t
  modified_base (1638)..(1638): a, c, g or t
  modified_base (1817)..(1817): a, c, g or t
  modified_base (2701)..(2701): a, c, g or t
aaaatgaacttcatagaatagtatccaaatgtgcttttttttggataacggcacttattgatatattcatgaagattataatcacaagggaatacataatgaaaagaaaagttctggcaatgctggccccggcgttattagttgctggcgcagcaaatgcggctgaaatttataataaagatggcaataaactggatttgtacggaaaagtagcgggcctgcactacttctctgatgatgctagcagcgatggcgacatgtcatatgcccgtatcggtttcaaaggtgaaactcagatcgctgaccaattcactggttatggtcagtgggaatttaacattggcgcaaacggtcctgaaagcgacaagggtaataccgcaacgcgtctggcatttgctggtttcggctttggtcagaatggtactttcgactatggtcgtaactacggtgtcgtatatgacgtagaagcatggaccgatatgctgccagaatttggtggagatacctatgctggcgctgacaacttcatgaacggtcgtgctaacagcgtagcaacctatcgtaacaatggtttctttggtcaagttgatggtctgaactttgcactccagtatcagggtaacaacgagaaaagcggattatttgatcaagaaggttcaggtaacggtaatggacgtaaacttgctaaagagaacggcgacggnnnngtatgtccacttcctatgactttgactttggtttaagtctgggcgctgcttactctaactctgaccgtaccgacaatcaggttcacaaaggtactcataacactcgttatggagatcgcttcgatgcaactgctggcggtgaaacagcagaagcatggaccgttggtgctaaatacgacgctaataacgtttacttagcagctatgtatgctgaaacccgtaacatgactggttacggtgatgctgatgccatcgctaacaaaacccaaaactttgaagttgttgctcagtatcagttcgacttcggtctgcgcccgtccatcgctnatctgcaatctaaaggtaaggatttaggcggtgtaaatagtgataacttcgacagccagggtaatcatcattacaccaacaaagatctggttaaatatgttgatattggtatgacctactacttcaacaaaaacatgtccacttatgttgattacaaaatcaacctgctggacaacgacgacgacttctacaaagaaaacggcatcgctaccgatgatatcgtggctgtgggcttagtctaccagttctaatcagccaacgcgccgcggcgtgttattgtaaaactgaacactagcctgagttcgtccctcatcgaactcaggcttttttattggcatttcatctccatctgcggcacacgcaattgccaaagcttatcgatacacccccttaccctgcccctcctggcacaataacatcaaccagcgactcttcaagccaacacccaaatgcatttctttatgaattaatccgtaacaaacacgcttcccatatagaaatatttgcaaaaatagtgcatgaaataagctttttctctaccaatccgcgatataaatattcatcagcaccacaatattccacagcactaaatctctccccgccnccccgtacctctgataatggtctaaaatcattgaggccacttgcgacgaagttgctcaataaggaaaatttggcgtgaataatattcaacaccagtgcagcatcatcattacatacttacacccgccgactaccgctttcgatatattgactcaattttccagcctggttaaaaatagngaccagctcagtcgcaaatatagtgactaccctaactaagcaacaataaggaatacactatgactgttcaaaccagtaaaaatccgcaggtcgatattgctgaagataatgcattcttcccttcagaatattcgcttagccaatataccagtcctgtctctgatcttgatggcgtggactatccaaaaccttatcgcggtaaacataaaattctggtgatcgccgcggacgaacgttatttgccgaccgataacggaaaactgttctcgaccggtaaccatccgattgaaacgttgctgccgttgtatcatctccatgctgcaggtttcgaattcgaagtggcgaccatttccggtctgatgaccaagtttgaatactgggctatgccgcagaaagatgaaaaagtaatgccattctttgagcagcataaatcgttgttccgcaatccgaagaaactcgcggatgttgtcgccagcctcaacgctgatagcgaatatgcagcaatctttgttcctggtggtcatggcgcacttattggtttacctgaaagccaggacgtagctgccgctttacagtgggcaatcaaaaatgaccgttttgttatctccctttgccacggcccggcggcttttctggcgcttcgccacggcgataatccactgaatggttattccatttgcgcattcccagacgccgcagacaaacaaacgccagagattggctatatgccgggtcatctcacctggtacttcggcgaagaactgaagaaaatgggcatgaacatcattaatgacgacatcaccgggcgagtacataaggaccgtaaacttctcaccggcgacagtccttttgcagcgaatgcgttgggtaaactggcggcgcangaaatgctggcagcttacgcgggttaatccctgttacgtttgaatgtaagcgcataatcaatcgcagccgcgttagtactcacgacgtggctgcgttttttcacggttaatttatggcgtactgaagccctatgttaatttctttgcggcaacgtaatccggaacacattatgcttattgagatagtgatacgtagcacttcccccatgcaattcggcaatcgctttgactaaagaaagaccaagtccctgacctacggaatgacgcgaattatctccccgccaaaatctacggaagagtttttcaggctcattaattttcgttccagggctggcgatatcaatattaagatagctgttggtatcaagaaaactggttatatgaatacgcgatttttctggcgaatatcgaatagcgttaacaataagattcgataacattcgttgcagtaaaat

SEQ ID NO: 903 - DNA, 7174 bp, Escherichia coli
  Strain O55:H7
  modified_base (1009)..(1009): a, c, g or t
  modified_base (2638)..(2638): a, c, g or t
  modified_base (4046)..(4046): a, c, g or t
  modified_base (6463)..(6463): a, c, g or t
  modified_base (6915)..(6916): a, c, g or t
ccgcaaagatttgctgattgcactcgaccttaaagcaaatctctttctcgtctgaaagatattcaagatagtccaacaaattttcgacttccttattgagagaaagcgagtccagtttcaccaaaacattgtttttatctgccctggcaagaaacagtatgttctctgttaaccgcgaaatattttccagctcttcaatgttaccggcaattgttttttgatattcagcgatacttctggtttgactgagcgtaacctgattctgacccagtaatgcattaattggcgttctaagttcatgagcgagatcgtcagcaaactgacttagacgctcaaaatctttgactaaagcatgatgcattttattcaacgcctgcccaagaggttttagttctctcggtaatgcgctaacctcaacaggctcccggctatcgttataattcagcgcttccgttacaccactcaactttttgatctctcgtaaccccgttcggattaacagcggacttaatactgagcacagtataatggcgacaatgcaaattataatgctattgattttatactgttcaagcatgttatgtctggctgaagccaatttagccacagtaaccgttaatgatggcgaaacttcatcaatattaattcgtaaagcatctatctctgtatcattaataatgcttctgtaaatgccagctgcgctgattgtctcactagcaggtatgttatttaacatgtcatcactgacatttgtccggttaacaattttattgatgccatcaccatgaatgatcaagatatcctgactaacatccatcatccggttaaagtatacaggtaacgtatctggatttaccccatcaattaataactgcttgatctgcgctgtccggttaatgagtgttgtatcatcgcgccatttcaactcacttgcgaggccattatagagagtccagacaattccggcgccagcaacagacagcagcaatataaaaagcaaggttaaacngacggttatagataatcttttcattatttttttaccgctacgaacgaatatcccatcccacggattgtggcaattagcttttcaggaaaaggatcatcaacttttgcgcggagcctgcgaatggcgacatccaccgtattggtatcactatcaaagttgattccccaaatttcactcgcaataaccgttctgggtataatttcgccagctctggaggccagtagccaaagtaactgaaactccttgcgcgtcagtgtaatactgatattgtccctgctcacactttgactaacagagtccattcttaagccgctgatttctaatgttgaattcaaagcgtgatgttgccttaattgtgcccgaacccttgccagcaactcagaaaatgaaaaaggttttaccagataatcatttgctccactgtccagccctctgactctgtcatcgacagaatcccttgcagtaaggcaaataacaggggtttgctttgccgttcttaacgtttgtaagatctgccagccatccatacccggaagcataatatccagaatgatcaatgcataatcatccttcagcgcaagataaagcccatctctgccatcagaaacggcatcaatgacataacccgcttcggaaagcccctgcgttacccactcctgggtcctttgattatcttcaataagtaaaatcttcatgaaaataatatgccataaatcatatgtcatagaaacagcctggttcattacaaaattgtaatgctgctgtaaggttaccctggacgctttttcgctatcctcaaaactcattcacatgacaagggatataaacatgttaaagcgttatttagtactctccgtagtaacggctgcattttcattaccttctttggtctatgctgcacaacaaaacattcttagcgtgcacattttgaaccagcaaacaggaaaacccgctgccgacgtgacagtcactcttgaaaagaaagcggacaacggctggttacaacttaataccgccaaaacagataaggatggacgaattaaggcactgtggcccgagcaaactgcaactacgggcgattaccgtgtcgtatttaaaaccggggactatttcaagaaacaaaatcttgaaagtttcttccctgagatccccgttgaatttcatattaataaagtgaacgagcattatcatgtgcctttattacttagccaatatgggtattcaacctatcgtggcagttaatgcataaatatgtaaaagcagatctctgctactgttagggaggacactccctgacagattaacagtaaacggctcttgctggctaacgacaaaaagtgtgatggcttatgaaaaagaatcaatttttaaaagaatcagatgttacggccgagtcggtattctttatgaagcgtcggcaggtgttaaaagcactgggcatcagcgcagctgcactttctttgcctcacgctgcgcatgccgatctgcttagctggtttaaagggaacgatcgcccacccgcccccgccggaaaagcgctggagttcagcaagcctgccgcctggcaaaataacctgccactgacgccagcagataaagtctccggttataacaacttctatgaattcnggctggataaagccgatcccgccgctaatgctggtagcctgaaaaccgatccatggacactgaaaatcagcggcgaagtggcaaaaccattgaccctcgatcacgatgatttaacccgtcgcttcccgctggaagagcgtatttatcgtatgcgctgcgtggaagcgtggtcgatggtggtgccgtggattggttttccgctgcacaaattgctggcgcttgccgaacccaccagcaatgcgaagtatgtcgctttcgaaacaatttatgcaccggaacagatgccaggccagcaggaccgctttatcggcggcgggctgaaatatccttatgtcgaaggattgcgtctcgacgaagcaatgcatccgctcacactgatgaccgtaggtgtttatggcaaggcgttaccgccacaaaatggcgcgccggtgcgactgattgtgccgtggaaatatggctttaaagggattaaatcgatcgtcagtattaagctgacccgcgagcgtccgccaaccacctggaatctggcagcgcctgacgaatacggtttttacgccaacgttaatccgcatgttgatcacccacgctggtcacaggctaccgaacgatttattggttcaggcggcatcctcgatgtacagcgccagccaacgctactgtttaatggttacgccgaccaggtggcatcgctgtatcgtggcctggatttgcgggagaatttctgaatgcgtctgacagcaaaacaggtgacatggctgaaagtttgcctgcatcttgccggattgttgccgtttctctggctggtctgggcgatcaatcacggtggactgggtgccgatccggtgaaagatattcagcattttaccggtcgcactgcactgaaatttttgctggcgaccttgttaatcacacctctggcacgctacgcaaaacagccgttattgatacgcacacgccgcctgttaggcttatggtgctttgcctgggcgacactgcatttaaccagttacgcattgctggagctgggcgtgaataatctggcgttattaggcaaggagttaattacccggccttatttaacgttaggaattatcagctggattattttgcttgctttagcgtttacttcaacccaggcgatgcagcgaaaactcggcaagcactggcaacagttgcataatttcgtctatcttgtcgcgatcctggccccaatacattatctgtggtcagtgaagattatttcaccgcagccgctcatctacgctgggctggctgtactgcttttagccttacggtataagaagtcgcgttccctttttaaccggttacgcaagcaggttcacaacaaattatctgtataacttcatattgccgacaaagtacgcgttatccctgccggatgtggcgngagcgccctatccggcctacgcagatcacatcaggttatgtttcgtttgtcatcaacctcaaattatcaacataattcattttatttcaataagatagataagtacacctgagaaaactatgctctcatctcctaagagttgttgcattttgtcatatgttacaatataacattacacatcatatacaatgactctggaggaaactgttttggcgattcgtcttcacaaactggctgttgctttaggtgtctttattgttagcgctcctgccttttcgcatggtcatcactcacacggcaaacccttaacagaggtcgaacaaaaagctgctaatggtgtttttgatgatgccaatgtacaaaaccgaacgctcagtgactgggatggagtctggcaatccgtttatcctttactgcaaagtggcaaacttgcccccgtctttcagaagaaagcggatgcagataaaactaaaacatttgctgaaattaaagattattatcacaaaggctatgcaacagatatcgagatgattggcattgaggacggcattgttgaattccatagaaataatgaaacaacatcctgtaaatatgattacgatggatacaaaatactcacctataaatcaggcaagaaaggcgttcgttacttattcgaatgtaaagatcctgaaagcaaagcccctaaatatatacaatttagcgatcatataattgcaccacgaaaatcatctcattttcacatttttatgggtaatgattcacagcaatctttattaaatgaaatggaaaactggccaacgtattatccatatcagttgagtagcgaagaagtggtcgaggaaatgatgtctcattgagtattctcatgataacgcctcgatgccgctttagtatgtcatcataactgccactggtccatccacaaacgccactgaacgcaagctagctacagacacgctcatcactatgacgtgtctgtatattaataagctaacccgcattgagttaaccaataacggattccatacacaatacggccaacagagaaagatacctgtgctcacgccattgcttatattggctggttacaatgtgcactatcaattttttaaataacaaattcttaaaaccacatctgtataaggaatttttaaggttcgtgggatagcttgactgtgaaaattacaggagctacaaaaatgaaccgattctcaaaaactcaaatttatttacattggataacgctgcttttcgttgcaataacctatgccgcgatggaactccgtggctggtttcctaaaggtagtagtacttatctgctgatgcgagaaacacattacaatgcgggtatattcgtttgggtgttaatgttttcacgcctgattataaaacaccgttatagtgatccttctattgtgccaccgccacctgcctggcaaatgaaagctgcttcgctaatgcacatcatgctttatataaccttccttgcgcttcctctgctggggattgctttgatggcttacagtggaaaatcgtggagtttccttggtttcaatgtgtctccctttgttaccccaaacagcgaaattaaagcactgataaaaaatattcacgaaacctgggcaaatataggctactttttaatcgcagctcacgctggcgcagcactctttcatcactacattcagaaagataatactctgttacgaatgatgcctcgccgcaaataagtcgatcctctgacaaaggaaatgtgaaccatggacatcaacgcatcataaatgtttacgcaagtgcataccgcactctttccactatcaacaaggaggagcagaaaatgtgtaaatcgtacaatggtaagacttatcaaaaatacaggttaattttggtatttaaaccttttttacttgttagtatgatacaaaggctttcaaaaaagctgggaaattcaacaactcttggaaattatggactttgtcccgcggctttaatctgacggccgcgttccttttttgactcaattcttgaccccttctctacgcaacttcagttcccaccaccaactttgcggcagtttcataggatgaatgtctaaaagaataatggtgagcgataagaaaacgactgaataactgcacattttcgctcgaaagcttcctgtcagatccatagcgaatcaagtgctgaatgtcacagtatcgaacagaaaacagtgacgatctaacccttcaagaatatttctacgattgttctgtttaggaaaagcaaggcgggaagtcgggagataagtcattgataaagtggcggagagagggggatttgaacccccggtagagttgcccctactccggttttcgagacctatgctatgggttaataaaatcaatatattatgtgttttatttggaataaanattctatatttaggattgaaaaatcagatggttagcatcaaacaacctcagaatattccaagcaaacaggttaaaaataaaactgcacccgaacaattgataacgacagaaaacgccttttccgagccaccaaaattacttcgcatcctatttattgctcacgttaacgccttgtataactcgagctctccacggtatttaacctctcttctgtttaactataattccaataaatctcgtcactgagctcaatcacttcgaaagtcaagcacaatatgaatttcacataagctatcaatgaaaatcggaggtcataccattaatcaacaataaaccaagtctttctcatataatcacttgacaaacactcatgataattgtaataaaatatataaggctataatacaatactgtcaatcaatatttcatttatatgagaaaaaggcatttannatgtcaattataaaaaactgcttatcattaattaacaatgcattaaatatacaaaaaacatcatattctctgaccaaaatggagcaggcagggaagttgttaaatagaaaaataactccagaaaatactcctccaatgttgttatcatacagaaatgcagatttaacgcaagaaaaaaacattacagaaagagttttatccatatttaaaataaaacgagattttgttgctgtaagaatccaaaacaatcagtttact

SEQ ID NO: 904 - DNA, 1035 bp, Escherichia coli
  Strain O55:H7
  modified_base (513)..(513): a, c, g or t
  modified_base (636)..(636): a, c, g or t
  modified_base (758)..(759): a, c, g or t
  modified_base (761)..(762): a, c, g or t
  modified_base (996)..(996): a, c, g or t
aaaaaattcaaggccatcaaaacacagttgccagtgtcatggattggtataatccccaaaaaaatgctttgggtataactatgggtacaccaagaaaatcggccgatatagcaaaagaagagcacagaaatgcactaaatttcatgataatggaaaaaaacacatttcatgaaaaaatcttaaacagcaatgacaatttgcaaaaatcatacagcaaaacagaagacagtagttgggtcgcagcttctgtcggctctcttctagataaaggagcaaaagtatatcccgatacatcatgctctctgagactgggagaaccattcatctttacgctgccagaatcagttagagtcgatgttgacatatatcctctcaaaaaataatcttaaaggtattgacatataagaaataattaagtgtattcacattagactagtcgcttaagagtagatttttggcattttgggaagatcagcgggacataagagacatacaacacaggaggaatggctnttttttaatagtgctttgaattccgcataaaacctttcttagcagtcgaaaagcaaaacatacgttttctttttaacaataattgatgagtattgcatcgagtgtcatttatacatcgccgcntttatttgccactataaaaaggctgattacatatctatcggagaactaaaattacttataaggtaatctgcatgattaacaatgtttcttcactttttccaaccgtcaaccgcaatattacnncnntatataaaaaaagcagcttctctgtatcaccacagaaaatcacattaaatcctgtaaaaatcagctcacctttttcaccaagcagtagctccatcagcgcaacaactctctttcgagccccaaacgcccattcggcatcatttcatcgacagtctactgctgaaagttcgttacatcaacaacttcctaatgtgaggcagcgcctgatacaacatcttgcagagcatggcattnaacctgcccggagtatggctgaacatattcctccggcac

SEQ ID NO: 905 - DNA, 90 bp, Escherichia coli
  Strain O55:H7
  modified_base (2)..(3): a, c, g or t
  modified_base (79)..(80): a, c, g or t
  modified_base (86)..(89): a, c, g or t
gnnctgcgccaccaccgccagtacaaaatgaacaatcaagacctctgcctgatgtggctcagcgtctggtgcagcatcnngcagannnng

SEQ ID NO: 906 - DNA, 20 bp, Escherichia coli
  Strain O55:H7
  modified_base (6)..(7): a, c, g or t
  modified_base (11)..(12): a, c, g or t
  modified_base (16)..(17): a, c, g or t
tattcnnccgnnaccnnact

SEQ ID NO: 907 - DNA, 19 bp, Escherichia coli
  Strain O55:H7
  modified_base (6)..(7): a, c, g or t
tggcanncaaccagcccgg

SEQ ID NO: 908 - DNA, 89 bp, Escherichia coli
  Strain O55:H7
  modified_base (6)..(7): a, c, g or t
  modified_base (39)..(39): a, c, g or t
  modified_base (62)..(62): a, c, g or t
  modified_base (64)..(65): a, c, g or t
  modified_base (75)..(76): a, c, g or t
  modified_base (80)..(81): a, c, g or t
  modified_base (85)..(86): a, c, g or t
acatanncctccggcacctaactggcctgcgccaccacngccagtacaaaatgaacaatcangnnctctgcctgnngtgnntcanngtc

SEQ ID NO: 909 - DNA, 22 bp, Escherichia coli
  Strain O55:H7
  modified_base (11)..(12): a, c, g or t
  modified_base (16)..(17): a, c, g or t
gcatcttgcanngcanngcatt

SEQ ID NO: 910 - DNA, 24 bp, Escherichia coli
  Strain O55:H7
  modified_base (2)..(3): a, c, g or t
cnnccggcacctaactggcctgcg

SEQ ID NO: 911 - DNA, 55 bp, Escherichia coli
  Strain O55:H7
  modified_base (2)..(3): a, c, g or t
gnntggcattcaaccagcccggaatatggctgaacatattcctccggcacctaac

SEQ ID NO: 912 - DNA, 1 bp, Escherichia coli
  Strain O55:H7
c

SEQ ID NO: 913 - DNA, 183 bp, Escherichia coli
  Strain O55:H7
  modified_base (4)..(5): a, c, g or t
gaannatcaagacctctgcctgatgtggctcagcgtctggtgcagcatcttgcagagcatggcattaatacatctaagcgctcgtgattataatataattacctatattagctctgacctgacagttaccgtttatttatacaggtatctgtcagattacatctaaccaacaaaaaaccggag

SEQ ID NO: 914 - DNA, 534 bp, Escherichia coli
  Strain O55:H7
  modified_base (79)..(79): a, c, g or t
  modified_base (131)..(131): a, c, g or t
  modified_base (137)..(137): a, c, g or t
  modified_base (186)..(186): a, c, g or t
  modified_base (199)..(199): a, c, g or t
  modified_base (211)..(211): a, c, g or t
  modified_base (229)..(229): a, c, g or t
  modified_base (233)..(233): a, c, g or t
  modified_base (250)..(250): a, c, g or t
  modified_base (259)..(259): a, c, g or t
  modified_base (309)..(309): a, c, g or t
  modified_base (369)..(369): a, c, g or t
  modified_base (396)..(396): a, c, g or t
acttcatcccgccaatattttcccacgtcccgtcagcacgcaggatttgcagcggtcttaccacacactgtatctgctntttatccgcatccagtatcaccacctgcgtgattaccctggcctgctccggnataatnccattctcatctgactccaggatgtctgccggccccagacgcagttgtnctgtaagtaactncccgtgttcacngtcatcatgctttccgtncccncacagacgctgcataantttttttantatgttcatgtcattctcctgttctgcctgtatcactgcccacttcatcnagccccttgacatcctgccacggcccgtcaccaaacctgacctgcaaatgctgaaaaaanccctgaacctgtgtggcatctttgggntcaagaaaggtcagtccggtgatgagcgcaccatctgtacccgggaaccagccattgctgtttgtctcaataatgctcgccggccccagacgaaaacggatttgtgtctcccccgggtcgcccttcggtccctgaggt

SEQ ID NO: 915 - DNA, 63 bp, Escherichia coli
  Strain O55:H7
  modified_base (57)..(57): a, c, g or t
  modified_base (60)..(62): a, c, g or t
accgggccagccgcacctgtttctcctttcggtccctgtgggcctgccgggcctgcngcnnng

SEQ ID NO: 916 - DNA, 45 bp, Escherichia coli
  Strain O55:H7
tccctttggaccctgtggacctgcatttcccgtcagaccggtctc

SEQ ID NO: 917 - DNA, 103 bp, Escherichia coli
  Strain O55:H7
gcgggcctgccggaccagcatcacctgccggtccccgttcgccggttgccccgacagggccggtgtcaccgcgctctcccttatcacccttcggcccctgagg

SEQ ID NO: 918 - DNA, 1 bp, Escherichia coli
  Strain O55:H7
g

SEQ ID NO: 919 - DNA, 220 bp, Escherichia coli
  Strain O55:H7
  modified_base (17)..(17): a, c, g or t
  modified_base (171)..(171): a, c, g or t
  modified_base (179)..(179): a, c, g or t
  modified_base (218)..(219): a, c, g or t
ccccctttggcccgggnggtcccaccacggtggggattcggtttacggcctcttccgccgctatcctgctttgttccgctgactgtgcgctttctgctgactcccgggctttttctgttgcggtcgttgcatccctggctgcattaccggctgcactttctgccgtctttnttgacaantcagcatctgctgcactttgtgatgactcactggctttnng

SEQ ID NO: 920 - DNA, 205 bp, Escherichia coli
  Strain O55:H7
  modified_base (2)..(3): a, c, g or t
  modified_base (8)..(8): a, c, g or t
cnnagaanccgaggacgaggacgcatcctctgactgctttgctgaggctgcactttctgccgcctgccgggctgactccgatgcctcccctgctgaagtgtcagcatttgcagcgctctcttctgcctgactggctgatatgccggcattcctcgctgacgtctccgcctctccggcattcttcttcgcctcctcagcgtgacgc

SEQ ID NO: 921 - DNA, 31 bp, Escherichia coli
  Strain O55:H7
  modified_base (29)..(29): a, c, g or t
cttccaccatcagttcaaaacggcgcagngc

SEQ ID NO: 922 - DNA, 185 bp, Escherichia coli
  Strain O55:H7
catggcaccgagaaaatcattcagcgtaccgggttgagaatcttcatacacggtgatggtcccggcatgtgacggcgggaatccttccaccaacagaatgacgctgtactgaccgtactcaacgtccatgctgtaacgaccggcttcatccggattttcagaggccaccgtgttcaccaccaccg

SEQ ID NO: 923 - DNA, 97 bp, Escherichia coli
  Strain O55:H7
  modified_base (4)..(4): a, c, g or t
  modified_base (29)..(29): a, c, g or t
tggnccgtctggctttcagttgaatggtncagttctctaccggttttcctgtgccgtctttcagtacacctgaaatctttactgccatattcacccc

SEQ ID NO: 924 - DNA, 297 bp, Escherichia coli
  Strain O55:H7
  modified_base (9)..(9): a, c, g or t
  modified_base (72)..(75): a, c, g or t
  modified_base (146)..(146): a, c, g or t
  modified_base (177)..(177): a, c, g or t
  modified_base (200)..(200): a, c, g or t
  modified_base (214)..(214): a, c, g or t
  modified_base (273)..(275): a, c, g or t
ctgtcatancactgtgttacctggctaatcagaacttataaccgacacccacgatgaaaccgtcagtgcgcnnnncgccactgccggagccttcataagcaatatcaatggccackgattcggtcgggttaaactgcacgccagcnccccacgccagagacgtgttgctgtggcgancgtcatcacttccggtcagcacntcgtgcgttttccncttgttgtcagttacgcgragataatccccggagaaagtcgacacacggctgtaagccnnncccgccatcgcatacgcgctga

SEQ ID NO: 925 - DNA, 249 bp, Escherichia coli
  Strain O55:H7
  modified_base (153)..(153): a, c, g or t
  modified_base (179)..(179): a, c, g or t
  modified_base (184)..(184): a, c, g or t
  modified_base (238)..(238): a, c, g or t
  modified_base (242)..(242): a, c, g or t
  modified_base (245)..(245): a, c, g or t
tcacgcgcacagacggccccgccattacgctgaaccagcggttacgcacggaatcttcatgccagcggatatcgctgtaacgggtmagctggcgattcttgtctcctgcatagctgaatgacgtcaccagccccagcgtgtccgtaaactcanaacggtatttcacgttaatcccgttnagatnatcgctaccgggagcgttcgtccgggcatgaagataccccgcgctcagcgtggnctgntgntcag

SEQ ID NO: 926 - DNA, 85 bp, Escherichia coli
  Strain O55:H7
  modified_base (10)..(10): a, c, g or t
  modified_base (23)..(24): a, c, g or t
  modified_base (32)..(32): a, c, g or t
cggatacggncagacagatggcnncggacaanatggcggcataaagtttacgcataattacctctcgcttttctgcaataaaaaa

SEQ ID NO: 927 - DNA, 381 bp, Escherichia coli
  Strain O55:H7
  modified_base (29)..(29): a, c, g or t
  modified_base (325)..(328): a, c, g or t
tgggttataaaattcagctgatactgatncctgctgtggattttttcatcaccacaaccagcagatcgctgatactggttgttggtgtccagttattcgctcctgatgaagatacggtgaatgtcagtgtcagcgtcccctgtccggcaggcatatctataactgaggaaaatacgccctgagcatccgtcgtggactgattaaaaatctcctgaccattgcgggtcactcttaaccggcaggttgaataccagtatgactgttggttattactgttgaaattctcatgcttaccaccgmggaataacactggcggtatcatgannnnccggtcaaacttctgatcatcactgattcttaccgtgatggtgccactggcat

SEQ ID NO: 928 - DNA, 151 bp, Escherichia coli
  Strain O55:H7
  modified_base (72)..(72): a, c, g or t
  modified_base (99)..(99): a, c, g or t
  modified_base (112)..(115): a, c, g or t
  modified_base (126)..(127): a, c, g or t
  modified_base (140)..(143): a, c, g or t
  modified_base (149)..(150): a, c, g or t
gacttgctgaccgttttgacaatatcgccttcaatctggttggctgacagtttccccttaatctgacagttntcattaatcgtgacgttgttgagcgtncctgagttcgcannnncactgccactnntatccgcattttnnnncgtcannc

SEQ ID NO: 929 - DNA, 68 bp, Escherichia coli
  Strain O55:H7
  modified_base (2)..(3): a, c, g or t
  modified_base (41)..(41): a, c, g or t
tnnggggattgccggacgaggtgatactcaccgcaaacagncgcttcaggaacacgtcgttcatgaat

SEQ ID NO: 930 - DNA, 59 bp, Escherichia coli
  Strain O55:H7
  modified_base (32)..(33): a, c, g or t
  modified_base (56)..(58): a, c, g or t
cgtctttcgttttttgaaccttcagcatgtanngcgcagccaggtcatcatttgtnnnc

SEQ ID NO: 931 - DNA, 36 bp, Escherichia coli
  Strain O55:H7
tgaccgtctgtgtgatttcattgcgggtttcggtga

SEQ ID NO: 932 - DNA, 83 bp, Escherichia coli
  Strain O55:H7
  modified_base (11)..(12): a, c, g or t
tgcagttttcnnattttttcccggaaaaattccagatacccttcaccatcattgctgggctgcccgctgatttccacaaacgc

SEQ ID NO: 933 - DNA, 259 bp, Escherichia coli
  Strain O55:H7
tggccataactgttaattgccctgactgtcagggtgtattccccgagcggcagaccactgaaacgatgctctgtatccgcagtgatggcggtggtcaccagacggctgtcctgaccgcttccactggtcaggcgcagactgaagcgcacgcccttcaccacccgcggcgtgtcccatttcgcctgcgccagatactggctgtcagctgcactcacctccaccgtcaggtgctgcactgccggtgggataacgctgttca

SEQ ID NO: 934 - DNA, 19 bp, Escherichia coli
  Strain O55:H7
cgctctggtcgccgtcaaa

SEQ ID NO: 935 - DNA, 105 bp, Escherichia coli
  Strain O55:H7
  modified_base (14)..(14): a, c, g or t
  modified_base (19)..(20): a, c, g or t
  modified_base (23)..(23): a, c, g or t
cgatggcttctttntccgnnacntgctgcactgccgtgatggcaaaggtaccgtccgtgttttcccggatggaaacacagcggaacaggcgacgacgcagtgacg

SEQ ID NO: 936 - DNA, 21 bp, Escherichia coli
  Strain O55:H7
  modified_base (6)..(7): a, c, g or t
ccggtnnggcgcggggtgtgc

SEQ ID NO: 937 - DNA, 40 bp, Escherichia coli
  Strain O55:H7
ggtcacctcacggtccagtgtcagggtgcggctggcggca

SEQ ID NO: 938 - DNA, 73 bp, Escherichia coli
  Strain O55:H7
  modified_base (5)..(6): a, c, g or t
cgtcnnccggtcatggtcccggcatagtcgttatcacagatttcaataatgtcaccgggtgtgtgacgcagcc

SEQ ID NO: 939 - DNA, 22 bp, Escherichia coli
  Strain O55:H7
ccgagcgtgaaatccaccgtct

SEQ ID NO: 940 - DNA, 24 bp, Escherichia coli
  Strain O55:H7
tggtacagccaaaggcatccatct

SEQ ID NO: 941 - DNA, 23 bp, Escherichia coli
  Strain O55:H7
tcttccaccagttccgtggaggt

SEQ ID NO: 942 - DNA, 38 bp, Escherichia coli
  Strain O55:H7
  modified_base (2)..(2): a, c, g or t
cnttcagggcgctgaagctgtagcgaaaccccacgscg

SEQ ID NO: 943 - DNA, 41 bp, Escherichia coli
  Strain O55:H7
cacaccacatctgacggacggtcctgcacaaacgtcagcgt

SEQ ID NO: 944 - DNA, 113 bp, Escherichia coli
  Strain O55:H7
  modified_base (44)..(44): a, c, g or t
  modified_base (80)..(80): a, c, g or t
  modified_base (83)..(83): a, c, g or t
ataccggcatacagcgcatcgccgagcagaaatcactgagmacntcccacgccttacgctgttgtgacaggtacgcattnaangtcatccgcggctctgtgcccccgaaacca

SEQ ID NO: 945 - DNA, 204 bp, Escherichia coli
  Strain O55:H7
  modified_base (14)..(14): a, c, g or t
  modified_base (19)..(19): a, c, g or t
  modified_base (52)..(52): a, c, g or t
  modified_base (88)..(88): a, c, g or t
  modified_base (112)..(112): a, c, g or t
  modified_base (168)..(168): a, c, g or t
  modified_base (201)..(202): a, c, g or t
catgccgtagcgcnggtgngtcagcatgtcccacaggcaccaggccgggttnttgctgtatgccggtttcaggctgccgtcccagatnccgctgtaagtgcgtttttccggntcatagtttgacggcaccaggatgatgcgaccgcggatatggtagttcaccgtcanctgctgacygccaaactgctccgcatccacctnnag

SEQ ID NO: 946 - DNA, 86 bp, Escherichia coli
  Strain O55:H7
  modified_base (7)..(7): a, c, g or t
  modified_base (75)..(78): a, c, g or t
gtgttcnggtagcactgtttcacatcgatgatttcggtgtatgacgaccagagcgttttgttctgcagctggtcnnnngtgctgtc

SEQ ID NO: 947 - DNA, 98 bp, Escherichia coli
  Strain O55:H7
  modified_base (14)..(14): a, c, g or t
  modified_base (95)..(95): a, c, g or t
tcaccgacgccagnaactgcgaggtggtcttgccgttaatggtgacatccttttccgtcacccagttaccgttacgctgcaactgaatcagcagncgg

SEQ ID NO: 948 - DNA, 174 bp, Escherichia coli
  Strain O55:H7
  modified_base (69)..(69): a, c, g or t
  modified_base (135)..(135): a, c, g or t
  modified_base (144)..(144): a, c, g or t
  modified_base (153)..(153): a, c, g or t
ccctttgaggtggtctccaacagtgactgcaccccgaaggtgacccgcaggcggtcaatgttcgcggangtaatggtgcgcgtcaccggctttgccttcgtcacttccacgcccagtgcggtttcagctccggangactcaaanccttccggnggtgtctgctcctgctccccg

SEQ ID NO: 949 - DNA, 271 bp, Escherichia coli
  Strain O55:H7
  modified_base (119)..(119): a, c, g or t
gcggggttttgttcaccagaatactctgcagccccttcaccggaccttcaatcggcccttcaccaatggcrtcaatcacgctcatcatctgcgtggacttaagattgtcctttgcctcnaccggcgtgtgccccytgccgccccctttacccactctgtccccctctcctgtctgatgtctgaatctgtttatgccagaaaacaacaggcaccccggagggtgcctgtgtcatgacggaataaaatttctgaaactcttcacatttccggc

SEQ ID NO: 950 - DNA, 269 bp, Escherichia coli
  Strain O55:H7
  modified_base (149)..(149): a, c, g or t
  modified_base (230)..(230): a, c, g or t
ctgcattacttttttgatgcctgaaaaataactccataacgttaatcttcatcgttctctcccgcagctccgctaactctgcgggatttttttattttcatccccgcccgataaccaccactttcccgtctccgccttcatcacgggtnctgatgtcctgggatatccgtcgtgaaccaaccagcatttcmccgtaaggcaccggcatcgggttcccctgagcaatcatnttgtccagtgacgaaaaatacgtgttctgtttaccgtta

SEQ ID NO: 951 - DNA, 153 bp, Escherichia coli
  Strain O55:H7
  modified_base (4)..(5): a, c, g or t
  modified_base (29)..(32): a, c, g or t
  modified_base (40)..(40): a, c, g or t
  modified_base (75)..(75): a, c, g or t
ctgnnccacaccgcccagtatcatgctgnnnnccagtganaacagcatcgtggtggcagaaaaaccaccggctgncagggctgaaccccataacgccattgatgccccggcagtgaagaaagagcccacgatggctgctgcccccagcacaat

SEQ ID NO: 952 - DNA, 21 bp, Escherichia coli
  Strain O55:H7
gggcgtacaccgcctccggtg

SEQ ID NO: 953 - DNA, 90 bp, Escherichia coli
  Strain O55:H7
  modified_base (33)..(33): a, c, g or t
  modified_base (63)..(63): a, c, g or t
  modified_base (81)..(81): a, c, g or t
  modified_base (87)..(88): a, c, g or t
taccagccttcgttcatctgacggcggaatccnggcayctgcagcgacagggcacggatggcntccgctgccgtgttcacntacagnntg

SEQ ID NO: 954 - DNA, 12 bp, Escherichia coli
  Strain O55:H7
tgaaggcagatg

SEQ ID NO: 955 - DNA, 270 bp, Escherichia coli
  Strain O55:H7
  modified_base (227)..(227): a, c, g or t
  modified_base (242)..(242): a, c, g or t
  modified_base (260)..(260): a, c, g or t
  modified_base (263)..(265): a, c, g or t
agtggcggtgacgccagacagaatgcgttcgtcgttgccatttttcggaatacctctcccgtttactcagttgttcaggcagatggtgaagcagctcaccgttgccgcagtatatggcggcatgattggccaccgatgcgccaaagcagcacagcaggatatcgcccgcctgtgcagaggacaggggcacccggtaaaaaccagtcgccgccatattgtccaggtanaggttctgaccgttncgccaccagtcatcctcncgnnnaaaat

SEQ ID NO: 956 - DNA, 50 bp, Escherichia coli
  Strain O55:H7
  modified_base (3)..(3): a, c, g or t
tgntaagcatcccggaacagcgtgtaacagtccgtcaccccgtgctcaaa

SEQ ID NO: 957 - DNA, 23 bp, Escherichia coli
  Strain O55:H7
  modified_base (9)..(9): a, c, g or t
  modified_base (15)..(15): a, c, g or t
  modified_base (18)..(18): a, c, g or t
cggaatttntgaatntcnccccg

SEQ ID NO: 958 - DNA, 43 bp, Escherichia coli
  Strain O55:H7
ctgcagccgccggtcagcctcgctcagccagggcagtccaccg

SEQ ID NO: 959 - DNA, 69 bp, Escherichia coli
  Strain O55:H7
  modified_base (44)..(44): a, c, g or t
caatctccccctgcatctctgcccgcagccagtcttccggtgcnatacgaaaatacgcctccggctctg

SEQ ID NO: 960 - DNA, 32 bp, Escherichia coli
  Strain O55:H7
  modified_base (24)..(26): a, c, g or t
  modified_base (30)..(31): a, c, g or t
acgaagccgcacgactccgcaggnnnacanng

SEQ ID NO: 961 - DNA, 712 bp, Escherichia coli
  Strain O55:H7
  modified_base (75)..(78): a, c, g or t
  modified_base (80)..(80): a, c, g or t
  modified_base (180)..(180): a, c, g or t
  modified_base (184)..(184): a, c, g or t
  modified_base (337)..(337): a, c, g or t
  modified_base (463)..(463): a, c, g or t
  modified_base (472)..(472): a, c, g or t
  modified_base (487)..(487): a, c, g or t
  modified_base (499)..(499): a, c, g or t
  modified_base (637)..(637): a, c, g or t
  modified_base (691)..(691): a, c, g or t
atcgctgattcagtctgtgtcataaaacaggatttactgcgaaagtttattgatggaaaggaaaccgccaaaatnnnncnccatgccgcgcatctcacacccgcgcatgcacttgctgcatctgtccttacggatatccgtggtggggttgtcgaactcatccgccaccgcaggaccgtnatanccgcattcatctccccggtaatcccacatacaggtgttcgccagcatgatgcgaccgggaaacagcgctccgtccgtctccgtcggtgttgccagcacaaacgaggctgtcatggccgtcagctctgacatctgctccaccacccagcggtcnctcagctcctgctccgggtccgcttccggattgcccgccacaaaattcaccgcatccagaaaacgggcatacacccggcggcggaccaccgtggcccccaccaggctctgcaggtcctccgccatnccggtgacnagaccgaacagattngacaccgtcagngacgggcgggcactgctgcccttcccgttcatctcaaaaccgctgccgtcaatcgggtatgcctgatattcccgcccctgccaggtaaccgcctcccctttttcattcagctcattgcagaaaaaataccgctcaccnccctgcaccgtcaggtcgatttcccagagcaccacccgcggtgactgctctganttaaccgactcgttcaggctt

SEQ ID NO: 962 - DNA, 641 bp, Escherichia coli
  Strain O55:H7
  modified_base (137)..(137): a, c, g or t
  modified_base (209)..(209): a, c, g or t
  modified_base (239)..(239): a, c, g or t
  modified_base (290)..(290): a, c, g or t
  modified_base (402)..(404): a, c, g or t
  modified_base (508)..(508): a, c, g or t
  modified_base (516)..(516): a, c, g or t
  modified_base (637)..(637): a, c, g or t
  modified_base (640)..(640): a, c, g or t
tgaatatcctgcatcagttcaccacctgcttaaactccgcgctgaactcaacgcgcaacatcccgacccgcgcagaccacccggcacaggtcacctttatctgccggtatgcatagggtggcttccacaaaaatgcnttccagcccccgtgctctgccagraatgcctccagatgycgggcctcctcccgggtcacggaaagcgtcacncggtatgttttcaggtcagcattcagcccngccgccatacgctgygartacccgtcaccaaaacgcacttcacgcaccganggctgcgagttcacctccatatccggcttcactttccagcgaaatgttttcatcgcccgctccctgataacataccgccatcacgcaactgcagccggagctcatcctgcgnnnccttgcgggccatgtcatacaccgccttcatcagctgcggccccgcctgtccgttgataccgtcgttctgaatcaccacgtgattgttctgattaaaattaatnccttccgnccgccgcatctgcgccggacttccggcaccrcccacataaccaccttccgcatagccscgcatcaggcggtacaggttgccgacaccaatccggctggttgcctccttcgtgaagacaaantcnc

SEQ ID NO: 963 - DNA, 3066 bp, Escherichia coli
  Strain O55:H7
  modified_base (4)..(4): a, c, g or t
  modified_base (12)..(13): a, c, g or t
  modified_base (15)..(16): a, c, g or t
  modified_base (169)..(169): a, c, g or t
  modified_base (193)..(193): a, c, g or t
  modified_base (280)..(280): a, c, g or t
  modified_base (520)..(520): a, c, g or t
  modified_base (531)..(531): a, c, g or t
  modified_base (543)..(543): a, c, g or t
  modified_base (591)..(591): a, c, g or t
  modified_base (607)..(607): a, c, g or t
  modified_base (697)..(697): a, c, g or t
  modified_base (2411)..(2411): a, c, g or t
  modified_base (2465)..(2465): a, c, g or t
  modified_base (2467)..(2470): a, c, g or t
  modified_base (2576)..(2576): a, c, g or t
  modified_base (2997)..(2997): a, c, g or t
aggntcatattnncnncccgtccccgtaaatcccccggtcgcgaaatggaagttcgccgccgcagcctcaatggccgtccccgaggaagcagatgcaccaccaccgaaagcaccgccaatggcgctgccgatacgcccgacaatgcccaccatggcctgtttaagcagnatttctgtcatcatggacagcacngaacgggtgaatccccgccagtctgcctctgcaccggtcagcatcgccgccatattctgtgcaataccgtcaaaggtctgcgtggcngcacttttaacctgcgaaaaactgtccgtcgcactttccgcccactcgccccagccggacttcagcccggccatccagcttccacgaagctgctcctccgcagaccaggtgttcttcagtgccgatgtggccttcgccagcgcagccggattatcaccgtacacgtcccgaagacgctgcgcttcagactcccgctgcgcctgacggtcagtgagaccgcgggcttttgcgctgatggcngcctgcttcgngctctgctgctnttcaaaccgcaccgcctgctgtgccagctcattcaggcgtttctggtnttcaaccttgtcgccnagctcagccagctggcgtttgtactccagcgtctcgtctttatgcgccagcagggatttttcctgctcagataactgtcgtttcgtggcngcctctttcaggaccgcatactgaytttccgcyttccataaatcacggcgctgccggctgattttctcattcgcaccgctgtgtttttccagcgtcctgagctcagcttcaagggcaagcagagcctctcttgcctgctcctcttccctctccccggcagagcgcgttttcggtgatgtatgctttttacctgtcagctcttcagccagacggctgacggcttcctgctgcccaggacctttgctgacgcctgttgcacgcgagcggttgatgtaccccatttccccctggcgtatacgcgcatcccgttccgcaatggattttctcagcgccagttcatcgcgttttgttttctcaataaatacgcggttctcttctgccagttcaccaaacaacgcaccaacgccgggcacattctttgtcgtttcccaggctgactgaataaattcagccagcgccagatccccctgcacaagcagcagcttcacctgttcaacggttcctgccaccacgtcagtgatcagactgagtgcccccagtgtatgatcacctatccatgcccatgcgtcagaagtccaggttttaacatcgtcccagattttttccaccggcgtggccgctttatcaagttgctccagacgtgcattcatgacatccgcaaacagggacatcgcctccgtcaccgcagcctgtttacctttcgtgcgctcaagctcatcaatatggcgtaactgggaaacgctcaggaagttatactgctgattcagggaggccagcgccttcaccggatctgctgcaatcccttcaaaggctttttccaccttcccggcatcgtcccccaccgtctgcagccatctctgagaggtttcccccatgatccgtagctgcccggcggtatatttcccgctttctgccagacgggccagattttctgccgcctgtctgataccaccaccggcttcatcgctgatcaccccggccattttccacaattctgccgttgtggtggcagccgcccctccggtcaggatcagtgaacgcaataaggcccggtcagcctgctctgcctgccaggcggcggcagcaagcgcggccagtacggcaaccccgccacctgccgccacacgggccaccgacataaatcgtcccagctcaccggcattccgggcattttcagccagtgcatttgccgtatctgacagcgactcctctgatgattcagaggcatccctgatcccgagaagttcctccttcagcagggtaagcaggctgagcggtccaccgaatgaatcgctgatctgccccccctgctgcagcatgataaggaagggattctgaccaccggcaagctgagtgacaatatccgtgaactgtgcgggcagtgtgcgcatggcagccttatactgtccgactgatatcccggctttttgtgccgccagcgcctgtcggctcagactctgctcagcagcatcagcctgttttctgaaagactgactgactttcccggacatcaaatcagcaagcgcactggtttcacccagctctttttttacccgcgctgcctcttcagaaaaacgggcagaatccagtgtcagcacggctgtcagatcggcaaaattacctgccatcgtggtcacctcctgaaatgtcctctgatgccatcaataactgtcacaacctccttccctcctccccgaaacggactccaccggcnaggcccgccgccttctgcatcagtacatcattttcgtccggcgtctccgcctgncnnnnctcagcctccggagcgaacaggctgaaatccgccggatgcatatccggatcgcaaaaaaacaggctgagtacggcgtacgtcagcccggaaaaatgcatatccagntgggtatcctgaaaataatgcgtgcagtaaaaacgtcgccagtcggcatattcggtggatgtcatcccggcaagcatggcgcgccagtcggctctccccatctcacgcgccagtttcaggacaaagttcagctcaccttcgaatgcttttttgatgttaccggctctgtcgcttctgctttcccggttggttcaggatcggcatcgtgccggttatccagcatacctgaaagataaagcacccggttcgttgcctgattcagtgcatcagcaggccatcccagcatcacttcacggcggatctgctgcatctctgtctccggagaggccagagtgcctttgagggaatgggaatgccatagcgacatcgccacaagcagggatgccgtttccagatatcgctggttaatgtgcacggcatnatgctccgttgtctcctgttgtgctgcgtctgaaacaaacttcatataatcaaaccgctgcagcgcaga

SEQ ID NO: 964 - DNA, 104 bp, Escherichia coli
  Strain O55:H7
  modified_base (4)..(4): a, c, g or t
  modified_base (55)..(58): a, c, g or t
  modified_base (61)..(61): a, c, g or t
cganagcgtgacggacaccccgttatattcaaattgttctgttttcagaaacatnnnntanctccgtttaccctgcagcgcccgcttcagtaacggtgacttca

SEQ ID NO: 965 - DNA, 194 bp, Escherichia coli
  Strain O55:H7
  modified_base (12)..(12): a, c, g or t
  modified_base (126)..(126): a, c, g or t
ccatttccgctnaccacagggatctgcrccttacctgtcgccacgccgtttaccgtaattgtcatatctttcacactaatggtggctttcgacggatcggtggaaaccgctctgaacgtcttgtcngttgcactttccggctcaaaagaaaccgtcagggtggttgttttcccttttgccaccgtaccggatgt

SEQ ID NO: 966 - DNA, 31 bp, Escherichia coli
  Strain O55:H7
  modified_base (3)..(3): a, c, g or t
  modified_base (30)..(30): a, c, g or t
ctnacccagccacggaacacatccaccgtnc

SEQ ID NO: 967 - DNA, 21 bp, Escherichia coli
  Strain O55:H7
  modified_base (11)..(12): a, c, g or t
accagcctatnngccctttct

SEQ ID NO: 968 - DNA, 20 bp, Escherichia coli
  Strain O55:H7
gccagcgtaaaactggtgtc

SEQ ID NO: 969 - DNA, 13 bp, Escherichia coli
  Strain O55:H7
gcccctgcccggt

SEQ ID NO: 970 - DNA, 319 bp, Escherichia coli
  Strain O55:H7
  modified_base (6)..(6): a, c, g or t
  modified_base (9)..(9): a, c, g or t
  modified_base (12)..(12): a, c, g or t
  modified_base (60)..(60): a, c, g or t
  modified_base (151)..(154): a, c, g or t
  modified_base (220)..(220): a, c, g or t
cagtcngcntcntcatcatccagatagttatcatcgtaggattccgccgtcatctcgccnggggtcagatccttcaccttcgccagtcgctgccagtcatcgtctgacaacgggtttgcataagcatcacccttgccgttgtaaacccacnnnntggtaccggaacctttcaccggctcaagaggatttggtgttgccatatcgtcctcacatctcgtangtaattttccacaggagatctgccgatccccacatcataaactcatcatcccggcggtagtcatacccctgaagattcatcttcagcagtaacgcactg

SEQ ID NO: 971 - DNA, 808 bp, Escherichia coli
  Strain O55:H7
  modified_base (761)..(761): a, c, g or t
  modified_base (767)..(767): a, c, g or t
  modified_base (803)..(806): a, c, g or t
ccgcctccagcgcaggaagaattttctcttccatccacatatccagtaccgagtccggttcttttgccctgagaaaaacttcaatatgcagtgtcgcctcccaggttccctcatcaacgaactcgtcagcagcagacgcatcagtcaggtaaacagcaacagcaggcagttcctgttcatcaataaaaaccgggcgaccgtcaaaccagctcaccctctcagaaatattttctttcagggcagacagaactgccgcccgtatttcacggtgtttcatacaccctcccagtcattttcttttcagcaccaggcgtaactgatgcgtcatggctttcatcatctgcgccggtaatttttcccggtacatccggtcccgttcacgttcaaaggtttctgccagcggtccggcagtcgtaatcttcaccacttcgatcggcagacggtggcgtttcggcctccctttgctgtccgcgccggtggatgatgatgcccacggcatacgctgcatcacatgccagcgtccgttagccagccgggtgataaaggcgtccgggatccgtcttttccccacaatcagcacactgccgccccctttcagggccgcacgctgtcctttctttctctgttttctgcgggaaagtcgaacgcgggcctcccccagtttgatggcgggcaggttgccggtattgatgtaaacctttgcgtaaaccttatccggtcgtgccggacttaaccggatgcgggcacggataagacggcgnggaacngccagctccctggcaaccgaagaggccgttttcgcnnnnat

SEQ ID NO: 972 - DNA, 5 bp, Escherichia coli
  Strain O55:H7
gtggc

SEQ ID NO: 973 - DNA, 1128 bp, Escherichia coli
  Strain O55:H7
  modified_base (142)..(142): a, c, g or t
  modified_base (695)..(695): a, c, g or t
  modified_base (702)..(704): a, c, g or t
  modified_base (712)..(713): a, c, g or t
cccggggaacggcacggcggtcaattgcatccagatttttcatggcctgcgccagaccttttattgccatactcattcctgttcgacaaaaatccggggtttaccgttgtacgtgtcataacgggtcaccgtcagtgtgcgnccctcaaacacaacaacatcatgacgggccggacggtaccgggctgaaaacaccaccagtgacaactggctgcccgaaagcgcccccatctccgcggactcttcctccggcatcacgtcatacacgacgccgttaatctccgcctgtttgcccatcacccgaacggtcgccccgtccatccggcaacacattcgcgtaaacaggtcagacattgatttttaccgccacagtggcgctgtttgcaggagcattttcccaggctacccccgcggccaccgcaccgtctgcagccagctgcacaaccccgtccttcagataaaccaccgcgccggactgaatgtcgtcagcagactgtttgggcagcaggaacacgccttcggcaaaaccgtcaccggcctcaccggcaggaatatcggtaatggccacggccaccatactgccgaccaccaccgcagcaccgctcaggatggtctgatctccggcattcaccagttcaatggtggtaccgtcctgtacaaaatttttcgccataatgctgtttctccggacagcnccagtgnnnctgttttnnaggcataaaaaaagccctttcgggcagtgattgtgataacgcggttatcaggccaccgacgaacgcaccagtccgcgccagtcaagcggtgccacaccggcatcaatacgaatttttgtggcaatgccgtcagtggtgaaaccttcctgctgatcaatgtatggcgtgtccacaccatccagccaggccacttcaatggtgtcagtgccctgtgccgccgccagataccaggttttcgggtctgccgcatcaagacgcgcttctgcaatcacctcagcaaagttctggatggggttaatgacaccggcgtttgcatccgcccctttcacactggccgatttgatggtctggttcgccaccgtctccagtgccaccggtaccagcataaaggccggacggatattcagggcgcgat

SEQ ID NO: 974 - DNA, 841 bp, Escherichia coli
  Strain O55:H7
  modified_base (565)..(565): a, c, g or t
  modified_base (657)..(658): a, c, g or t
ggccgcatccagtccggaaacggagatccccccggtggcaatatttttgtgatcggcatggaacagcgccttaccgtcggacagtttcgggttatccgtcagcaccttgtagaccaggtcaccaatcgttgccttcgccgcacgccccatcttcatcggcacgtccaccagcatattcagatcatcattgataatggcctggcgggtgatggagaaaatctccccgtaagtggccagtgcaatggtctccttgcgatctgaggtggtgatgtatttatactccgccccctcacgaacctggcgcagagaaccaaaaccgcccatccccacgcgatacgctgttttgaagtctgacaggcgtcccttacgggtccacttctggaaggtttcttctgattcctcccagccctggatcagccccttgttcgacacatccagcagaatattgccaaaatcagaggtgctgtgcgtcagcgccagcccgaccatctgcatggggttataactggccaccccaataccgcgctccgtcagtgacatgcgagcccattcacgcagggtcatnccgttataggcgttatccttctcgacattttcaaatccggcacgggccagcatcgcctggcggatcccgtcccccacaaaattgccgtttcnngcataaatatgggccggtgtatttttgttggtcggcgaggactcytgcccatttcattcagcagtcgttcacgggccatttccagcgaacagtcaggatcagccacgcactgtgcctgaagcgtctgatagcgaccgccgaacatggcaaacagatcgttaatgcctgacatgcgggctttct

SEQ ID NO: 975 - DNA, 4758 bp, Escherichia coli
  Strain O55:H7
  modified_base (1182)..(1182): a, c, g or t
  modified_base (2931)..(2931): a, c, g or t
  modified_base (3327)..(3327): a, c, g or t
  modified_base (3804)..(3804): a, c, g or t
  modified_base (4756)..(4756): a, c, g or t
cgaatggtcgcctcatcagacactgccggtaccggtgatggttctgttaccgccggtgcagggattgtcactgtggtatcacgcggggcactgttgcgtggcggagtaatcatgtttcggatggattccggcatctttttaaattcctctgtacgttttgactgaatacatgccattgcctcaacagcgggtgtcacctggtcagcaaatccgtgtgccagacattcggcaccggacatccaggtttcatccgccagcatggcggcaatttcatcggtggtttttccggttttctgcgcataggctggcaacagtaccgattcgactttatccagcaaatcggcataactgcgcatatcctcagcatccccgccactgaatccccatggcttatggatcatcatgaaggcattttccggcataatgaccgtatcaccggccatcgcaatcacagatgccatcgaggcggcaacgccatccacatacacggtaatggtcgccccctgatttttcagggcattaaaaatggcgatgccttcaaagacatcgccacccggtgaattgatatggagattaatgtgggtgatatcacccagtgcattcagttcgctgacaaactgcttcgcggtaactccccagaaaccaatctcgtcataaatataaatatccgcgtcacccggccccccagcctgcatcctgaaccaggatttattcttcatgctggctttcggtgtcgcgctgatactgtcgttcagttccggcactgttgcctcctttgtcgttgacggggtcagtatcaaagaccagccccagtctgctgttttcatcaatttcagccttgcggcgacgtttgacctcatccggattgcgcccaccggcacgcacccagtcagattctgtcgctgcaccaccccggatctgaattctccaggcttcagcttccttaaccgggtcgatccacggcatcaccggaccggaatacgtcgcgttatatagcgttttcatctccacatccgccggaattttcagcagacctgccgcaaccaccatattcagccatgtccggtacaccgggcgggttaccgcgccaataaaacagtcctgcaggatcaggtaaccatccgtggactcgaccagctcctgccgctgggcgctgtaggtgccgttatagttacgcgccgnactggaaaaactcagacgactgccagctgccactgcacgcaactggccgttgcggaaagtttcaaggttgggattgggacggtcagatttgaccatgccgatatcctcgcccttgcgcaaatcgtcataaataatacccggggtgatatggacttcccgctcggtctctttgctccccggatcttcatagtcctgtccgtcacctttacggatatacagtcccagcgccgcagcaatacgcgccgctgtcagttccgcatcctcatactccttaagggcactgatccgcatcagcacccccgataacatggatgagcctcgcgtctggtgcagacgacgagtgaacttcaggtggatcatttttccggcagcgatttctttcgtatcactctgccggccgctgaccggataatttttataaaccagatattttttcggtcttccccactcatcaagaaaaaccccctgattcagtccggcggattcatcagtgcgcatgggaacaaaatccggctccatcgcctcaagccagaatggcactcccgccgtccgttccagaccgtttcccgcaccactgaccatctgcgcaaacacttcaccatcccgcagccaggtccgcagcagtaaacgttcaagcacgggacgggtatactgccctgtcacatccggactcacggaccattcagcccacaaccggcggatatccgcagccagctctgccgccatttccccgttttttcgtaatggctgaggctccacaataattcccctggcaccaatcacccgctcttccagcttgtcaaacacaccaatcaccaggtcatgattgatatccagaaaacgggcctgctcccgcagggaaaccgcaccgtatttactgagctgatcagcagagcgattttcccgccgggctttatgtgtccgggtcggtttcaccgcctcataggccatgattaacgcccttgaacgcagtctggctgctttccatccgggggaaaacacgcctatcacatcatcaataattgccattaaaacctcgccagtttaaatcccggttttccccgcctgcggctcaccatcgcggcaagcctgcgttcccactcctgacgtccggcgcggatctgagaaaggctttccagcgtcagttgctgcccgttgaaggtgacagacttcccctccagtacggccatttccgcttcacggtaccgctgtatcatttctctggcttcttctgtgctcacaaccagcctcctgatgttatccatggattatcttccgcacgctccgtccgcagttttttcttccggcgacggcgtttttctgccccggccgtcagttccggggataccgtttcaccagaacgctcctgcgggaagacgagccacgtttcccgctgtgcccagtccggtgcggagggccagcggatcttttcgtaaccatgcagaacggcaagcgcatccgcataaaccagcaggtcaaacgcttcgttagcgcccctgcccggttttcgccattttccgtcactgccacgctcttcataggtcagctcatcgtaaaaccaccgccccagccagtcgggaaagtggatatagttcggccctggtgtgtcacgccacagggcattatttacacggtccttaaacgcatccgtctgaaccagccacagcgcgacatcgccactggctctggcacggcgggcacttctgccggtattatccgggaaggttcggttaatcagcctgtcacggngaagtccatcccccttgaacagaaacaccctgttgcctagtccgtcactccggcaacgacgccagaaacgataggcgttatctgtcaccccggcttcccctcccgtatccaccgccatggccatcagacgcatgcgcacatccggatcagaagccagcggccatgttttatggaacacatccgtcagcaacaaatcccagtcctccggatatgccgccggatcaaccggcagactttcaccgttgggactgcagcgcagtgaatgccggatgttgtagcgatcaacaatccagcgttccccctgctctccgtatccggtgatctgcacaacaaaacggcgatttttaccgccctgtacgtcaaccgttgcctcaataaaacgcacaccatccggcncagatcgccggggaaacggctcggcacgctgttcaagcagttcacttttacgctgttccgtggctgaacggggcagatagggtcgtccgatatcggtgttcaccaccgctttcagggtctcttcactgccggttcgctcatactcttcttctgccgccagcagtttaaaaatcagttgttcccaggtctgaaacgccgcagctggcccctccatccaaaatgacgcaatccgggagtttcgtggcgttccggtgatactgccgtccgccgccgcccgttcaccttcacgaagccagatcccctggttattcagttcgcgtttctgctcaggggcaatcagcccgcgacaatgcggacacatcagacgggcagcctgaccggcagccacaaaatccgggttattccggtatccggtcatgttatccatcaccggctgaaaatattccccgcagtgcggacacggccagtaccaccggnggcggtctccccggttatacagtgacaggatacccgttgttggcggtgcctcatgtgcgccaccacaacgccatttggtatcggtgatatcccgccccggtgaactctcgaccagggtcatccccgaggacataaaggtggtggtacgctttgaggccagcgtgaaggcatccccttccccgtccacgttttcagggaaacggtcataatccgtcagcgccacacgacggtaatccgaagaggaaaagacggtgatcgacggccagccaatcttcaggaaggagccgtcaagaaacattttatcgtggacgttgttgtcattacgggaaggactgaggcgcttgctgacctccggactgtggcgaaacgtcctggaaagacgcgttctggaatgctcacgcgccttcgtctcagtcatctgcaccaccagcatatccgccggatcacagatgatgccgtacacaatccagccatcaatcagcccttcggttttcccggttcgcgcaggtcccacaaacaccaccgcgtcatattcacgggctgataatgtattaatggggtcaatcatatagggcgtcagcgatgactcccacggaccggaagtattggctccccgtggaacccgcatataacgcctgatggcttccgctactggtaaccggctgggtgggcgaaacagcgaggccacttcgcgccagatatcggatgcgcggctatggctctcgttcacctgattcacatatcggcctcatcacaacagtcaatgactgccttttccagtgtgtcgcggatctcatcaaccacaatctgtacttcattcagttgtgatgcggtccaccccctgtccctctccagccggtcaggccaggtttccagtacctgaactatcgctttcaccacgacagaaaaggaccgcctgacatcactgactggcacaagctgaccagtttcntg

SEQ ID NO: 976 - DNA, 31 bp, Escherichia coli
  Strain O55:H7
tgtgtatcgtttttgattatycccgcacact

SEQ ID NO: 977 - DNA, 4 bp, Escherichia coli
  Strain O55:H7
gagg

SEQ ID NO: 978 - DNA, 143 bp, Escherichia coli
  Strain O55:H7
  modified_base (34)..(34): a, c, g or t
  modified_base (135)..(135): a, c, g or t
gttcaggcactgagtgcggatatagtcctgtgcnccttccagttgcttctgcattgccatcaaccgttctctgaggatgaaataatcccgttcagcggtgtctgccagtcgggggccggttgcattatccacgcnggaggtgc

SEQ ID NO: 979 - DNA, 95 bp, Escherichia coli
  Strain O55:H7
atccgcaggcgcttacgaccagcggcaacatcagcacgcagagtttcattttcagctctcgcatcggctaaytccctcgagtattttgcatcgag

SEQ ID NO: 980 - DNA, 71 bp, Escherichia coli
  Strain O55:H7
  modified_base (30)..(31): a, c, g or t
  modified_base (60)..(60): a, c, g or t
catcacgctggcgtacctgcatatcagtannggtggcattcgcctgttccagctctctgncttttttatcg

SEQ ID NO: 981 - DNA, 25 bp, Escherichia coli
  Strain O55:H7
ggtgagcgcgttgtcacggtaatgg

SEQ ID NO: 982 - DNA, 34 bp, Escherichia coli
  Strain O55:H7
ataatcaccacacacagaacacggttcatctctc

SEQ ID NO: 983 - DNA, 37 bp, Escherichia coli
  Strain O55:H7
  modified_base (35)..(35): a, c, g or t
cccggtagcaaacacactggcaatgtttttatccngt

SEQ ID NO: 984 - DNA, 23 bp, Escherichia coli
  Strain O55:H7
  modified_base (2)..(3): a, c, g or t
cnngccccatccccgcaacgaca

SEQ ID NO: 985 - DNA, 1 bp, Escherichia coli
  Strain O55:H7
a

SEQ ID NO: 986 - DNA, 22 bp, Escherichia coli
  Strain O55:H7
  modified_base (6)..(6): a, c, g or t
tgactntattcacttacatttt

SEQ ID NO: 987 - DNA, 24 bp, Escherichia coli
  Strain O55:H7
  modified_base (11)..(11): a, c, g or t
gcaggatttcntgttatccgtcca

SEQ ID NO: 988 - DNA, 74 bp, Escherichia coli
  Strain O55:H7
  modified_base (10)..(11): a, c, g or t
  modified_base (25)..(25): a, c, g or t
  modified_base (31)..(32): a, c, g or t
  modified_base (69)..(70): a, c, g or t
aaaatattcnncttatctgtcgatnccccannacgccagcgcgctctcctggtcacgacgggatacctnnccgt

SEQ ID NO: 989 - DNA, 39 bp, Escherichia coli
  Strain O55:H7
  modified_base (8)..(9): a, c, g or t
  modified_base (38)..(38): a, c, g or t
agtctctnncaccgtccttaatccaccagcgaatcgcnt

SEQ ID NO: 990 - DNA, 23 bp, Escherichia coli
  Strain O55:H7
  modified_base (2)..(3): a, c, g or t
  modified_base (7)..(8): a, c, g or t
  modified_base (11)..(11): a, c, g or t
cnnttcnntcncctgcattaatt

SEQ ID NO: 991 - DNA, 52 bp, Escherichia coli
  Strain O55:H7
gaaacacttaccgggaccaatgttgtacggacagaatgacgcgatccccgct

SEQ ID NO: 992 - DNA, 23 bp, Escherichia coli
  Strain O55:H7
  modified_base (14)..(14): a, c, g or t
  modified_base (17)..(19): a, c, g or t
  modified_base (21)..(22): a, c, g or t
cgcatttttccttngannncnnc

SEQ ID NO: 993 - DNA, 53 bp, Escherichia coli
  Strain O55:H7
  modified_base (51)..(51): a, c, g or t
acgacaggtttaccatccaccaggatggcaccacggcagatggtccagatncc

SEQ ID NO: 994 - DNA, 90 bp, Escherichia coli
  Strain O55:H7
tcacggtatgccgtggtgtggttaccttccttttcatccagaaactggtcgaggatttcaggcgcagaagcacctgcaccaatcagcgcc

SEQ ID NO: 995 - DNA, 23 bp, Escherichia coli
  Strain O55:H7
  modified_base (12)..(13): a, c, g or t
tgatttttgcgnncatggatatt

SEQ ID NO: 996 - DNA, 23 bp, Escherichia coli
  Strain O55:H7
atttcaaatccctggatatgtta

SEQ ID NO: 997 - DNA, 56 bp, Escherichia coli
  Strain O55:H7
tggagtcttcagagaaccagtaattcttcccggtagctttcctytgtaggttatca

SEQ ID NO: 998 - DNA, 151 bp, Escherichia coli
  Strain O55:H7
caacggaccatccccttcacataacccggcarcaayatccatgaaaaactgcttcgcctgytttttcgcctcagcttcgtaaaactccagcgtggcwccttcagtacggtcaagactaatcgccacatgtggcaacaacaacgacggatgc

SEQ ID NO: 999 - DNA, 44 bp, Escherichia coli
  Strain O55:H7
  modified_base (23)..(23): a, c, g or t
ttatccgggtaattatttatccntttaacaaccagttcgtattt

SEQ ID NO: 1000 - DNA, 154 bp, Escherichia coli
  Strain O55:H7
  modified_base (14)..(14): a, c, g or t
  modified_base (116)..(116): a, c, g or t
caaacagcagactncccagcacacctatcgccacccactgggacggagagactttgtccagcagctgcagtaaccagtatcccgtccccaccgctgacgtggtgtatgacacaccngttgtgattttttccatctggtacataccccgtctccc

SEQ ID NO: 1001 - DNA, 223 bp, Escherichia coli
  Strain O55:H7
tccagcaccagactttctatctcaacgccatacgctgcattttttgtaacatccgtcagcgtcagcgcattcagtcccagtgtcagactgtcttttataacctggaatgccgggccagccactccattcagtttcggagtaaccgtggcactgccggcggtgaacaccagctccagcgtctgccagtcgttaccgtaatcgccgaactcccccagcttcgtgt

SEQ ID NO: 1002 - DNA, 329 bp, Escherichia coli
  Strain O55:H7
ttcctgtgatgcatcagattcactctgccgtcagtggtctgagtgaagtacgacatcaggaacggattaccrgtacccgtcatcgccacaccatcaggaacgggagcatccgtatacagataaatccccagcccgaactgattgttggtcagtgcgcctgacaggcggaacttacaggtcagtctgccgccctgtgtcagcagggtaattgcgtcatccaccggatgcgtcagggaccaggttttattgctctgcttggtgatcttaaatacaccatctgacaactgaattccgccatccttaatgctccagccctgcgcagcagcctc

SEQ ID NO: 1003 - DNA, 125 bp, Escherichia coli
  Strain O55:H7
attgtgcgaacggacgtatctgcagacggacccgatggcgtgttgccgccgggcgagggtttgatttccggtgccttaccactgatgaaggctgaggtgcgcccggctgcgttcagaatagcggt

SEQ ID NO: 1004 - DNA, 176 bp, Escherichia coli
  Strain O55:H7
  modified_base (8)..(8): a, c, g or t
  modified_base (65)..(68): a, c, g or t
  modified_base (96)..(97): a, c, g or t
  modified_base (99)..(102): a, c, g or t
ccatgaantgaaatgtgtcgggcggtttgatgatacctggtttccattcgttctcgatgccgcannnnaatatcctgatgccggaatatccgggtnntnnnncggcgcgttagtggcggtattgacgccgttaccgtctgtcatgaagggcacaaaataaacgccctcactctccc

SEQ ID NO: 1005 - DNA, 83 bp, Escherichia coli
  Strain O55:H7
  modified_base (33)..(33): a, c, g or t
gtgtcaccacaaacccacggcacatctgcagcnctgccaccatggcactgcgcgttaaacacggagaggtcagcacgaaactg

SEQ ID NO: 1006 - DNA, 371 bp, Escherichia coli
  Strain O55:H7
agaacgtttttgggatttttctgcaatgccgcttttgtgcgggaaatcagatcctgatataacggcttgcccaccccccagcgtgccgaatcctgactggcccccgtggactcgctgaatgtcccctccgcgccctgggtaaatgccgaaccaccacgacagcatggtaccagcaggatccccgcgttattcgggatatacgggagcagttttttggcaatatgtaaaccctgaccgacacagccgtactgccctttgctcaggtcagccctcggatgattcagcgtactcatatcctgcacatcatgcagacagtggtcagccggaataatatcgttatatctgcaggcagccccacccggcgtcactgt

SEQ ID NO: 1007 - DNA, 357 bp, Escherichia coli
  Strain O55:H7
  modified_base (5)..(6): a, c, g or t
  modified_base (69)..(72): a, c, g or t
cgcgnntccggagcatcgtatgaatccggcagcggaagcccttcaccgtaagccattgcattggactgnnnngccagtacgatgacgtagtaccaatccggctcagatgaagggccgacctgtggctctccttcaatagccaccgcctgcatcagtgtgtacggcgtaatggcaaccggtccgccgtatggctgccagccctctttcagtttgtgtgtcagcttttccgcaaggtctgacggcgacgccgccctgacaacatcatartgtttaatcgacatcgaatttctcccgtgtagaggaacagagttaaaaagccggaagcggaatcaaatcacaggatgaccatctgccagt

SEQ ID NO: 1008 - DNA, 21 bp, Escherichia coli
  Strain O55:H7
  modified_base (13)..(14): a, c, g or t
  modified_base (18)..(19): a, c, g or t
gtttgagaaaaanngaannaa

SEQ ID NO: 1009 - DNA, 130 bp, Escherichia coli
  Strain O55:H7
  modified_base (2)..(2): a, c, g or t
  modified_base (91)..(91): a, c, g or t
gncaaagcatggtgccgggtgcctcccggtgaattcagtaycagcacctgaatccgcgattaccccatattccttcttgctgattgccccnccgcacagggggattcaccatgcagaagtgtttttaata

SEQ ID NO: 1010 - DNA, 39 bp, Escherichia coli
  Strain O55:H7
  modified_base (2)..(5): a, c, g or t
  modified_base (7)..(7): a, c, g or t
  modified_base (27)..(29): a, c, g or t
annnnanaatgccgcagaccagccccnnntccgccagca

SEQ ID NO: 1011 - DNA, 71 bp, Escherichia coli
  Strain O55:H7
  modified_base (70)..(70): a, c, g or t
atgattctgctggtgaaatccaccatcaccaccagaaacagcaggagtgcagccacagtcaggcgcagtnt

SEQ ID NO: 1012 - DNA, 66 bp, Escherichia coli
  Strain O55:H7
aggtaattctccagacgaagacccagaacaccggcaatctcttccagcaccttgcgctcttccggc

SEQ ID NO: 1013 - DNA, 44 bp, Escherichia coli
  Strain O55:H7
  modified_base (2)..(3): a, c, g or t
  modified_base (16)..(17): a, c, g or t
cnncacatcttccgcnncacgcgtatcgtgtttcacatcctcga

SEQ ID NO: 1014 - DNA, 76 bp, Escherichia coli
  Strain O55:H7
  modified_base (57)..(57): a, c, g or t
  modified_base (69)..(71): a, c, g or t
  modified_base (74)..(75): a, c, g or t
aacgccgcacgacgaccagttttaaagttcgtatccagctgaccgataatggttgcnctaatcgcattnnnttnng

SEQ ID NO: 1015 - DNA, 36 bp, Escherichia coli
  Strain O55:H7
cagcgcaggctgattacgcagtacctgttcgatctt

SEQ ID NO: 1016 - DNA, 134 bp, Escherichia coli
  Strain O55:H7
  modified_base (6)..(6): a, c, g or t
ctgcanaggccaccaggtatgcggcgttaatcaccacctgtgccagatcgcgtttttcaaactttttaatttccgttgccgctctgcgggctttttttaccaaaaataccaaacatcgtgacgttcctttgggt

SEQ ID NO: 1017 - DNA, 75 bp, Escherichia coli
  Strain O55:H7
ctgcccacagagaaagtcacactgaccactccgtaagctccccccgaaaggctctgtggttggtatgcgccgggc

SEQ ID NO: 1018 - DNA, 65 bp, Escherichia coli
  Strain O55:H7
  modified_base (35)..(35): a, c, g or t
gtgaccgattgcttagaaggcaattgctctgtccngctgagctaacaacgcagratacmgataat

SEQ ID NO: 1019 - DNA, 143 bp, Escherichia coli
  Strain O55:H7
gatgagctaatggcggtatgtgatggtggcccttgctggatttgaaccagcgacctggcgattatgagtcgctcgctctcaccactgagctaaagggccgggcgcaggataataacgttacgaaatcaatgttgcaagcatac

SEQ ID NO: 1020 - DNA, 760 bp, Escherichia coli
  Strain O55:H7
  modified_base (284)..(284): a, c, g or t
  modified_base (407)..(407): a, c, g or t
  modified_base (757)..(759): a, c, g or t
ctccaccagcgcattcaccatgtctatccgagataagtggcacaacaaaacccgcttgtgggcgggttttgtttgcttttgccatcacgtacaaaatcggcaaaatatcagatttgcatgaaatatatgcctttcaatctacttttgcaacactttgctttgaaaatgccgccttttgttttgaacgtgttctcattacaaataataaagcctcactatccagtcggtgaaaaatgtgtttcattgcaacccagtgacgagtaaatgttttggaccagtttttngttgtcactcccgccagtaatgccagctcctgatattcataaccttccccaccaaaaagttctgcttttactgcctgcgccgccagccagattaattttttcaggcgttcctgcgttttcccngcaatttttctggtaccggattgagtattaaattcattccacgcccactgtgttatcgcgatctgatattcccaacaaatactcccgctgtaacaccacaacaaccaggctttatgatgttcttcaagagacagaacagcccgccgccacgatgatgtcgaaaactcaaccggactgaccagaggaattgacgtcaccttcgccagcgattgctttcccgggattggtggattatcccgcgttatcatttttccagtcacttcatcgcggtaccggattttttttcgcctgtaacgccctgtatcgaacatggcattctcctgccaggcttcaagctgaccttttgttgnnnc

SEQ ID NO: 1021 - DNA, 100 bp, Escherichia coli
  Strain O55:H7
  modified_base (18)..(18): a, c, g or t
  modified_base (96)..(99): a, c, g or t
cgcacaaactgtaaatantggttattcatgcgcactccagttctgtgatttttatccccagccgcccaccaggaacgagctgaccgcgcacaatannnnt

SEQ ID NO: 1022 - DNA, 26 bp, Escherichia coli
  Strain O55:H7
  modified_base (22)..(22): a, c, g or t
atgcgtcagcgcatccagcggngctt

SEQ ID NO: 1023 - DNA, 53 bp, Escherichia coli
  Strain O55:H7
  modified_base (4)..(5): a, c, g or t
  modified_base (47)..(48): a, c, g or t
  modified_base (50)..(52): a, c, g or t
cgcnnatccggtggctctgcaataatctttatcaccagccttccggnnannnt

SEQ ID NO: 1024 - DNA, 20 bp, Escherichia coli
  Strain O55:H7
tcagccgctgctggcgaaca

SEQ ID NO: 1025 - DNA, 112 bp, Escherichia coli
  Strain O55:H7
  modified_base (16)..(16): a, c, g or t
  modified_base (26)..(26): a, c, g or t
  modified_base (55)..(56): a, c, g or t
ttttgatacaaaatangtgctgccangacgtcgccagtaggtattcaccgtcggnnggtaaggcaaaacaaactctatacgcatcagtaacctcttttacccgagcacgccg

SEQ ID NO: 1026 - DNA, 50 bp, Escherichia coli
  Strain O55:H7
  modified_base (6)..(7): a, c, g or t
aaaaannaaatcaacctgggaaccatgcttttcttcgaacgccagcggat

SEQ ID NO: 1027 - DNA, 22 bp, Escherichia coli
  Strain O55:H7
  modified_base (8)..(8): a, c, g or t
  modified_base (20)..(21): a, c, g or t
cctgaccntgaccaatcagnng

SEQ ID NO: 1028 - DNA, 54 bp, Escherichia coli
  Strain O55:H7
  modified_base (25)..(25): a, c, g or t
  modified_base (27)..(28): a, c, g or t
acacggctgtgtcttcacccagcgngnntatttctcatttacccaacggcgacg

SEQ ID NO: 1029 - DNA, 40 bp, Escherichia coli
  Strain O55:H7
  modified_base (17)..(17): a, c, g or t
gatcaacggcaatgctnaccaccgtcttttcctgtggcgg

SEQ ID NO: 1030 - DNA, 23 bp, Escherichia coli
  Strain O55:H7
  modified_base (17)..(17): a, c, g or t
  modified_base (20)..(20): a, c, g or t
gggcgtgaggcagcggngcnaga

SEQ ID NO: 1031 - DNA, 59 bp, Escherichia coli
  Strain O55:H7
  modified_base (11)..(12): a, c, g or t
  modified_base (14)..(15): a, c, g or t
  modified_base (18)..(18): a, c, g or t
  modified_base (21)..(22): a, c, g or t
  modified_base (28)..(30): a, c, g or t
  modified_base (41)..(42): a, c, g or t
  modified_base (49)..(52): a, c, g or t
atgctggtggnngnntgntcnnccggtnnnatgtcgctttnncggtacnnnnagcggat

SEQ ID NO: 1032 - DNA, 23 bp, Escherichia coli
  Strain O55:H7
  modified_base (16)..(16): a, c, g or t
caccaggataattcanccagaga

SEQ ID NO: 1033 - DNA, 59 bp, Escherichia coli
  Strain O55:H7
  modified_base (37)..(38): a, c, g or t
  modified_base (56)..(56): a, c, g or t
tgcatggcgtatgacgtcaatcatccatgctgacaanntttgatgagcaagttgcncga

SEQ ID NO: 1034 - DNA, 75 bp, Escherichia coli
  Strain O55:H7
  modified_base (5)..(5): a, c, g or t
  modified_base (7)..(9): a, c, g or t
  modified_base (63)..(63): a, c, g or t
  modified_base (72)..(72): a, c, g or t
tcacncnnntggttgtcgcagtgccagcacaacaccattgcgccggtaccataacggtgaatnacggtttcnctg

SEQ ID NO: 1035 - DNA, 74 bp, Escherichia coli
  Strain O55:H7
  modified_base (5)..(7): a, c, g or t
  modified_base (41)..(41): a, c, g or t
  modified_base (68)..(68): a, c, g or t
atttnnnatgacgcaacagccagtcagacartgcaccagcnccaccaacagcacgaatcactcgctcntcgctg

SEQ ID NO: 1036 - DNA, 33 bp, Escherichia coli
  Strain O55:H7
  modified_base (31)..(32): a, c, g or t
cagcaatgttttgtcttccaccagcggctgnng

SEQ ID NO: 1037 - DNA, 20 bp, Escherichia coli
  Strain O55:H7
  modified_base (4)..(5): a, c, g or t
  modified_base (10)..(11): a, c, g or t
  modified_base (18)..(19): a, c, g or t
gctnntcggnnccggctnna

SEQ ID NO: 1038 - DNA, 791 bp, Escherichia coli
  Strain O55:H7
  modified_base (9)..(9): a, c, g or t
  modified_base (130)..(130): a, c, g or t
  modified_base (414)..(416): a, c, g or t
  modified_base (505)..(506): a, c, g or t
tcacgaccnggcttaaggaccaccagcccgagttccggtaccagaacaggtcgaagtaatacccgcacgttacctccagatgcgttgctggaatgtgcgggacggacgcggtgggcgctcggagtacggnagcctgacgtagattatccagtgacgataatcgaggctgagggctttcctaaactcatacccacgtctgcggtagttctgaatcagccattcggcctgttcttcagtgcatggggcgtgccggaaccagtcagatttgaatgcatgagaacgccgcccgtgcctgctggcaaagacggctgaattatcagaattgtgtagtctggaattttgcgccatcggctttctccggtggcacagtgttactcaacaggggttcagccctgcgctgaattgtagatgaannnactaatcttcaaaagcagaaaaaccagccttaatcccagcttctttcagagacggcaacgatgtgacaaattcatttgcacgcaaaatnnaaccatccgtcacaagcccatccacaaagtaaattaacgcagctccactcttcctatgtagagactgtaaacatttaatacggcagtggctgacaatagcgccattctcaacgcgcacagtatagaggccatcttcactaaaaatttcacgtaattcttcgattttcatcaacagaatccttccagataaatagcactccccctgttcggggtccatccctcttctccctgcgcgctacttaagtatttttgattctattccggcgccgtccggaacttcaaacg

SEQ ID NO: 1039 - DNA, 458 bp, Escherichia coli
  Strain O55:H7
  modified_base (299)..(299): a, c, g or t
  modified_base (455)..(457): a, c, g or t
gaagcgggttaagtgcgggtgcgttgaggatgcctgacacatcagaggtggcgagggatttctcccccgcctggtctcttactcctcaggttcgtaagctgtgaagacagcgacctccgtctggccggttcggattcgtacctcgcagaggtctttcctcgttaccagtgccgtcactatgacggttaaacagatgacgatcagggcgattaacatcgccttttgctgcttcatagcctgcttctccttgcctttcggcacgtaagaggctaacctacatttgtgagacatagattggncctcagattaatgttaagcgtcttgcaggacgcgtaatgttaactggggcttttctctatctgccttttggtgttcatgcctgaggcagatagcctcaagcacccgcagcaattctacttaactctcgctttaccgcaaaccgtttttacccgatnnng

SEQ ID NO: 1040 - DNA, 37 bp, Escherichia coli
  Strain O55:H7
  modified_base (4)..(5): a, c, g or t
cccnnatcgtaatgaattcagttccctagtcgatcca

SEQ ID NO: 1041 - DNA, 42 bp, Escherichia coli
  Strain O55:H7
ccagtgatatatcatccgacaaattcagttccctagtcgatc

SEQ ID NO: 1042 - DNA, 9323 bp, Escherichia coli
  Strain O55:H7
  modified_base (4)..(5): a, c, g or t
  modified_base (17)..(17): a, c, g or t
  modified_base (21)..(21): a, c, g or t
  modified_base (23)..(24): a, c, g or t
  modified_base (654)..(655): a, c, g or t
  modified_base (1715)..(1715): a, c, g or t
  modified_base (1823)..(1823): a, c, g or t
  modified_base (2710)..(2710): a, c, g or t
  modified_base (3096)..(3096): a, c, g or t
  modified_base (3131)..(3131): a, c, g or t
  modified_base (3184)..(3184): a, c, g or t
  modified_base (3562)..(3562): a, c, g or t
  modified_base (3797)..(3798): a, c, g or t
  modified_base (4267)..(4268): a, c, g or t
  modified_base (4804)..(4805): a, c, g or t
  modified_base (5275)..(5276): a, c, g or t
  modified_base (5374)..(5374): a, c, g or t
  modified_base (6691)..(6691): a, c, g or t
  modified_base (6978)..(6978): a, c, g or t
  modified_base (7210)..(7210): a, c, g or t
  modified_base (7212)..(7213): a, c, g or t
  modified_base (7238)..(7238): a, c, g or t
  modified_base (7526)..(7527): a, c, g or t
  modified_base (7591)..(7592): a, c, g or t
  modified_base (8534)..(8534): a, c, g or t
cacnncagcaacaacanccancnnaccttccattgccagtgatatatcatccgacatattccctcctttggtgttaatcccggcgaacgtttttacccccaccgacaaataacatatactaaaaaagcgatagccatagcaacgcctgtaattgcaaatgcttcaggccagttcattggcgcacctcctgcggcggttctggtagaggcatccagtgtgatggtatccacgacgcaccaggtattatccacccatcattagcgtcaggatgccccgggatgtaagtcgcccatttcattcgccagtcacctttcctgccaaaatccctggcaacaagaacggctgttttggtatccggcattcgctcactacagcttatccaactatccggagttaccggatagttgcccgatagtgcattctgctccagtgatgcttttacaaaccacgctgcctgaactataacgccatgaatccagcgcaaatcagcatcgcgatctttctttttcatcttttcgccacttaaggccttgcttatgtggctgcgtaccaggtcttcatgtaattccttcgcctcctcaatggtgaaaccaccaggcagaagagccggagttaccggagagctggttgacgcttccgggattttccgaaaannattggttgacgaatctttattttcccgaaagtttccggactgaagcatggcttcgcggcaatcgttccagcctgtagcgtatgcagtcgctttgctgctgccttcaactggcgcatcctgccaatacatttcttccggcactatcggcgctggaggggcggcaaatagatatccgccaaagtcaggaagctctctaatggcctgtacgaatttttgtttgcctacgtcaacccctaatgggtaatgagctataatctttgccaccggctctgcttccagcgatgccagcgcaatccgtgccagttccatttgttcaccacgggtaagcccgttttcaagcggatttttaatgaacaattcaatacgttctttggtaatagtggtcatgtgttactccttaacccgcagtgctttcaactgatgaggggaacaaaatcttttcatcaaaccctgcattcatatcatgaacagcaacacaccaatccatcgacgaacgattatcaagagcctccatgatttcatccatgcggcgtaggtcatacaggtaaatgcttttatcgccaatggtgtaaaagccaatttttttcggtgatggacagcgatcaagaacttcctgtaattcgttcaaccatgcccgttctttttttgtcaaagttgccatatcagttttccttatacggattaattttattgtgcagtgtgttgaatgacgcccataccacgtcgttatacaattcaataactggctcaattatttttccgattatccaggctaggattaacggggatatcggtatcatcaacacgataaacagaatgagaaacagaaattctgttgttctactctttcgcggatatttttttctaaataatgtgaccattcattaccgccctttcgggcggcctcctgacattaatcgttgtgataactcatagcttcatttgcagcatcaactggatcaacctccctccagcaataatttgggtcggctccttcaggcgtccacggttctaattcattttttgccgcattctcatcgccagtaattttaaaaatctnctcagagaattttcttgcccactcgttatatttttccgcattaatggctttctgtgtatttaacataaatatacctccagttaaggattagattttatttacagcgcnaaatttatttattcagttctggattttgtcgccctgcgtatccgcgctttcgcgttacgctcaatctgaattaacttttctatatttttccgcctttcctgttcctcctggcgcaatagccttacatcatctgccagtctgttttctcttttcgccacagagagcatccagtcaaacggctccacaactgcaccgcagattttacagcggacctgacgctctttttcgtcaacccgaacagaggcgtgatggcaatatggtctttccgatggctcataaagaaaattaacctgattacgagggttggatttgcccctatatttccatgctcctctcctttgatgcgaatgccagcggtaattgaagcctgatagctaatttcactcacagtaccgcctcctgaaaattaccctgatagaaagccagtacacgctgcatagcttcactcttccggcactcgcgacagattatgtttaggcgactgtcgtagcggcgtatttcgccgtctggtaacgaccagataaggtccggatcaaccacagatgtttttttcttcagctttgcccttgagagttttttgcgggcgttttgccagtccttacgagcctgttcagacgggaataacccgtaaccagagttgtatacatcgccactggcaaccagctctctggcgagaacgctcatcagatatcttgtcgcacctgttttcgcttccagttgtcgtaacgtctcacgcccactctggcgcacgagttcaacaacttgcctcttaattttttcccgctcttcttgtgtaaatacttttgccacaagtcctcctgaaaattacctcatgaccagaaatcaacacttaccccctgaagcccggcggaatttcggtatccggntcagaaatatgattcacacaacgctgtayagacgaacgccccaggcggataaccagttcatcccatttttcgcgaagctttgacggactcatgatrttttttacccagaatggatcccgctgcacccgaccaaacatttcrcaaatttgtctgtgagttctgccatccagcatccgcattgtgcgcacgtcgttggcccatgcggtccagttgggttctttcggtcgcgaaatctcgccatcatcgctggcggcctgctcgtaaagactcacgattcgcccccagatccactgcgcacacgccaaatcgtcctggctgccccactggcgtttttttgcactgaacacaaccgcgtcaggatgtcgggttaaaaaatcctgttcagncgtctgcatgtccggttgcgaagcttccggacganaagtgtttttattctctgtagtaatctctgttgtattctctgtaagatcatcnggccattttgacccgatgacattgggtcgttttgaaccaatggagcgtgtcattttggtctcttccatcgtgtcattttgacctgatggagcggcgcattttgacctgatggattcgctcactttgccaccatctaaaagctcgctctcgtaattaatcgtgtaaaaattagtcatatcacgctttgatttgttgagcttttcgcaacgcaaaagccccagcgttttcagacttgcaaatgcgcgttttaacgttgactctgaccagaacgggaactgttccagccattgttctgttgtgttataaatccagcgaacaccatcacattccatgccggaaccggtatctctcaaccagtaatgcarctgctgcaacacnatggcttcgttcagaccaattttcatcgccagctgcgtgtttataaccagcgggcgttcagcaaaaaggagcttcatcccctccccccccagaacacgttatcaatgcaccaccacggcatttcccgccggaccaccacgattcatctgattgaaaccagcgatcgccactgcgacaaaatcatcagcgtctctcaccagccgttcccgcgtctccaccagctcccgaaaatagnntgaactgtggctgcgcattcgggccaccagcagaggtggcattgctttttcgatcgctggtaacaacgcctgaatttttttaaccgcatcaggggtgtctttctccacccagcggaatattttctgagtattgcgagccagggcttccggatggctgtcgtcatacagttccgggaacgtcattcccagttcgaaatacgctttggtaatcttcgcagtcggtactttttcgccgtccggatgcgcccaggcattcatcgccatgcggatgtgctcatgcttgattttcatgaatcattctttccttcgttcgaggtgctatcctgcctcttgtaaagctctgggttgtatttcaattcaccgttagtaatttcatccagctccattgcgcgaagtttgggaataacagctttccaccgcacaacagccacatgtgaaatcccaagagcctcagctactagtcgctttnntttgaaatggcgcagaacatcatctttgaacataaaactctcctgttatttcgaacatgagggtaacaatagttacattgtaatgtcaaccatagtgacattgcttggtagtaacattgattacatgaaaaacactatcagcgaacgtattcggaatcgtcgaaaagacgttggactaacccaagagcaggttgcaaaagcaatcggcataactcgtgtatccgtaacaaaatgggaaaatggctcttcaaaacctgacggtgagaatttgcatctgctgtcaaaattgctttcaaaatctcctgaatggattctttatggaaaggacgatcacgataaaatcgatgttctgcgtctgaatcagcacctttacattagtgacaacatcgcccggttgcccgttttaacgtgggaacaggctggttattgggatatgagttgcccagtaaccgagattcctggtattaagaattgggttgatgtcatgacaaaaaccgctgaaaactcttttttattgcacgttgagggagattcgnngacgaactctaacggcctcccaacaatcccagacggatctaccgtgctgatcacaccatgctcaagtaacattagagaactggtgggaaaaataatcttaatccaattggaaggtacgccaaacgtaacactaaaaaaagttgcgattgacggaccaaacatctatctgttgtcactgaatccgctttacaaacccattgaactgaatgtcggttacactattaaaggtaaagtttcacaaatacatcaatacttagactaagtcagaacccgcattcattgcgggttttttacacccctggatgtacctcttgtaacatcatgttgacttcaatggtaactcttgttaccttaacaacatacccaccccgccccacagaacgccgggcaatacttcgagttaccaggcagtggtcaggggttaagtagccagcccgaggcgtaagaacatgacggcagggttcaacttnnactatgcagcaggtttttgttccgctaccccggcgttaaggggatatgaggtcagcatggatactcttgatcttggcaacaacgaatctctggtrtgnggcgtgtttcccaaccaggacggcacgttcaccgcgatgacgtataccaaaagcaaaacgtttaaaaccgaatctggcgcgcgtcgctggttagcaagaaactctgactaatgaaatctggtaattaaggaatcctccacggggggagagtggtgcacacgcgccggacacaagcaagcatccggcatgctctttaacaatctggatatccataacagtaaaaatctacagattgccgttcagttttctggccaactcttcaakagatggaggygatacgtaatccggatttttattcataagaaactgattttcacagtacaggcacctgcttttatgaaaaaattcatattctctaaccgggaatggctgaagtatcgatactatcttttgtccaaaacattttggacaaagatgcatgattatgctgccgccgttcacggttacctccttcgagtacacaaaagttcccgactcaagttggctaaggatataaccttccgtctgagcctcaaagttttcaaattctgcaattttagctttgagagaagcatttatttcttgataagtgcccaccagctcaacgagagacacgcattcgcgctgaatagatgcaagctttgagttcagttcaccaatagccgcatttacttcagcttgagtttttgcctcgttcattagttttgcaatctgggcggtttcacgaatagccgtcattgctgccgttaattcagcgatcacattcaatactcttattgttgttggggatatccagattaacaagatccttgttgttggggaataacggggaccacctcgcctgacgtggtaaaaagcaggcacacaacacgaaagcacacggcgaggttgctggttcatagatagcctatcgttaaattttcgtcgaccgtgcgcttccggttgtggcartccgcgaaatggcgcggcggtaagtatggctggggtttcctccattgctccagaaaatgcaccgggttgtcaggttgaccatacgcttaagtgacaaccccgctgcaacaacccatgttgattaccttttggcgggtatccgttttttgttttcccttgtgatacccgccctttttaaagtgaattttgtgatgcggtgaatgcggctmagcgcacgcggaacagttaaaaaggccagttgacttccgtattggttcttatgggtggrttctctgtatccggcgttaattgttaactggaggcaccaggcacygcatcacaaaattcattgttgaggacgcgataatggaaacgttattaccaaacgttaatacgtctgaaggttgntttgatattggtgttctgctcagtaataaagcgtttactgaggatgccattaatatgcggaaatatgagccttatctgctcaatgataattccatactttcccgaattgctcttcttgaacttggtattttcggagaacagcagtgacctcagcatttgcactggtgatgaccgtttttcttataacgggtgagccgcagaatgtaattaccggaatttatgacagtaagtcatcctgcattcaggtaagggacgaacaaaaaatccccggtgaatgcctcccgttnaaaaaagtgtcgctgaacctgaataacgaaataccggctggataaccctccagccatattaacgccataccaacggattaaaaataccagcaatggcaggaatttgttcatccttaaaatggttatgaggtttatcaatgaacgctgataaagaagaaattgcactatattacgaagccaaaaatgacaaagtcagaaaacgccttgggattaaaggtggtttttactggcncnnagcaaaaaaattatcggttgcaatntcacgcggtgttgctgcaatggacgatgccggatttgacgaagaggattttaaaaaacccatccgcgtccatttacccgttgtgaatgaccttccaccggaaggtgtgtttgatactgaattctgcaaccgatacgaaaaaggcggagaagatggtatcacaatgatacttatcgcgccctctgttccggacaaaccagccagtactgacaataccaacgtcaacggcgaagacatggctaagattgaggagaatatgcttcttccggtttcaggtcagattctgccnnttcgctggctggcgcaacacaacagcgaaaaaccggtcacgcacgtttcactggacaaactgcnngcattacataacgcacaggatgaaaaacttcccgccgttaccgcgctggccatctcaaataaagcagtgcaactcgaaccgctggagattcgggatttgtacaaactggtgcgagacactgacaaagttttccccgcccccgtaaattcggacctgggactgatgacctcttttatcgaagcatacctgggcgctgactacaccgatcgcggtctgcttacaaaagagtggatgaaaggaaatagtgtttcacgcatcagccgcacgccatccggcgctaacgctggcggcggcattcttaccgatcgcggcgaaggttttgtccacgatgatgcgtcagtggcgcgtgacgtagccactggcgtactggcccgttcaatggacgtggatatttataaccttcatcccgcacacgctaaacgcattgaggaaattatcgctgaaaataaaccgccatttactgtgtttttcagcaaattcatcaccatgccgggccacaaggattactcccgcgccatcgtggttgcgtccgtgaaagaagcaccaattggtatagaggctactccccaccgtgtcaccgaatacctgaataaggtgctgactgaaaccgatcatgccacccctgatccggaaatcgtggatattgcctgtggccgctcctctgccccgatgccgcagcgtgtaacaaaagaaggaaaacaggatgatgaagaaaaaccgcagccatctggcgcaatggcagatgaacaggcaacgactgaagcagtggaaccggatacaactgaacataatcaggacacgcagtcgatggatgctcagccacagataaattctgttgatgcgaaatatcagaaactgcgtgcagaactccatgaagccaagaaaaacattccacccaaaaatcctgtcgatgcagataaattactggctgcttctcgcggngaatttgttgaagggattagcgacccgaatgatccaaaatgggtgaaggggatccagagtcgcgatgatgatgaccagaatcaggataaagcggaacaaaacagcccaaatgcgttacaaaacgagccaaaaacaaaacaaccagaaccagtagtgcaacaagaaccagaaaaagtttgcaccacatgtggtcagaccggtggcggcaactgtcctgactgtagtgcggtgatggggaacgcaacctaccaggaaacattcgatgaagagaatcaggctgaagctcagaaaaatgatccggaggaaatggaaggcactgaacatctgcacaaggagaacactggcagcgatcagtatcacgccagcgataataaaactggcgaaacagcaaatcccttaattaaagtgaacggtcatcatgaaatctcatccaccagcaggttgtggcaccatctgatgattgaccttgaagcaatgggaaaaaatcctgatgcgccaataaacgctatagccggtaagttttttgatccggcaaccggagatatggggccagaattcagcaaaactatcgatctggaaaccgcaggcggggtcatcgatcgggacaccattaagtggtggctgaaacagtcacgcgaagcacaatcctccattctgaccgatgaaatcccgttggatgatgcactgctgcaattacgggaatttatcgacgaaaactccggtgaattttttgttcaggtctggggtaacggtgcaactttcgacaacgtgattttacgccgttcatat

SEQ ID NO: 1043 - DNA, 882 bp, Escherichia coli
  Strain O55:H7
  modified_base (225)..(228): a, c, g or t
  modified_base (233)..(233): a, c, g or t
ggatcccctgcccgtggcgttacaccaatgatcgcgatgtaagaacgatggttgctctgggactggtgatggatttcgacgcaagaacgactattccattcgaaggtgaacgccataacgccctgcacgatgcgcgttaccaggcaaaatacgtttcagccatctggcaaaaactgatcccgagtcaggctgatttttaatgttcaacccggatcgccgctaacnnnntatanttagcggcggttgtgagatatagctatgagcagcatatttttaaccgaaaatgaattgcaaacgttaacgggctgcaaatatgcaagccaccagcgcaactggttaataaaaaatgggcttccgttctataccaatcgtagtggaaaaccgatcgtcagtcgggaactgtttacctgtataaaaactttaccaccacgtgaggctgaacctgatttcggtgcgatctaatgggaagacgaaggaaaaatcccgaacacgaaaaattaccgccaaaggtataccccaataaatatagtgtatggaaaccgacatccagagaatctgtaaccttaactgcaatcgaggatggtttagccgcattatggaaaaagtatgaagaaacggttaaccatcgcgatcgcgcaatgacatttgggcgtttgtgggaaaaatttctcgccagcgcctattacagcgagcttagtcctagaactcaaaaagattatctgcaacatcaaaaaaagttgctggccgtattcggtaaggtgctggccgattctgtaaaaccagagcacatcagacgatacatggacaaaagaggcgagcagagtaaaacgcaggcaaaccatgaaaaaagcagtatgtcgcgcgtttatagttgggggtatg

SEQ ID NO: 1044 - DNA, 20 bp, Escherichia coli
  Strain O55:H7
taagtaaattcaaggcaaaa

SEQ ID NO: 1045 - DNA, 22 bp, Escherichia coli
  Strain O55:H7
cgatgtgttatctctgaaatgg

SEQ ID NO: 1046 - DNA, 23 bp, Escherichia coli
  Strain O55:H7
tctttatccagcaaggtaaaaca

SEQ ID NO: 1047 - DNA, 27 bp, Escherichia coli
  Strain O55:H7
  modified_base (26)..(26): a, c, g or t
taatcagcaatcagtacggcaaccgnt

SEQ ID NO: 1048 - DNA, 23 bp, Escherichia coli
  Strain O55:H7
ttttctctggtcacaagaccgaa

SEQ ID NO: 1049 - DNA, 41 bp, Escherichia coli
  Strain O55:H7
aaatattccaagtaattccaagtgtgatttttatcactgac

SEQ ID NO: 1050 - DNA, 10719 bp, Escherichia coli
  Strain O55:H7
  modified_base (5126)..(5126): a, c, g or t
  modified_base (5138)..(5138): a, c, g or t
  modified_base (6293)..(6293): a, c, g or t
  modified_base (6314)..(6314): a, c, g or t
  modified_base (6327)..(6327): a, c, g or t
  modified_base (6672)..(6672): a, c, g or t
  modified_base (6701)..(6701): a, c, g or t
  modified_base (6714)..(6714): a, c, g or t
  modified_base (7507)..(7510): a, c, g or t
  modified_base (7934)..(7934): a, c, g or t
  modified_base (9805)..(9805): a, c, g or t
tgtaagtgattgaattttggcggagagagggggatttgaacccccggtggagttgcccccactccggttttcgagaccggtccgttcagccgctccggcatctctccgttcagatggttgccatgatgccaggaaatttggcattttaacagtccctgtccgtgcaattttgttcaagtgacgagtttgcgagcaaaacgatgattaagtggccctggaaagtacaagaatcagcacatcaaactgcccttccctggcaggaagcactatcgatcccccttttaacgtgtctgacggaacaggaacaaagcaaattagtcactcttgccgaacgttttttacagcaaaagcggcttgttcctttacagggctttgaactggattcattaagaagctgccggatagcacttctattttgcctacccgttctggagttaggactggaatggctggatggttttcatgaagtcttaatttatcctgcgccatttgtggtcgatgatgaatgggaagacgatatcggtctggtgcataaccaacgtattgttcagtcaggtcagagctggcagcaagggcctatcgttttgaactggttggatatacaagattcttttgatgcttctggttttaacctgattattcatgaagtcgctcataagctggacacccgtaacggcgatcgcgccagcggagttccctttattccgttgcgtgaggttgctggctgggaacacgatcttcatgctgcaatgaacaacattcaggaagaaatcgaattggttggcgagaatgcggcgagcattgatgcttatgctgccagtgatcctgctgaatgttttgccgtactttctgaatatttctttagcgccccagaactttttgctcctcgtttcccttcattgtggcaacgtttctgccaattttatcaacaagatcctttgcagagactgcatcacgctaatgatacagactcgttttcggcgacgaatgttcattaattaacaactttgcagattaattaaccaattgaaatgacttatgaaatttagtgttgacagacaaggtaccgctaagtaatatgcgccccgttcacacgattcctctgtagttcagtcggtagaacggcggactgttaatccgtatgtcactggttcgagtccagtcagaggagccaaattctaaaaattcgcttttttagcgcaatgtcactgaccttagttgaacattgttttttaacggatagcgggtttttaacatcttaagcgccctcgacctttatggttgagggcgttttgctatgaacgccatcaccattttcccctcgattataaaacttgagttattcagtagtctcccctcttgcaactcacatccaaaactgcctaacgaaaagttattaattttcaatcatattgctatcaggatttacattttttcgctgtgctagaaagggcgcatttatgttagctcgttcagggaaggtaagcatggctacgaagaagagaagtggagaagaaataaatgaccgacaaatcttatgcgggatgggaattaaactacgccgcttaactgcgggtatctgcctgataactcaacttgtgttccctatggctgcggcagcacaaggtgtggtaaacgccgcaacccaacaaccagttcctgcacaaattgccattgcaaatgccaatacggtgccctacacccttggagcgctggaatcggcccaaagcgttgccgaacgtttcggtatttcggtggctgagttacgcaaactcaaccagtttcgtacgtttgctcgaggttttgataatgtccgccagggtgatgaactggatgtcccggcacaagttagtgaaaataatttaaccccgccaccgggtaatagcagtggcaaccttgagcaacagatagccagtacttcacagcaaatcgggtctctgctcgccgaggatatgaacagcgagcaagcggcaaatatggcgcgtggatgggcctcttctcaggcttcaggcgcaatgacagactggttaagccgcttcggtaccgcaagaatcacgctgggcgtggatgaagattttagcctgaagaactcccagttcgattttctccatccgtggtatgaaacgcctgataatctctttttcagtcagcatactctccatcgtactgacgagcgtacgcagattaacaacggcttgggttggcgtcatttcactcccacatggatgtcgggcatcaacttctttttcgaccacgatcttagccgttaccactcccgcgccggcattggcgcggagtactggcgcgactatctaaaattaagcagtaacggctatttgcgactgaccaactggcgcagcgcacctgaactggacaacgattatgaagcacgcccggccaatggctgggatgtacgcgcagaaggctggctacccgcctggccgcaccttggcggtaaactggtctatgaacagtattatggcgatgaagtggccctgttcgataaagatgatcggcaaagtaatcctcatgccataaccgctggacttaactatacccccttcccgctgatgaccttcagcgcggagcaacgctagggtaaacagggcgaaaatgacacccgttttgccgtcgattttacctggcaacctggaagcgcgatgcagaaacagcttgacccgaatgaagtcgatgcacggcgtagccttgcaggcagccgttttgatctggtggatcgcaacaacaacatcgttctggaatatcgcaaaaaagaactggttcgcctgaccctgacagaccccgtgacagggaagtcaggagaagtgaaatcactggtttcgtcgctacaaaccaaatatgccctgaaaggctataacgtcgaagccaccgctctggaagctgccggtggtaaagtggttacaacgggtaaagatattctggttaccctgccggcgtaccggttcaccagtacgccagaaaccgataacacctggccgattgaagtcaccgctgaagatgtcaaaggcaatttttcgaatcgtgaacagagcatggtagtcgttcaggctcctacgctaagccagaaagattcctcggtatcgttaagtagccagacgttgagcgcggattcccattcaaccgccacactgacttttattgcgcatgatgcagcaggtaatcctgttatcgggctggtgctctcgacgcgtcacgaaggtgttcaggacatcaccctttctgactggaaagataatggtgacggaagctatacccagatcctgaccacaggagcgatgtctggcacgctgacgctgatgccacagctgaacggtgtggatgcggctaaagcccccgccgtggtgaatatcatttctgtttcgtcatcccggactcactcgtcaattaagattgataaggaccgttatctctccgggaatcctatcgaggtgacggtagaactgagagatgaaaatgacaaacctgttaaggagcaaaaacagcaactgaataccgcagtcagcatcgacaacgtgaaacctggtgtcactacagactggaaagaaaccgcagatggcgtctataaggcaacctataccgcctataccaaaggcagtgggcttactgcgaagctgttaatgcaaaactggaatgaagatttgcataccgctggatttatcatcgacgccaacccgcagtcagcgaaaattgcgacattatctgccagcaataatggtgtgctcgccaatgagaatgcagcaaacaccgtctcggtcaatgtcgctgatgaaggaagcaacccaatcaatgatcataccgtcacgtttgcggtattaagcggatcggcaacttcctttaacaatcaaaacaccgcaaaaacggatgttaatggtctggcgacttttgatctgaaaagtagtaagcaggaagacaacacggttgaagtcacccttgaaaatggcgtgaaacaaacgttaatcgtcagttttgtcggcgactcgagtaccgcgcaggttgatctgcagaagtcgaaaaatgaagtggtcgctgacggcaatgacagtgccacaatgaccgcgacagttcgggatgcaaaaggcaacctgctcaatgacgtcaaggtcaccttcaatgtcaattcagcagcagcgaaactgagccaaaccgaagtgaatagccacgacgggatcgccacagctacgctgaccagtttgaaaaatggtgattatacggttacggcctctgtgagctctggttctcaggctaatcaacaggtgatttttatcggtgatcaaagtactgctgccctgaccctcagtgtgccttcaggtgatatcaccgtcaccaacacagctccgctacatatgactgcaaccttgcaggataaaaatggcaatccactaaaagataaagaaatcaccttctctgtgccaaacgacgtcgcaagtcggttctcgattagcaacagcggaaaaggcatgacggatagcaacgggactgcaatcgcctccctgaccggcacgttagcgggcacgcatatgatcacggctcgtctggctaacagcaatgtcagcgatacacagccaatgacgtttgtggcggataaagacagagcggttgtcgttctgcaaacatcgaaagcggaaatcattgggaatggcgtggatgagacgactctgacagcaacagttaaagatccttttgataacgtggttaaaaatctttcagtagtcttccgcacctcccccgcagacacgcaactgagtctgaacgcgcgtaatactaatgagaacggtattgccgaagttacccttaagggcacggttttgggtgttcatacagccgaagccatactgcttaacggcaacagagatacgaaaatcgtcaatattgcgcccgatgccagcaacgcgcaggtcaccctgaacatccctgcacaacaggtggtgacgaataacagtgacagcgtgcagctgacggcgacggtgaaagacccgtcgaatcatccggtggcgggaataacggtgaacttcaccatgccacaggacgtggcggcaaactttacccttgaaaataacggtattgccatcactcaggccaatggcgaagcgcatgtcaccctcaaaggnaaaaaagcgggnacgcatactgtgaccgcaacgctgggtaacaataatgccagcgatgcgcaaccagtcaccttcgtggcggataaggacagcgcggttgtcgttctgcaaacatcgaaagcggaaatcattgggaatggcgtggatgagacgactctgacggcaacagtgaaagatccttttgataacgcagtaaaagatctacaggtcaccttcagtaccaaccccgcagatactcaacttagtcagagcaaaagcaatactaacgacagtggtgtggccgaagttacctttaagggcacggttttgggtgttcatacagccgaagccacactgcctaacggcaacaacgatacgaagatagtcaatattgcgcccgatgccagcaacgcgcaggttacgctgaacatccctgctcaacaggtggtgacgaataacagcgacagcgtgcagctgacggcgacggtgaaagatccgtcgaatcatccggtggcgggaataacggtgaacttcaccatgccacaggacgtggcggcaaactttaccctcgaaaataacggtattgccatcacccaggccaatggggaagcgcatgtcacgctcaaaggtaaaaaagcgggtacgcatacggttaccgcaacgctgagtaataacaataccagtgattcacagccggtaacgtttgtggcggacaaaacctcggctctggttgttcttcagatatcaaaaaatgagatcacaggtaatggcgtcgatagcgcaacgctaactgcaacggtcaaagatcagttcgacaatgaggtgaacaatcttccggtaacattcagcacagcttcttcaggcctcaccctgaccccaggggaaagtaataccaatgagtctggcatcgcgcaggccactctcgcaggcgttgcctttggtgagcagacggtcactgcatcactggctaataatggtgccagcgacaacaaaactgtgcattttattggcgacacagcggcggcaaaaattatcgagttgacgcctgtcccagacagcataatcgcaggtaccccgcagaacagctccggcagcgtcatcaccgccacagtcgttgataataatggctttccggtgaaaggtgtgactgtgaacttcaccagcaacgcagcgacagccgaaatgacnaatggcggtcaagccgtgacnaacgaacagggtnaggctaccgtcacttataccaatacccgctcctcgatagaatcaggagcgagaccggataccgttgaggccagtctggaaaatggtagctccacgcttagcacatcaattaatgtcaacgctgatgcgtctacggcacatctcaccttgctacaggcactttttgatacagtctccgcaggcgacactaccaatctgtatattgaggtgaaggataattacggcaacggagtaccccagcaggaggtaaccctcagcgtttcaccaagtgaaggtgtgacccccagtaataacgctatatatacgaccaatcacgacggcaatttttacgcaagctttaccgctncaaaagccggggtataccaagtgacggcnaccctcgaaaatngcgattcgatgcaacaaacagtgacctatgtgccgaacgtagcgaatgctgaaatctcgctggcagcctcgaaggatccggtaattgccaacaataacgatctcacgacactaacagcaacagtcgctgatacagagggcaatgcgatagccaacagtgaggtaacatttactctgccggaagatgtgagggcgaacttcacgctgggcgatggcggtaaagtggttactgatactgaaggcaaagcgaaagtcacgctgaaaggtacaaaagcaggcgctcatactgttacagcatcgatggctggcggtaagagtgagcagttggtggtgaactttattgcggatacactcactgcgcaggttaatcttaacgttaccgaggacaattttatcgctaataacgtcgggatgaccaggctgcaggcaacagtgactgatggaaacggcaacccgttagccaatgaggcggtgacattcacgctaccggcagatgtgagcgcaagctttactctcggacaaggcggttccgccattactgacatcaacggcaaggctgaagttacactgagcggtacaaaatccggcacctaccccgtgacagttagcgtgaacaattatggtgtcagtgatacgaaacaggtgactttgattgccgatgctggtaccgcaaaactagcctccttaacctctgtatactcattcgtcgtcagcacgaccgagggcgcgaccatgactgcaagcgtcactgacgctaacggcaacccggtagaaggtataaaagttaatttccnnnnaacttccgtcacgctaagcagcaccagcgttgaaacggatgatcggggtttcgctgaaattcttgtgacaagcaccgaggtcggactgaaaacagtttcagcctctctggcagataaacctactgaagtcatctcgcgattactgaatgcaaaagcagatattaattctgcaacgattaccagtctggagatacctgaaggtcaggtcatggtcgcacaagacgtagcagttaaagctcacgtcaacgaccagtttggcaatccgattcttaatgaatctgtaacattcagtgcagaaccaccagagcacatgaccatcagccaaaatattgtctctactgatacgcatggtatagccgaggtcactatgacgcccgaaagaaacggttcgtatatggtgaaagcatccctggcgaatggatcntcttatgagaaggatctggtggtaatcgatcaaaaactgacactctcggcgtccagcccgcttatcggtgtcaattccccaacaggtgcaactctgacggcaacgctaacttctgcaaatggcactccagtggagggtcaggtcatcaactttagcgtaacgccagaaggtgcgacgttaagtggcggaaaagtgagaaccaactcttcaggtcaggctccagtcgttctgaccagcaataaagtcggtacatatacggtgactgcatcgttccataacggcgtaacaatacagacacagacaatcgtgaaagtcactggcaactcaagcaccgcccatgttgctagctttatcgctgatccatcgactatagccgccaccaacagtgatttaagtaccttaaaggcaacggttgaggatggcagtggtaacctgatcgaaggtctcactgtgtacttcgccttaaaaagcggctctgccacattaacgtcattaacagcggtgacagatcaaaacggaatcgcgacaacaagcgtgagaggagcgataacggggagcgtcacggtaagcgcagtcacgaccgctggtggaatgcaaacagtagatataacgctggtggcaggcccggcagacgcctcgcagtccgtccttaagaacaatcggtcatcattgaaaggagactttaccgatagtgctgagctacatcttgttctgcacgatatatcaggcaatccgatcaaagtttctgaagggctggaatttgtgcagtcaggtaccaacgcgccctatgtgcaagttagtgcaattgactacagtaaaaatttctcaggcgagtacaaagccactgttacaggcggcggagagggtatcgcaacgctgatccctgtattgaatggtgttcatcaagcgggtctgagtaccacaatacaattcactcgcgcagaagacaaaataatgagcggtacagtgttagtcaatggtgctaacctaccgacaactacattcccttcgcaggggttcactggggcgtattatcagttgaataatgacaactttgccccaggaaaaacggcggctgattatgagttttcaagctctgcctcctgggttgatgttgatgctaccggtaaagtgacatttaaaaatgtcggcagcaaatgggagaggattacggcgacgccaaaaacaggcggccctagctatatatacgaaatccgagtgaagagttggtgggtgaacgccggcgatgctttcatgatatacagccttgctgaaaatttttgcagtagcaatggctacacacttccccttggagaccatttaaaccatagtcgttcccgaggcatcgggtcactgtacagtgaatggggagatatggggcattacacgactgaagctggttttcattcaaatatgtattggtcatcgagtcccgcaaactcaaacgaacaatacgtagtttccctggcaacaggtgatcaaagcgtatttgaaaagcttgggtttgcttatgcgacatgttataaaaacctctgattttccgttataatttcttaaagagtgctccattcggggcactcttttttacattccctctatagagcttgcccttctctcacagaaaatgaataaataaaaatgcgataccgcaagaatcgcgttcgatgtgactatgatcgtatccggtgagtacagcttttatccaaaggctggttttctgtgatgattgaccagcctcagagtattgatgacaccaccgttcataacagatcggcattactatgcataagtactgtctcatattctcgccaaaacactttttaatgcctttgcgaattcatccagacttatattgtcaattttttgcccancgacgactgactccgaaacatcggccattgcgggccatcgcgttttgtaatcagcataaattgcaacaacgggggtattataggcacttgccatatgtaatattgaggtgtcaggagttattgcgatataagcatcttttatgattgctgctgaacgtttaatcgagggtgataaggataaacggtagacattattataacaatccactaataccctggctttatcttccccttttggtccatgaacgatcactattggtatatctgtttcactttgaattttttctattagattttctgcaatcgatagtgaaaatgtacgatcctgcgagctaccttctaaattaagcgcaatgtaagatcctaacgatcgcatttcctcgcgcacctcatcgagtacatcctcacttagtggcaattcatatattggcctgactgctggaaaacccgcctcacgcatcataaatgcccatgtcatgggtacgggagcccggagtttctgatccatccgggacgcgttcttacacacaggggaatagcacttcatggttaaaccaacaacctgaaaattcgtttttgctttcaactgactgataaataacatcgttttcaggttctttttacgcatcgcctctatacaaagatccggcgtaccgtattgctgtgttatgttcttcgctaaatcttttatttcttttaatgttgcgtgatcctgcatagtcattgtgactaatgttaatttagtctgttcaagtttgagcgcattaaagacttctaaattaattgtcgacgtaacaattaatagatgcttaattttatgcaattcaagcgcccgaataacaggaaagatggccatagcatcgccaatctgatcgggaatatggatgacaacaaagtctgttttttcaatattg

SEQ ID NO: 1051 - DNA, 6444 bp, Escherichia coli
  Strain O55:H7
  modified_base (1073)..(1074): a, c, g or t
  modified_base (1298)..(1298): a, c, g or t
  modified_base (1547)..(1547): a, c, g or t
  modified_base (3437)..(3438): a, c, g or t
  modified_base (3441)..(3443): a, c, g or t
  modified_base (3610)..(3613): a, c, g or t
  modified_base (3653)..(3655): a, c, g or t
  modified_base (3932)..(3932): a, c, g or t
  modified_base (5987)..(5987): a, c, g or t
taagctttataatcgtagtaactaaatgcaatacgtctcaacaatgatactaaaaacataactaacctcgcctccctactggttataatgcaatgcagtctatcagaatcatcagggtgcaattttgtgcatatgcggacttttatgtttcatatctcgaacctgtggggcctctgcttaatccttaaacaacaccagcaactcctgcgctttcatcttccagcgaatttttcatgttgccgttaatcagccataaaatcatttgcagatgcgctctgtcgaggtagtctcataaggttcgtttatagatcgacgcaatgtgagttaccttttccatactaattataaaaagacagtacaaacaggatcattatggactccacgctcatctccactcgtcccgatgaaaggacggtttcgttaagtcgcgcccgacgagctgcgttaggcagtttcgctggtgccgtcgtcgactggtatgattttttactctatggcattaccgccgcactggtgtttaatcgcgagtttttcccgcaagtaagcccggctatgggaacgctcgccgcatttgccacctttggcgtcggattccttttccgtccgctcggcggtgtcattttcggtcactttggcgaccgactgggacgtaagcgcatgttaatgctgaccgtctggatgatgggcatcgcgacagccttgattggtattcttccttcattctcgaccattgggtggtgggcacctattttactggtgacgctgcgtgccattcagggatttgccgtcggcggcgaatggggaggcgcggcgttgctttccgttgaaagtgcaccgaaaaataaaaaagccttttacagtagcggtgtacaagttggctacggtgtaggtttactgctttcaaccggactggtttcattgatcagtatgatgacgactgacgaacagtttttaagctggggctggcgcattcctttcctgtttagcatcgtactggtactgggagcattgtgggtgcgcaatggcatggaagagtccgcggaatttgaacaacagcaatataatcaagcggnngcgaaaaaacgcatcccggttatcgaagcgctgttacgacatcccggtgctttcctgaagattattgcgctacgactgtgcgagttgctgacaatgtacatcgttaccgcctttgcacttaattattcaactcagaatatggggttaccgcgcgaacttttccttaatattggtttgctggtaggtggattaagctgcctgacaattccctgttttgcctggcntgccgatcgttttggtcgccgcagggtttatatcacaggcgcgttgatcggaacgttgagcgcatttcctttctttatggcgcttgaagcacaatctattttctggatagttttcttctccataatgctggcaaacattgcgcatgacatggtggtgtgtgtgcaacaaccgatgtttaccgaaatgtttggtgccagttatcgctatagtggtgctggagtcggttatcaggttgccagtgtggttgncggtggatttacaccttttattgccgctgcgctcatcacttactttgccgggaactggcatagcgtcgccatttatttgctggctggatgtctgatttccgcaatgaccgctttgttgatgaaagacaatcaacgcgcttgatagtctggcgaagatcatccgatcttcgccttacacttttgtttcacattcctgtgacatactatcggatgtgcggtaattgtatggaacaggagacacacatgaataataagggctccggtctgaccccagctcaggcactggataaactcgacgcgctgtatgagcaatctgtagtcgcattacgcaacgccattggcaactatattacaagtggcgaattacctgatgaaaacgcccgcaaacaaggtctttttgtctatccatctctgaccgtaacctgggacggtagcacaacaaatccccccaaaacgcgcgcatttggtcgttttactcacgcaggcagctacaccaccacgattactcgccctactctctttcgttcgtatcttaatgaacaacttacgttgctgtatcaggattatggcgcgcatatctcggtgcaaccctcgcagcatgaaatcccttatccttatgtcatcgatggctctgaattgacacttgatcgctcaatgagcgctgggttaactcgctatttcccgacaacagaactggcgcaaattggcgatgaaactgcagacggcatttatcatccaactgaattctccccgctatcgcattttgatgcgcgccgcgtcgatttttccctcgcgcggttgcgccattataccggtacgccagttgaacattttcagccgttcgtcttgtttaccaactacacacgttatgtggatgaattcgttcgttggggatgcagccagatcctcgatcctgatagtccctacattgccctttcttgtgctggcgggaactggatcaccgccgaaaccgaagcgccagaagaagccatttccgaccttgcatggaaaaaacaccagatgccagcatggcatttaattaccgccgatggtcagggtattactctggtgaatattggcgtgggaccgtcaaatgctaaaaccatctgcgatcatctggcagtgctacgcccggatgtctggttgatgattggtcactgtggcggattacgtgaaagtcaggccattggcgattatgtacttgcacacgcttatttacgcgatgaccacgttcttgatgcggttctgccacccgatattcctattccgagcattgctgaagtgcaacgtgcgctttatgacgccaccaagctggtgagcggcaggcccggtgaggaagtcaaacagcggctacgtactggtactgtggtaaccacagatgacaggaactgggaattacgttactcagcttctgcacttcgttttaacttaagccgggccgtagcaattgatatggaaagtgcaaccattgccgcgcaaggatatcgtttccgcgtgccatacgggacactactgtgtgtttcagataaaccgttgcatggcgagattaaacttcccggtcaggctaaccgtttttatgaaggcgctatttccgaacacctacaaattggcattcgggcgatcgatttgctgcgcgcagaaggcgaccgactgcattcacgtaaattacgaacctttaatgagccgccgttccgataataagttctgaaccttcttatcaaaaatagatgtgaaggattaagtaagacatctggcaaatagcccgcaataaacgcgggctgtttgcttccttgggcggatacgagttttattatcgtcttaatgatttccacatattaaaagcaagtatgctttcaaaacacaattataaaaaatcccgccaacaatatnngtnnntataaaattaaatataagattatggctttagaatatttttatttctaatagacgagatttttcctgttatgatataatatgccgaattaacacatgttaacgatttaccagtaatgtaaataaattttcgaggagatcattccagtgggacgtaaatgggccaatannnntgctaaaaaaacggctaaagacggtgcaacgtctaaaatnnntgcaaaattcggtgtagaaatctatgctgccgctaaacaaggtgaacccgatccagaattaaacacatctttaaaattcgttattgaacgtgcaaagcaggcacaagttccaaagcacgttattgataaagcaattgataaagccaaaggcggcggagatgaaacattcgtgcagggccgttatgaaggctttggtcctaatggctcaatgattatcgccgagacattgacttcaaatgttaaccgtacgattgctaacgttcgcacaattttcaanaaaaaaggcggcaatatcggagcggcaggttctgtcagctatatgtttgacaatactggtgtgattgtatttaaaggatcagaccctgaccatatttttgaaattttacttgaagctgaagttgatgttcgtgatgtgactgaagaagaaggtaacattgttatttataccgaacctactgaccttcataaaggaatcgcggctctaaaagcagctggaatcagtgagttctcaacaacagaattagaaatgattgctcaatctgaagttgagctttcaccagaagatttagaaatctttgaagggcttgttgatgcccttgaagatgacgacgatgtacaaaaagtttatcataacgtcgcaaatctctaattatattttaaagaaatctgtctttacggcagatttctttaatctcatataatccttataaaaaatataatgttcaactcgtcatattgcttataaaaaatccccgttcccggagaaataatatttattaaaattccaggtcttctttttctgattaccgaagacaaagtggcaattacgtatagtttcccgataaagacgcgacagcgacatcccgcataaggcattttttctttatctttgtacggtacttcatggaacagagtttttgaccttgcgaatcgtgatgtctgttgggggcaatttactcactgaagcgtgagactcgattaagcgcacgaaacacagaaatcaaaaaaaccggtcactttttacaaggcaaccgggtaaaaataatttttattttttaactgccctgagactcataaagatgcctcaaaactaaaatttggctcctctgactggactcgaaccagtgacatacggattaacagtccgccgttctaccgactgaactacagaggaatcgtgagaacgaggcgaatattagcgatgcccacccacaatgtcaaagcctgttttttaaatttgaaatcgtttgctgaaataatctgcattttgtcgtttattccgacacagctggctttttttcacacttttgcggttcgggtcgagggtatttccacagccaacgtccagtaaccattcgccagtaaaacagcacggcccgcacagcccagtcggcaaacattcccatccagacaccaaccacaccccagccaagcatgatgcccagcacataaccgacgacaacccgacaacctcacatgctcaacatagaaacccacatagcgtaacgggcgtcacgagcccccttaaatccagcgggtagcacccatgaagcggaccaaataggcataaataaagcatttagccaaatcagaatcacaacgacatgtttaacctgtggatcctgggtgtaaaacgatgccataaccccggcaaagggagccgttagccaggcgatggccgttaatccaagagtggacagccaaaacacatgccgcaactgaatctctgcttgcgctatctgccctacccccaaccttcggcctgtaatgatcgtagaagcagaaccgagcgcacttccgggtaagttgataagagccgcaattgaaaacgcgataaaatttccggcaataacactggtccccattccggcaacgaacatttgggttaataaccgaccactggtaaataacactgattcgacactcgctggaataccaatccccatgacttcccagataatgctaaaattcagcggtttaaaatagctctttaacgaaatccttagcgcaggattaaaaccaatcgccagcacccacaaaattgcaactgcgccaatataacgagaaatggttaaacccaacccagccccgacaaatcccagtcccggccaggagaaaaggccgtaaatcaatatgccgctaataataatattaagaatattcaggctaccgttaatcagtagcggtattttcgtattccctgcaccacgaagtgccccgctaccaattagagtgatggcagctgctggataactgagtaccgtcagctccagataagtcaacgccagtgctttaacttctgtcgtggcatcacccgcgacgaaatcaatantttgctcgccaaaatgatgaataagcgttgccaacagtacggcaaacaacgtcatgatcaccaatgactgccgcgtcgccaccctcgctcgtcgtcgatcccgcttaccgagactaaatgccacaacgacagtagtaccaagatcgatagcagcaaaaaaagccataatgaccatattgaagctgtccgccaatcccacgccggccatcgcatcttttcccagccagctgaccagaaaagtgctcagaacccccatcaacaggacacaggcattctccatgaagataggaacagcaagcggggttatctcgcgccagaacaacactttgtagctcttgcgtttagcgtgccagcgagtgccgtgaacaacctggcgtaaagcagaggagatattcaaagccgaccttaattgcagaaagtgaaaccacatttcaaataatgagggagaatcagcaaa

SEQ ID NO: 1052 - DNA, 215 bp, Escherichia coli
  Strain O55:H7
ttttcgccatcaaattgtctgcaaatgcaacaaactgttgatagaaacggcaaacagttgggaaaattaaaaatcgggtttgacaaaagatttttcgccgttaagatgtgcctcaacagcgattcctctgtagttcagtcggtagaacggcggactgttaatccgtatgtcactggttcgagtccagtcagaggagccaaatttctgaaaagccc

SEQ ID NO: 1053 - DNA, 19078 bp, Escherichia coli
  Strain O55:H7
  modified_base (1779)..(1779): a, c, g or t
  modified_base (2258)..(2258): a, c, g or t
  modified_base (2333)..(2333): a, c, g or t
  modified_base (2905)..(2905): a, c, g or t
  modified_base (2907)..(2909): a, c, g or t
  modified_base (4117)..(4117): a, c, g or t
  modified_base (4291)..(4291): a, c, g or t
  modified_base (4295)..(4295): a, c, g or t
  modified_base (4703)..(4703): a, c, g or t
  modified_base (8369)..(8369): a, c, g or t
  modified_base (9181)..(9184): a, c, g or t
  modified_base (9276)..(9279): a, c, g or t
  modified_base (9577)..(9577): a, c, g or t
  modified_base (11176)..(11176): a, c, g or t
  modified_base (13390)..(13390): a, c, g or t
  modified_base (17967)..(17967): a, c, g or t
  modified_base (18121)..(18122): a, c, g or t
  modified_base (19036)..(19037): a, c, g or t
  modified_base (19072)..(19073): a, c, g or t
agcgggctttttgctatatctgataatcaatttcctcttcactgttttccatcacctgccgcttgatatcctcaactgaaagtcctgcattgcaaagttccagaaagcgccagacatagttacgctgaagttgtcctcgcttcagtcccaaccagacagtattagcatcgaaaagatgccgcgtatccaggcggattaaattcttttcctcttgttcaccgctggattgttcggcaactaatccgatcccaagcccaagagcaacataggttttaatgacatcagaatcctgcgcacttaatataatatctgccagcaaacctttgcgggcaaatgcgtcatcaatacgtgagcgccccgtaatcccctgtcggtaagtgattaacggccacttcgctattgattccagcgtcaatggtgtaatttgcgtcaagggatgatcgtgtggaacaagcaaactatggtgccaacgaaaccacgggaaggcgacgagctgcgggtcattactcaaacgctcgctggcgataccaatatcagcttcaccattatgcaacaacgtcgcaatttcctgtggcgtcccctggattagctcgagccgaacctccgggaaaagttcgcgaaaagctttaatgacctctggcaagctataacgtgcctgagtatgcgtcgttgcaatagtgagaacgccagacgtatcgttggtaaacaggtctgcaagccgacgaacattactggcttcattgagaatacgttctgcaatgaccagtaatgctttgcccggttcagtcatgcccagcagtcgcttacctcgtcgaacaaatatttcgatgccaagttcatcctccagttcccgaatatgacggctgacgcctgactgtgaggtaaaaagcatattcgcaacctctgtcaggttgtaatcctgacgtgcagcttcgcggattatctttagttgttggaaattcacggtaaactccgggcagttcagatatcccgttattgttaaagtctaacgcccggcataacaaataataaaaacccgcatcttattccatcccgatataacgcttagctcaccaattgccactgccttttttccatcactggagaactaatcactgacattaacaactctttcactgcctgtgcctgtggcgataagttcgctctggcgggtaaatttaatgacaaagagagactcatggaaggcgtggtaatgcgtgacatccacccatttactgcgccacataacgaacgcgcggccgattcgggtaatactgcaactcccatgccgctggcaatcgctgcggtaagcgtagcaatagactcaatttcaccaatgacttttgccgtgagccgccgtagggaaaacgcctcatcaacacgaagtctaacagcgctgtaatcactggggagaaaaaggttcatttgtgcaatagcattaacatcaacgctttgccccgggcaatcttgagttcctaccaggaaaagatcttctttcagcaaagcctgactggatacaccagccacaggggaatgctcataaatcaccgccatatcgagttggtgatttatcagtttttcgttaagcactgcaccgctattttcatgaagatagataacgacctccgggaattcagcgcgaaccgcctgtaataagggcatggtgatggatgacgcagcggttcctggcgcaaagccaatcgagacttgccccgataatgcctgaccaacgttatgcaccgccagttgggcctgctcacactgacgtaaaatggcccncgcatgggtatagagaatttttccggcgtctgttggcgtaacgccccgttttgtgcgaatcaaaagttgttgatttaactcaccttcgagtgtggcaacctgctggctgagcgctggttgtgcgatatgcaatacttcagcagcctgagtcaggctaccaatatctacaatttttacgaagtatttcaggcgtctgaagttcatgttgcctccggtttttgagaatcggcccaagtgccgccattacttacaaccagattgcaagatgcttgccagttttattttggcgttgatgtacaagctaaccaactgtcaaataagagattatgatagattcgtcattggctcttttcaccagcagtcgcgttcccctgccctataaaaggagggtatgcaccacgatggttcattaccaataagattgaaatctcatcactttgttgaaattgacagcaaacaaacaaaaaaatgcatttcancctttgacatcaccatgcactgccattaatatgcgccccgttcacacgattcctctgtagttcagtcggtagaanggcggactgttaatccgtatgtcactggttcgagtccagtcagaggagccaaattcaaaaaagcctgctttctagcaggctttttgctttctaattaccaacgctcttaaaacatctgtcttgaaccagaactaatttgcacaggcattcccgatcgacgttgcaacgcagcatttgcgcgattcacatcaacttcttgcccgttgataaacgcccgcaaagatggggttaccggcaatggcacttttcggtcagactcatattcagcacgattgcgcgacagcggctcatgaacttccagccactttgaaccatccggttccgttgtgtatttcactggctgatcaataatttgcacacgagtacctacaggaacattatcaaacagatatttgatatcgtcattgcgcagacgaatacagccctgacttacccggagcccaataccaaaattggcattggtaccgtggatggcatatagcctgccaatataaatcgcgtacagccccatgggattatcgggccccgcaggaacaaatgcgggcaaactctcccctcgtttcgcatattcncnnngggtgttcggcgttggcgtccaggttggtgcttcttgtttacgttcaacggtagtcacccagttacgcggggtttctcgcccagcctggccgataccaataggaaagacttccacagtattactgtctggtgggtagtaataaagacgcatctcagcgacgttaaccacaatccctttacgaacagtggcgggcaaaatcagttgctgcggaatggtgagttgcgaacctgacttcggtaagaagacatcagcgcccggattcgcttccagcatgttacttaacccttgcccgtattgtgcggcaaaagtctccagcggctgggtattgtgatcaggaacagttacagtaagcgactgccccactaaacggctaccctctggaggtaatggataagttaccgccaggctagtatggctggcaaaaagcagagcaaatgagcaaagaatatttacacgacgcatcatgtccctttcctaagtcgcgaaagctatcggttaagtatagcttttatcagacttttcgtttttaactgttcaaatcagaagtcgtattccccggtagaacaattttactggcagcaagttcgcccatgttgttgtatatcgcacaagcagcttcgatgatgggcatcgccagagctgcgccactcccctcacctaaacgcatatccatattgagaaaaggctccagccccaaatgcgacagcgctatacgcgcccctttttctgccgacaggtgagaaggaatgagatacggtttgattgcaggagacatctggcaggctgcgagcgcagcagcataagaaagaaatccatccagcaacacgggtaaaccgcaggaagcagcgcctaacatcacgccagccattccgaccaaatcaaatccacccacttttgccagaacattaacgccatcctgcggatttggctgattcaacgtaatcgcccggcgcacaacatcaattttattagccagtttatctgtcggcaggtttgcgccaatcccaaccacttcttcaggatcccggccagtgattgtgctgactattgctgctgccggtgtcgtgtttgccatccccagttcacctacaccaaacagcgtgacaccgttttttgccagctcccgcgtataacatatgacgtccaaaagtaacttttcagcctgacggcgactcattgccggagctgaagcaatattgccgctacntcgtgcgacacgcatgttgataagcccggggataggctcagcagtatcaataccaacatcaattacgtggacgttagcgcccgcttgtgctgccagcacacacacgccggttgttccgcgggtcatattttcagcctgaatggctgtcacttcttttggggaaatagcgacccnttcntcccagacgccgtgatcggcacacataaccagtaccgcttttttgcccacatgcggtatgccattcaaccccggcattcccgccagttgtacgccaagcgcctccagccttcccaggctaccaacaggtttgagtaacccgtcaatatgccgttgtgcacgcgacatagcggcaggatcgatggcagggatcgtattcagtaaattggcaagtgtttgcatgtcacgtctctttatagcagtgccagcaggaagaccagttcaccaagctctatggctgctcccagcgtatcgccggtttgcccgcccagcgtacgtttgagaagctgaccgaggatgaaaatcgccaccatcgtcaccaccatagcagccacaccatgcatacccggcaataatacggcagcaaaantagcggctaagccgagtgtgacgcaggtttgtcgcccatcaattttgccaatgaacacattgccaagcccttcttcccgggcataacgatgacgatacatcaataatgcggcagtcccgcggctgaccgcacatgctgccgccagcgatgcaaggatcggttcgccacgcagagccaactcgcttaacaccaaaatctttgccagtacaacaaaaatcaatgccagaccgccgtgggtacctaaacggctatcacgcatgatttccaacatgcgatcgcggctacgtgcagaaaatacgccatcacaggtatcagcgaggccgtccagatggaatcccccggtcatcagcaccagcacaagtacgctaaacagtgccgccagtggtgcgccacaccatgcctgcagcaccatgaagaccagcccgctaatcgcgccaagcaataatccaatcaaaggaaaagtaataataccgcgagaataatgctcgaaatccagtccctgggaccagcgacgcggtacaggcagacgcgtaataaatgagagcatcgcccaaaataatttactcatttgatttttactccaatacccgaaaccaccagccatacttcatttgccgcagcggccaactgctgatttacccgcccggcaatatcacgaaaatgtcgtgccagacgactctccggcacaatccccattcccacttcgttagtcactaatacaacctttgcggggcaacgttggcaggcagcaatcaacgactgaatctcagcattaatcgcctgttccatcgcctgataatcccattcatcagggtctttatcgccgccataatcaaacaacagattagtcaccattgtggtaacgcattcaagcaacacaacctcattcgggttaatgtctgcatgaattaattcatcaagatgttgccagcgctccactgtgcgccagtgctccgggcggccttgccgatgatgttctatccgtgcagccatctcatcatcaaggatttgcgaggtagcgatatacagaacctgtgaagagtccccaataagcgcctctgcgtggcgactcttcccgctccgtgcaccccccgtcaccaaaatcatcataccgactcctgattcaaatgtatgatggtattcattgaacagaacaatggatcccccaccgttgctgaccgcaaaacatttacgcgattaatactgcgcgtaatataattaaaaatccagcattctcaatccattacgaaataagatggcattacggaatagccagactttctcgtgttaacgtccgacaaaatgcgtcattgacagcggtttctgtggattgacacatttcattcagataatgaattaatgctactgccggaacaaccagcaaacgggcattgtgttctgaaatccaggctattgattcaacgtcagcgacagatctgcgctgtaaaagaacttgtaaaacaacgtaatagaattatccggaatggtggcgactatgcactagaacaccacaatttcgctctctcggtaaggcactgtcacagcattcaacagaatgtgacttgccagatttattagcgccaccagatgtttaaccgggtaaccacgacccagtcggggatatattccatcttctcgctgacatcatcaagaataaaaaggtttatcacactcagagcaacgttcttcagcaggcgggataattcttcaacatttagaagatgtgttattaaaggcatacaaactggacgtattgtattttcttttggtggttgacctaaggtagcagtttatcctgatgcgctgagatttctgtaatatctacgtcaacattctcctcgaatagaaaatgcagccccggcaagtaattcacattttttaataaaacgttgttagcgtgccattttcagaatctctccaagaaagcgaattcttttctcaaattctgcattctcagacacagctttctactccatggtaatggcccaaatacgaagttgctcaggatcattagtggtgctgagaagttaaataaccatgcggagtaccactcgtcatcacgtatttatatatcatgaagctattgttgtgttttgtacatcagtagatatattctgatatactccttttgctagacataacctttcacctgcttgcaaagcttctgtgttctgacattgccaaattgttgcaattctgtatccagccttctttcagtcatagcttcgggccgcgataagactcactgatctgaccctgattcctcttgcagactttatagaccaattaaaatgcagtttctgcaggtcaacgtctgaccatcattgtcatcactctggccattagagtaaccttctgcattcatccttttgtaaaaagtttatattagtatcagcaattaaccggacctgatactgatatgagtcttaccgcatatacggtcaatttcagcaattaattacattatccacgccaaagtatttgtcatcacaatgatggtaccttctttcagacaccattttttcaactccgttttccacggaccgcactcttatgtcaagagtgcggtccgtgggatacaaccagagaccgactgacacgagtcagaggaaacgacggatatgttcagtcgtaaaatatctatcaaaaaacatgattaaggtcaaaaatgtttgatatttacaatttatgaagatgacaataatcatagatatatgagaacataaatgaaaataattatcattacagcaatcatttgtactttgtattaatgagggatgaaatgttatataatataccttgtcgaatttatatcctttccactctgtcattatgcatttctgggatagtttctactgcaaccgcaacttcttcagaaacaaaaatcagcaacgaagagacgctcgtcgtgaccacgaatcgttcggcaagcaacctttgggaaaccccggcgactatacaggttattgaccaacaaacattgcagaactccaccaatgcctccatagccgataatttgcaggacatccccggagtagagataacagacaactccttggcaggccgtaaacaaatccgcattcgtggcgaagcatcctcccgtgttttaattctcattgatggtcaggaggtaacttatcagcgcgccggagataattatggtgtgggactgttgatagatgagtctgcgctggagcgtgttgaggtagtgaaaggtccatattccgtactgtacggttcacaggcaattggcggtattgttaacttcatcaccaaaaagggaggtgacaaacttgcatctggagttgtgaaagctgtttataattccgcaacagcaggctgggaagaatcaatcgcggtccaggggagcatcggtggatttgattatcgcatcaacggtagttattctgatcagggcaatcgtgatacgccggatggacgtctgccgaataccaactatcgtaacaatagtcagggtgtatggttgggttataactccggaaaccatcgttttggcctctcgcttgatcgctacagactcgcgacacaaacttactatgaggatccagacggaagttatgaggcatttagtgtcaaaatacctaaacttgaacgagagaaagttggggtattctatgacacagacgtggacggtgactatctaanaaaaattcatttcgacgcgtatgagcagaccatccagcgccaatttgccaacgaagtaaaaacgacacagcctgttcccagtccgatgattcaggctctgaccgttcataacaagactgacacccatgataagcaatacactcaggcggtcacattgcagagtcacttttcgctgcctgctaataatgaacttgttaccggtgcacagtacaaacaagacagggtcagccaaaggtccggtggcatgacctcaagcaaatctctgaccggcttcattaataaggaaacacgaactcgctcctattatgagtcagagcaaagtacagtctcactattcgcacaaaatgactggcaattcgccgatcactggacatggacaatgggagttcgccaatactggctttcttcaaagttgacgcgtggtgacggagtatcatataccgcaggcattataagcgatacctctcttgccagagagtctgcgagtgatcacgaaatggtaacatctacaagcctgcgctattcaggtttcgataacctggagttacgcgctgcgttcgcgcaaggctacgtatttcccacactctcccagctttttatgcagacatctgcgggcggcagtgtcacatacggaaatcctgatcttaaggctgaacactccaataactttgaattaggtgcacgatataatggtaatcagtggctgattgacagcgcagtttactactcagaagctaaagattatattgcaagtctgatctgtgatggcagtatagtttgcaatggtaacaccaactcctcccgtagtagcnnnnattattatgacaatattgatcgggcaaaaacatggggactggaaataagcgcggaatataatggctgggttttctcgccatatatcagtggnnnnttaattcgtcggcaatatgaaacttcaacattaaaaacaactaatacaggtgaaccagcgataaacggacgtatagggctgaaacatactcttgtgatgggtcaggccaacataatctctgatgtttttattcgtgctgcctctagtgcaaaagatgacagtaacggtaccgaaacaaatgttccgggctgggccactctcaactttgcagtaaatacagaattcggtaacgaggatcagtaccggattaacctggcactcaataacctgacagacaaacgctaccgtacagcacatnaaactattcctgcagcaggttttaatgcagctataggttttgtatggaatttctgatgacaaaaacaatcgttatggaattctttgtcctgatctgcccgctttgcgggcaggctaacgaacgtattgtgtttgttgaaggtttttcgacgttgttttccatctgtgggtgaatatttattcttcccgccagcatgactctatactcattgctacgacaatgacttataaagctggttactgaacctatacctttgtaattcaaaagtgatatcagttcacaacgcaatactatttttagattatttactctcacccagatactgaatcaatggataataccttttgatttatcccgacgcggaagaaggtggaataaatattctccttctattgccccctactccaactatcatattttacaatatcaacgaaccgtccatgccgggctgaaattctcttcctgaaacagctctgtcagcccgctaatctgtttcagcctcagcacttcatcctggtccatgcccaactctgtgccaatacgctcatctgtccagcccagacgcgaaaggtccctgacaatgtcagacattgacgttatctggtgttttcccctggcacggttatgccgtatggtcgcggcaatacgtgatgcctgtccctttctctctggattaatacaggccactggcagccagcccttcagacgttttctcgtatccgctttcctgcccagcaactgacgatgaaaaccatccacgaccagataatgctccttctcttccgaaaccaccacaggctgcgtgaatccatcctgctccagtgaatgtttaagcagttttttttcactggaagacatgacattgggattgtaatcgttggccaccacctcatccgctttcacccacaacacacagtccacaggctcctgtgcaaaaggactgacctcatgaagtaccctgcgcagatgattcagggcctgtatggcctcttcttctggtcgttcctggctaaagtactgacgaatcatgttgctcagtatctccggtgtcacagaatcccccattccttcctcctttctttcatacgctgcagataacgttcatagtgccggggtttgttcggactgaaggagagggtccggcaccagaaatcattctttatgagtgtcttacagatacgtcgccaggacgggatatcccggctccccaggtcattctcctgttcatccgggatgtcatccgggaagccccgcgtctgataccagcgcaggtagacagcaattttattacggtaatgttctgccgttctttccggcatcacatccagcaggaacatcgcatagctacgccaggtatgatgaggtggcttcgtgatacgcttacgcagggcaaaataggcaccgctctcattggcataaagcgccccgctggcagcacccgacacccgctcacactgtagtggcacagtaaatttggccacctgattaaaggtgatatcctcaccacaacacaaaacaggtgacttaatgaacaagaaaaccaaacgtactttcacccctgaattcaggctggaatgtgcacagctaattgttgataangggctactcatatcgacaagccagtgaagcgatgaatgtcggttctaccacgcttgagagttgggtgcgccagctcaggcgagagcgtcaggggattgcgccctctgccacacctattactccagaccagcaacgtatccgcgaactggaaaagcaggttcgccgcctggaggaacacaatacgatattaaaaaaggctaccgcgctcttgatgtccgactcgctgaacggttcacgatagttgccagactgagtgacagccactcagttgtcagcctctgttctgctctggaaatacaccgcagcagttaccagtactggcgaaaacgacgcgatacggttaatccggcgcgagtcaggttgtgcagcgaaatacgccgggcgtggaaccaaagtaggggctctgcgggggcgcgcacgctggctgaaatgctgacccaaaacggcgtcccgatgagccgttaccgtgccgggcgtctgatgaaatatctgaacctgagcagttgtcagcccggaaaacatcagtacaaaaatgctcgtcaggaacatacctgcctgccgaatctgcttgagcgccagttcgctgtgcccgagccagatagggtatggtgcggagatattacgtatatctgggcaggaaatcgctggtgctatctggcggtcgtcatggatctttttgcccgcagggttatcggctggagcctgtcagcgaatgccgatactgccctgataagcagtgccctgcggatggcgtatgaggtgcgtggtcagccgcgggacgtcatgttccatagcgaccagggaagtcaatatacaggactgaaatatcaacaacttctctggcgttacaggataaagcaaagtgtcagccgacggggaaactgctgggataacagtccaatggaacgcttcttccgcagtctgaaaacagaatgggtgccaaccgatggctacacaggcaaagacgtggcccggcagcaaatcagcagttatattctgaattattacaatagcgtcaggcctcaccattataacggagggctgacgccggaagagtcagagaacagatatcatttttactgtaaaaccgtggccagtattacttgaccactacagtcagagtgaaccactgacaaatctgatggatcagtacgtgcttatggcataccgtacatcggttgatgccgctcacagttgatgtctgagaaccacagggctggcagcagaaaaccagccctgtggtaaaatacagtaatagcggcgtacatcaggcacgccgctcactcgtccacagatcatatacgtcattatactgcgcgataacggagggcttcagcacccggtcatttctgagcgggtatgaataccattgatgatgcgaagcagccacgggcagaaacgttcttcacaaccaggtgcctccatcttcactgcagtctgaatgtgccggcttgttatccaccagaaatggtatgctccggtacatgcataccccggagactataaacgcactgaatcatagcctcccacctcagcaggaggcagtcagctttcaggcggaaaaacgttgcagttaaagatcgtgagaatcgctgtttcgttgcatagcaacccgaacagttgtagtgaaacattttacctgcatcagcacatggtcaggcgccgtctgtatggcgtggaaatactgatgtttcggctgatggcaagcctcattctctgtggaaacaggggcgcgcattagcttctcaaccagagagtgtcacaaagacaaatattgctgaaaatcgcattcatcgttcaggcgtgaatgcccggagacaaaagccgctgtccacacagcccccctctgacctgaacaaaaagtatacacacaacaggctcacctgaccccgaaaaaccataacttcagcaataccagtgacaccagcacgttacctcagtgccacatcttcagaccgcgatcaatctgaaatgtgactatcggggcaatatccctgctttgtggtacacgataaccagaaaacatcccctgaaccgccagccagaaagactggccacaaaaggggtaagctgaaatcgtttatggattacatcgacatatgcctggcagagaatgtccggaatgacgaggttatctttgcggagattaaggcaatggtatacgggccgacgttccatgccgcgttactacattcagcccggacgtaaaatgcncccgtcaaaaagaacggttcgcttcgaaactcagccaggataccacctctccgccacacccgggaagaagttgatatggtggttgccggacaacagcgctcctggattgactgctgcatcactcaaccacgctgaatatcaaaggagagcgttaccggttaaaagagaaacgtaaagctgtggtgatgacccaaaacgcaacgcctgtcagtgaggatgaaatggtgaaaagcggacagcatcagtaacggaagtatcttagcgggtacgaaaatggcaggatcgtgacattgacagaatatctcctgatcatcctgaatgactgcagttgctgtagaaaagtaagctgtctccacccacggcaccacttaacaggcattccgtaacttcccccagacttactatgacgcattatcggtgcactgaaaacgggagagtgcgcttaaaaccgcagaccgcatgcgggtgttactgcatgacagtctggccgtattgtgagatgtcggcaggaaccgatgtccgcgcaggggggaacttcctgcagtacctgacgcttcaaatggtattaaccgtagggtgttgttggttccggatcgcggaaatgggagcacaggtctgctacggggtgtacctctgacagtaaatccggctcgctcatctgacagcctctctcccggaaaagaccaaaaatgagatcgtctcctcaacagcagagaagaggtcttgacagacaggctacattgcatacgatttatgaagaaaaagacagcaaatatggaggttatagcggagaataccctacgaaattcctatgaaaaacgattgaaaaaaatatcaaattcgattcgtttttatatgctttttgggagcgtggcgatgacgaactgttgcatgtgcagaggagaatgcacccggaagcaccagaatcatccagaaaggcagaacgattacgcatcaaaccaggagacagcaatatcaaggtaatatactgatttaaaatgaatttacagcaatacgtgaaaacattttttacttaaaggagacagatgcgctgaagagagtgcaggtatttttatataaaaatgagaagtttacgggatgtatatccggcacactatgaccggagaatatcagtcaagcttaaaaagacaataaatacagtgagttaaatacacagagaaaacgtagtatcagagggtacatcttacaacagagactgaatttccggtttttcataaccggtgcattccggaaagtgcaggcggcccggaggttttctgacgccactacctggtagattgttctgtacatcatgtacggaggtttttgtttgcttttttaaaatctgcaaatgtgagaaaagcaggtgaggtgtattgtgggaaaggaactggatgatatctgcaccagctgtccgtatatcgatgctgtaaaacggcacaaacaacagctcggtgccatagaggaatatacacagtggttaaaaaaagaaccacgggcatcttatttttttctgttccagctgtatacccgcattcacaatacatttttctcccaaaagcaacaactcccgttcactcccggtggcactcactgcccggaacctgatgtcacccttcgggacttaacgctttcccctggctaccacagtgattatgcccctcaacccattccggagatggacagttctgctgttgttcccccaactaatgaaaacacctcgcctccggaagatactcccgacaacactccggccggaggcaataccggacaagcggaaaagaccagaaacgcaggactcacacccattcctgaaaaacgttcaggaatgcccccggaacatctgcggtttgccacgggttttccatcgcaaccgaagattgccggtcccagagaaaagccgatgcgcaccgtgcatccggataaaatctaccgtgaaattatatggttctgctccagttacctgctgaaatccggaccagaggctacgaggacgattatcaactcagtattctctgaatgggccagcataaacaatgattacccctcccccttttcgtgggtggacagcagggacagtgaacagtgtgactggttatggaacgccatgcaggtccggtgtgtgggaaccccgctgaatccccttaccccggagcagaaatactggtttgcctgcgccacgtttgataactgggagggctggaatgagcaacaggtacagtttttactggaaagtaatcccagacggaacagagcgaagtttacgcaggtctccttccaggcccccaggattcagcataaagcgattcttcttgatgagctgaaaagtgcccgggagcaacaaaaaaggcgtgatgaacgtgctgatggttccgtccctctgaaactgtccggaaaaatccacaaacagcttgaaagtattgcccgaagtcgtggtgtcctcccaaaaaaactgctgaatgaaatgattgagcaggcgtaccatgatttggtggcaaccaggcagaacagccaaatcgattccagataatttcagacagatattatttccgtgaatcccccgccacctttccggtgcgcggggttttgtcttttttcaccgggaatacatgtatgaatccgtctgatgccattgaggcaattgaaaaaccgctctcctccctgccttactcactttcccgtcacatcctggaacatctgcgcaaactcaccagtcacgaacccgtgcctggcattatgggtaaaagcggggccggtaaatcctcactctgtaatgcgctgtttcagggggaggtcaccccggtcagtgatgttcacgccggcacccgggaagtgcagcgcttccgtctgaatggccatggtcacagcatggttatcactgacctgcccggggtgggcgagagccgggacagggatacagagtatgaagccctgtaccgtgacattctgcccgaactggacctggtactgtggctgattaaagccgatgaccgtgccctgtctgtggatgagtatttctggcgacacatcctgcaccggggacatcagcgggtactgtttgtggtgatgcaggccgataaaacggagccctgccatgaatgggatatggccggtattcagccttctcccgcacaggcacagaacattcgcgaaaaaacggaggcggtattccgtctattccggcccgtacatcgggttgttgccgtatcggcccgcaccggctgggaactggatacgctggtcagtgcgctcatgacagcacttcccgaccatgccgccagtcccctgatgacccgcctgcaggacgagctgcgcacggagtctgtccggtctcaggcccgtgaacagtttaccggtgcggtggaccggatatttgacacggcggagagcgtctgcattgcctctgttgcacgcacggttctgcgcgccgtccgtgactcggtggtctctgttgcccgcgcggtatggaactggattttcttctgaacccggtggtgatgtaccaggctgttgttacagatttttaactccatgaaaacactatgcaaacgcagccatacccgggttgtccccttgcgttgtgcttctcaagttaatagaatgcatcgatcgttactatcatatcgatcgttataaacgatcgtttgtggtaaatgacctcctccgtggttgtcatgaaaatgcgtctcaggaaggttaaataatgcacgaaaagaacatcgccctgctttgtgatgaagccgaccgacttttgcaactgaacataaatctgctccggcaaatggttgaggagccagatgtgttatctgacagtaagaacgaaaacagactgctttttgataaacagaaagcactgaaaagaattgaggagctggagggcgaacaaatcaaaaccgcccgcagggagatggtgctggctgttgtcggcacgatgaaagcaggcaaatcaaccaccatcaacgccattgtggggcaggaaattctgcctaaccgtaaccgccccatgacctctgtaccgacgctcatccgccacgttcccggaaaaactgagccggttctccatctggaacatattcagcctgtccgcaatttattaatcacactgcaggaaaaactcgccaccccggcaggacagcaggtcgcacagaccctgcagcaaaccggggatacccgcgaactgctggatattctgacggatgatggctggctcaaaaatgaataccacggggaggaggaaatctttaccggactggcatcgttaaacgatctggttcgtcttgctgcggcaatggggactgaatttccttttgatgaatacgcagaagtgcagaaactgccggtgatcgacgtggaattcagccatctggtggggatggatgcatgccagggaacactcacactgctggatacccccggccctaatgaggccggacaaccgcagatggaagtgatgatgcgggatcaactgcagaaagcctctgcggttctggctgtgatggattacacccagatgaactcaaaagcggatgaagacgtccgtaaagagcttaatgccattgctgacgtatcagccggcngcctgtttgtactggtcaataaatttgatgagaaagaccgcaatggcgatggggcagatgccgtacgccagaaagttccggcaatgctgaacagcgatgtgctgcccgcctcccgcgtttatcccggatcctcacgccaggcatacctggctanngtgcgcttcatgagttacggaaaaacggaacccttcctgttgatgaagcctgggtcgatgattttatcagaggtgccttcggttgcatgaaaaaagaatacgtctgtaaagacagtgaactggcaactgaaggggcgacagacctgtgggaaggctcacttatcgatcaactgataacggaagtcatacagagctcacattccagagctgcggcactggcggttgactctgccgccgcaaaactgatgcagaatgcagaaaatatcagtgaatacctgttgttacgccatcaggggctacagcaaagcattcagtcactgcagtcgcatatcaccagcctgcttgcggatatccgggaaatcgcggactgtcaggagcagatgaccactgatgtcagaatggccatggaggagatcgatactaaaacccgggaattactgacgggggtctgcacctcactggaagaggagctgaatgactatttcagaagcggtaaacgcaaagaacagcaaatgctggaggaagaagacgcagaacaacgaaggtctcagtccggattatgggggaaaatttctcaatggtccggtatcaacaaccagggccgggaggattacaggaaacgagattttgccccggacagccccgaaataaaattcagtgatcgcagggaagcccttgaactgatgacgcaaatcgaatcgaccgtgaccagcctgcaccgtgaggctgaagcacagttccggcctgagctggagaaaatcgtcagcgggattgaaacaggttttcgtggcacggccctgtacgccacagaaaacattgccggtcgcatcaatgcccgcctggaggatgagggctttaccgtaaaaatcagttttccggcagtcagccagttacagacccggctcgcggtaaannaaatctgagtgcgcttatggaggaaagaacggagnncgtca

SEQ ID NO: 1054 - DNA, 75 bp, Escherichia coli
  Strain O55:H7
cgtcggcagagtggcgtatggggaccgtttgtcgatggtttggcaccagtgacctgggctgggaaaactatgacg

SEQ ID NO: 1055 - DNA, 9340 bp, Escherichia coli
  Strain O55:H7
  modified_base (32)..(35): a, c, g or t
  modified_base (398)..(398): a, c, g or t
  modified_base (400)..(401): a, c, g or t
  modified_base (1766)..(1767): a, c, g or t
  modified_base (1769)..(1770): a, c, g or t
  modified_base (1827)..(1829): a, c, g or t
  modified_base (2150)..(2150): a, c, g or t
  modified_base (4442)..(4442): a, c, g or t
  modified_base (4585)..(4585): a, c, g or t
  modified_base (5768)..(5768): a, c, g or t
ggggttaaataatgcacgaaaagaacatcgcnnnnttgtgatgaagccgaccgacttttgcaactgaacataaatctgctccggcaaatggttgaggagccagatgtgttatctgacagtaagaacgaaaacagactgctttttgataaacagaaagcactgaaaagaattgaggagctggagggcgaacaaatcaaaaccgcccgcagggagatggtgctggctgttgtcggcacgatgaaagcaggcaaatcaaccaccatcaacgccattgtggggcaggaaattctgcctaaccgtaaccgccccatgacctctgtaccgacgctcatccgccacgttcccggaaaaactgagccggttctccatctggaacatattcagcctgtccgcaattnannaatcacactgcaggaaaaactcgccaccccggcaggacagcaggtcgcacagaccctgcagcaaaccggggatacccgcgaactgctggatattctgacggatgatggctggctcaaaaatgaataccacggggaggaggaaatctttaccggactggcatcgttaaacgatctggttcgtcttgctgcggcaatggggactgaatttccttttgatgaatacgcagaagtgcagaaactgccggtgatcgacgtggaattcagccatctggtggggatggatgcatgccagggaacactcacactgctggatacccccggccctaatgaggccggacaaccgcagatggaagtgatgatgcgggatcaactgcagaaagcctctgcggttctggctgtgatggattacacccagatgaactcaaaagcggatgaagacgtccgtaaagagcttaatgccattgctgacgtatcagccggccgcctgtttgtactggtcaataaatttgatgagaaagaccgcaatggcgatggggcagatgccgtacgccagaaagtccggcaatgctgaacagcgatgtgctgcccgcctcccgcgtttatcccggatcctcacgccaggcatacctggctaaccgtgcgcttcatgagttacggaaaaacggaacccttcctgttgatgaagcctgggtcgatgattttatcagaggtgccttcggttgcatgaaaaaagaatacgtctgtaaagacagtgaactggcaactgaaggggcgacagacctgtgggaaggctcacttatcgatcaactgataacggaagtcatacagagctcacattccagagctgcggcactggcggttgactctgccgccgcaaaactgatgcagaatgcagaaaatatcagtgaatacctgttgttacgccatcaggggctacagcaaagcattcagtcactgcagtcgcatatcaccagcctgcttgcggatatccgggaaatcgcggactgtcaggagcagatgaccactgatgtcagaatggccatggaggagatcgatactaaaacccgggaattactgacgggggtctgcacctcactggaagaggagctgaatgactatttcagaagcggtaaacgcaaagaacagcaaatgctggaggaagaagacgcagaacaacgaaggtctcagtccggattatgggggaaaatttctcaatggtccggtatcaacaaccagggccgggaggattacaggaaacgagattttgccccggacagccccgaaataaaattcagtgatcgcagggaagcccttgaactgatgacgcaaatcgaatcgaccgtgaccagcctgcaccgtgaggcnnanngcacagttccggcctgagctggagaaaatcgtcagcgggattgaaacaggttttcgnnngcacggccctgtacgccacagaaaacattgccggtcgcatcaatgcccgcctggaggatgagggctttaccgtaaaaatcagttttccggcagtcagccagttacagacccggctcgcggtaaaaataaatctgagtgcgcttatggaggaaagaacggagaccgtcacccgtcgccgtcggcagagtggcgtatggggaaccgtttgtcgatggtttggcaccagtgacctgggctgggaaaactatgacgaggatgtgagtcgcagcgtgatcaatatcaacaaggtcagagaggaagttatgtcactgacccgggcanatttcggggagctgcaggcgtccattgagcaggatattaaccagcccgtccgccaggaaatcgatgcctttttctgcgcattcagggagaaagttgaacaactgcgtaacacgctgattcagagctctgaagatcataaacgcgatcagcaggcgcaggaacggcttaccgggcgacttcaggcattaaatgaaagggttcctgagctcattactgacagtaaggcgctgagggaagagctggagacaatgctgtgacttcaccatttattcaacaaattgctgataaccgggtatgtcaggtactcacctgtcttcctgaaaaatttgtggttgatttcgcaaacggaatcgatgttgcacaggagcatatccgcacggccggagagcgcacgttcttccggcgtttaaaagaggggctgaccggcgaaggcgctgcacggcagaatgccatcaatgcgtcgcttgcacagggcgttgaggcgtccctgcgctggctgacggagatgacaacgtcacttgccaccacaaactacgcgattacccgggtaaacgacagggtcagttcactggtcagtgatacagccaggctggcgcattattccgcagatacgcgggagcagttactcaccctggccgatcaggttcaccataaactgaatcatcttgaagaaaaactccaccgtgttgaccaggttcagcgggcgcagttacatcttgagcagatattctcatggtggagcgccgggcgatatgcgtcattttcccctgccggacgttgttatgtggcacttgaagagcttcgctggggcgcgtttggtgatgtgatacgtcagagcgaaacaggccaggttaaccagctactggatattctcagacataaagcattaacgcagatggcacaggagagtggcggtagtgcaaccgtgcgtctgaacactctggactggcttggtggtcagggccgggagcaggcagataacgagtggcatgacgcgattaactggctgggagactggtgcagtgaagagcagcatccggtgatctggtcaaccacgcaggctgcagaacacttaccggttcgcatgcctcgcctctgctctgcagaacgcctctctgaaagtatggtcgatgaaatatttcagaagggggctgcatgagtacagaaatgaaaacggggctggtgctgtccggtggcggggcggtgggcgcttatcaggcgggagtggttaaggcactggcagagtgtggtacacagatcagcatggtttcaggggccagcattggcgcattcaatggtgccattatcgcggcctctaccgatctgtcagaagctgccgtacgcctggaggcgctctgggatcatctggggaataatcaggtgctgtcggtaaacagattggtttacttttcattgctgaaaaaattgttccaggcaatgaacctctgccagatccccggacgtgcaggagcactgcttacgacgcttcttcgccatatatcgacaatcaacgggtttgacaatctgatggctcagccgttgttgtcagatgagcccctgacagcgctgatggatcattatcttgatactgatgctctggcagacgggctaccgctgtatgtgtcgctgtaccccacagaagggggcatgcaggatattattgactgcattcgtgctgaactgggtgtcggaaccacgaaaaacgccgtttttcagcatatccagagcctgccccgcggacagcagaaagaggctctgcttgcgtcagccgcgctgcccctgctgttccgtccccgtgaggttcaggggacaatgttcggtgatggtggtatgggaggatggcgaaatatgcagggaaatacccctgtgacgcctctggtcgatgccggatgcaatatggtgattgtgacgcatctgagtgacggttctttatgggatcgccaggcttttccggacaccacaatccttgagatccgtccccggaaaaggctgaaatatgcaggtgatggtggcaacagcggcggtctgctcagttttacatcggcacataccgacgcctggcgtcagcagggctatgaagacacgatgctggcgatggagcatatccggaaaccgctggcagcacgtcaggcactgacccggtcagaggcggtattgcagaaaagcctggatataacggaagaggcagatttggcactgagaaacgcgatggcccggattaaataaagacgccccaaagaaacgccaccgcctgtggtggtgtttttcctgtctggtgttattgaaaatatnttcagatatatattacctgagagaaagttttacccctcacctgtcaattcactcactggaaatttaattatgaaattacctgtaaagttattaatgagccttatatctctggtccgcgttattgcacgtgccggggaatatanaaattacagccgggatgaaataaaatactggcgatatacatcatacaagggggggaaacttccggaaggtttcactgatgagaaattttccagcgccatttacaacggaagaatatttacaatgaaacgtttacatacccttatgttatttctggcggttctgttcacgggctttaactttaacgcagaagcggctaccgtaaaacaagctcttagttgtaacccggaagcctgggctgaacaacctggagcgtgtccatcaacgtacgagttgtacgaaggtgacgctacctacaaagccgctatcgacaaagcattaaaaccggtcggactgagcggcatgttcggtaaaggcggctatatggatggccctggtggaggtatcacgccagtaaacattaacggtacagtctggttccagggcgacggttgcaaagccaatacctgcggctgggactttatcgtaacactctataacccaaaaacccatgaagttgttggctaccgttactttggtttagatgacccggcctacctggtttggttcggtgaaattggcgtgcatgaattcgcgtatctggtgaaaaactacgtagctgcggttaactaatttaaggagtctatcatgaaaacttttatcaaaactttactcgttgctgtaactattctgttctctgtcttcgctactgcgaaacaagtaaaactgccaaataacatcaaatacgttaatactacagaagcgttttcctgtaccgaaattgacggtatgaattgccagacaaagaatcagttcaactataaagataacagctatgttttcgtgcttgaacgtggtggtgcctggtgctacgactacactgtctcggtagttaacctgaaaaccgggaaagcacaaatgattgaatacggggacaatcaactgtgctcaggtagcaacaaaccgttcttcgaaatcaaaaatggcgtaccgacggtaggagtcatcgacacatccggaaaacctgtcggtgtagcccaggacaaacttaaaatctaaggagtaaaccatgcgtttctctgcacattattaatatcaaaggtaaatacagccccagccattgttaccggaaagccgcttaatgcgtggctcgccagtgaaaggcctctcagacaataaaccttattcatttcacccgtcaggccncgtcttctccgggagacgcggcttttttcatttattgcaccagtaaatcttaaccaccgataaggagcaaagtatgcgattagccagtcgttttggttatgctgcaaaccagatacgccgtgaccgtccgctgacacatgaagaactgatacgccatgtacccagtatttttggggaagaccggcacacctcccgcagtgaacggtatgcgtacattcccaccattaccgtcctggaaaatctgcagcgggaaggctttcagccgttcttcgcctgccagacccgtgtgcgcgacccgggccgccggggatacacaaaacacatgctgcgtctgcggcgggccggagagataaacggagaacatgtccctgaaattattctgctcaactctcatgacggtacctccagctaccagatgctgccgggttacttcaggttcgtctgccagaacgggtgcgtctgtggccagtctctgggggaagtgcgtgttccacaccggggaaatgtagtggagaaagttatcgaaggggcttacgaggtggtgggcgtgtttgaccggatagaggagaagcgtgatgccatgcagtcgctggtcctgccgcaaccggcacgccaggcgctggcacaggcggcactgacttaccgttatggtgacgaacatcagcccgtcaccaccgccgacattctgacgccgcgacgccgggaggattacggtaaggacctgtggagcgcatatcagaccatccaggagaatatgctgaaaggcgggatttccggtcgcagtgcaaaaggaaaacgtatccatacccgggccattcacagcattgataccgacattaagctcaatcgcgcattgtgggtgatggcagaaacgatgctggagagcctgcgctgatgccgtttccctgagtgagggaatcattcagctttcgttcccgaaaaacacacatttatttgttatttaaggagttatctcatgaaaaccgtttctcagaatacccccacaatttattcagctacaacaccagagaataatccgcctcagttggttgccagcctcgtccctgatgaacagcgcatcagcttctggccgcagcattttggcctcattccacagtgggtgaccctggagccccgtgtcttcggctggatggaccgtctgtgcgaagactactgcggtggtatctggaatctgtacaccctgaacaacggcggggcatttatggcacccgaaccggatgacgatgatgacgaaacatgggtactgttcaatgccatgaacggtaaccgcgcagaaatgagcccggaagccgccggtattgccgcctgtctgatgacgtacagtcatcatgcctgtcgtacggagaattatgccatgacggtccattattaccggctgcgggattacgccctgcagcatccggaatgcagcgccattatgcgcatcatcgactgaatggagagaagcacaatgcaacaactttcctttctgcccggagagatgacgcccggcgagcgcagcctcattcaacgggccctgaaaaccctggaccgccatcttcatgaacccggtgtggccttcacctccacccgtgcagcacgggaatggctgattctgaacatggcgggactggagcgtgaagagttccgggtgctgtatctgaacaaccagaatcagctgattgccggtgaaaccctcttcaccggcaccatcaaccgcacggaagtccatccccgggaagtgattaaacgcgccctgtaccacaatgccgctgccgtggtactggcacacaatcacccgtccggtgaagtcacacccagtaaggcagaccggcttatcaccgaacgtctggtacaggcactgggcctggtggatatccgggtgccggaccatctgatagtcggtggcaaccaggttttctcctttgccgaacatggtctgctttaacccgtcacaaccacatcacacctgttttcacttttatcttctgtcttcagaggtatcccattatgaaaattatcacccgtggtgaagccatgcgtattcaccaacaacatccgacatcccgtcttttccgttctgtaccggtaaataccgctggcacggcagtgctgaagcgtataccggtcgtgaagtgcaggatattcccggtgtgctggccgtgtttgctgaacgccgtaaggacagttttggtccgtatgtccggctgatgagcgtcaccctgaactgagtgggaattctgatgagcagaattatcgccactaccggaccattcttagccgattttctgtaaggattttatcgtgtcagacacactccccgggacaacacttcccgacgacaatcacgaccgcccctggtgggggctgccctgcaccgtgacgccctgtttcggggcacgtctggtgcaggagggtaaccggttgcattaccttgccgaccgcgccggtatcagaggcctgttcagcgatgcagatgcgtaccacccggaccaggcctttccgctgctgatgaaacaactggaactcatgctcaccagcggtgaactgaatccccgccatcagcataccgtcacgctgtatgcaaaagggctgacctgcaaagccgataccctcagcagttgtggttacgtttatctggctgtttatccgacgcccgaaatgaaaaattaactctccagaatagccttctgctacggcctggtgttttcaccacgccacttttccatttttatatctgcatatcaggaaaatcttcagtatgaaaacattacctgtattacccgggcaggcggccagttctcgcccgtctcctgttgaaatctggcagatactgctgtcccgactgctggaccagcactatggcctcacactgaatgacacaccttttgccgatgaacgtgtgattgagcagcatattgaggcaggcatttcactgtgtgatgcggtgaactttctcgtggaaaaatacgcgctggtgctaccgaccagccgggattcagcgcctgtacccgctctcagttaataaacagcatcgatatcctcctggctcgcagggcgaccggcctgatgacccgcgacaattacagaacggtaaataacattaccctgggtaagtatccggaggcgaaatgatgacactggaagccgacagcgttaacgtacaggcgctggatatggggcacattgtcgttgacattgatggtgttaatatcactgaactgattaataaggccgctgaaaacggttattcactccgcgtggtggatgaccgtgactctaccgaaacaccggcaacttatgccagccctcaccagttgctgtaagacaatgcagtgatgcagggtatagtgccattaaccacagaaacagcactgttgtcctgtattaagcaggcaagagaagatgtccttaccctgcgccatctgcagcttctgcaccagaaccggtgaatctcactcaacaggcttcatttcccctgacgccagcctgaatacagctggcgttttcatttataaacagaaaggaaaaccgataataatggaatggacgccccgaccatgaagcaacgg

SEQ ID NO: 1056 - DNA, 4183 bp, Escherichia coli
  Strain O55:H7
  modified_base (3139)..(3139): a, c, g or t
  modified_base (4113)..(4113): a, c, g or t
atattactgataaaccttccagtggaggtgcgttatggccgttttaacgattagcattgacctgacaaaaaatgaattccaaatccacggtctgggtaggaacagaaaaatctaagctcagaaaacggattaaagtaagcgtcaacggagcaccgtattgacgcttatttattggtgagaactacgttccatggcaggagttcgtcaacacggttggagggccattccggcagtatgctcagaatatggcgcagatacgcttccggatcgataccgttcagacggcaggtgcctgcttttccggcaacaagcaggaatctcagcgctgaagcaggaattagaggtaaaaacgccctaccgggccatgaatcacccggtcattggagtagtaaccaaagcagatttagccagcatggaacaaatatctttggtgaaatgttggttacgggaagctggagcgcacaacgtgttagtaaccagtgcggttaataacaatggagttacagaactttttgccttgctgcatacagaagaaggctgccgctaatttcgataggttctcagatgagaatgatgacggtgatacacagataagaatcaatgagcaatgagggttgccgggcaaccctcattgaataaaacaggaattacttcgcttcgccgtttttcatttcgcccatagctttcagctttttggagatatcgcggcgttctttggagagctcggcatttttgatgatgtaatcgtcaacgcgatcttcatagtcacctttcatgctggcgatgatgccctggattgcttcaacgctcatccctggcttgatgtaatcgctcaggttgtccagcaacaggacgcgcttctggttgtcacggatctttttctcaacgtcctgaatttcacgttgcagtttgttcttacgacggaacagacgaacaaattccagtacgtcctggaatgaaggcttggtagtttccatttttatacccctgataatgtgagagtcggattcgtttaagcaaccgctattcgttagggccaacattactcatagctgccgcagatgacaatgcttttatcccttatcactatcataccctttatccttgctgaatcgaagcagcagcaagatgattctgaagttcaggaattatttgcgcaaggcccggcaaatcagactcgatagcaactcaagctgatgtgccgtttccatgttcagccacacataaccatagattggtgtttccacaaccttcaggtcatggtggttattcagcaactgacgcagctcttccacagcatcgttcaatttttccgtattggcaaaaaccggctgcggattaccttcgtacagcgcatgaacaaggctcagcagtatttgctgcatcatgtgctgggtatcacgaagtttttgcgcgttcaataacacgaaatggctggggcgcgtggcccagtatgcattgatttgcaactccagcatacaaaccagattgcggttaatggtctggataccttcatatatcgattttggaatacgagtttctttgctggcgggcgcaatcagcccacgcattttcacggcatcggtcaggagtttttgtagatggctttccagacgtgggcgttcgagtaagttcggtgagaatgcagattgatagacccgattatactcggtcagacttttcgccagttgaatgcgccagtggatgaacgcccgttgtggccagataccggtaaacaacattgccagtaaagagccgaggatcacatcgccgcttcgccataacgccgtatcaatttcacctgtcggggaacccacaacaattgccagcgtcaccccaatcaataatccttgatacggtttcttgcccagcgccagccaaccgcaaagaaacatcgccgccgcgcaccagactaacatcagcggtaacgaaattaactccagttgcagagcgataagacctaaaatcgaccccaacaccgtaccgccaatacgttcgaaggcacgagggacaacgttcccccagaacgagattggccccataatcaccaccatggtgaccagcggccaggtgctttccgggatagtaaacaggcggataatgagaaaagtgagcaggaatgccagcgcgacccgagtaccatgcacaatgcggtaatggcggtatacccggatttcaaacgggcttaatgacttattggcacgcacgcagaaactccgttaatgaagattaaaagcgctcataacacatctgtcggtcagaaggcgcgcctctgaattatccgacggacaaaccgggaacagtgtaatttcccggcaggagcgaaaaaattgaaaggcgcatcttactcttttcgctttcaaaaaaagagtggtcttcgcgtcaacacaccgccctgagatgaattagtgatgttttggctgcaccgcaacatacatttcgatatcccagtacccatcttccgcgccattgttcaagtaaacctcgaagcagggctttggtaacatttcataagcactgtcctgcaagaggctattaaagaactgataccagggtttagcaaaatcatcaccgactacacgagccaccgccaccgcatattgaccacctgaaatttctgtcagaatgacgccctcactgttttcggggagcgtaaagttattcggtaccgtcacgactgtgtcgcagcgtaatttttcggcgggtgtttcatccggattgtcgtaatagacagcaacccactccttcggcacaatatttttgctatctacccacatcatcaactgctcaaaacctttctttaccatctgttcccacgggccaacgagatggaaacctgcaacggtacgtttatcttcctgcttaatctcgtagttcatgacgcctccattattactgtttttatatacagtatagttgcaatattaaaaccacaaggaatgagtgttgattatgcgagcagactcgcactcctgccagtctgctgcaaaagaaaggtcaggccttatggtggaaataatcactcaggcgagaaaacatgctgccttccccgacagattccagggtaaccagcggccagtgcgccacctgtttatcacggtcgtaaagttcaatttcccctacccgctgatgggcgctnattggcgcggtgagctctttaccatcaagggtatatttggctttgatatgtggaatttcggctttcggtagcaccatccagaactcttgttccgttcccagggcgatattttctttatcgccataccagatgcgttccgtaccgacctttttcccacggtgcaaaatttgcaccgtagtaaagttttgttgcccccaacgcagtaattttcttgcctcttcctcacgaccttttgcactgtcagcccccattaccactgcaatgagacgacgctgcccatctacagccgaagcaatgagattaaacccggcaccagaagtatgacccgttttcaggccgtcaacattcatggttttatcccacaataacccgttacggttttgctgggtgataccgttccaggtgagacttttctcactgtacatatgataaaactcgggctcgccgtggatgatagcgcgagaaagcacagctaaatcataagccgagctatgctgacctggtgcatccagaccatgcactgtttcaaaatgcgtatccttgagatgcagcttctcggcatagttgttcatcatttcaacaaactgccgttgcccaccggcaatatagtcagccagtgcaacacaagcgtcatttccggaatccacaattaaaccacggcttaaatcacgtaccgatacgcgatcgccctctttcaaaaacatcagtgaagaaccgacaaacactggattatctttcgcccacgcatcgcgccccacggtgacaatatcgtctggcgtaatgcgatgactatcgatagcgcgatccacgacatagcccgtcatcagctttgtcaggctggcgggattgcgctgttgatgctcattacccgcggtgaggatctgaccggtggtgtaatccatcaatacccaggagccggcatgaatctctggaggctgaggtgaaaaaggaatgttttccgccgcaaaaccagncgataagttaaaaatgaacaaagaagcagcaataataagacggcgtttcaacagcaaaccctcaggagtt

SEQ ID NO: 1057 - DNA, 1601 bp, Escherichia coli
  Strain O55:H7
  modified_base (1551)..(1551): a, c, g or t
  modified_base (1583)..(1583): a, c, g or t
atagctgttctttttacggaaatacttatgaactggctggaataaagtgcaagaaaatgtgactaccctctcatttttatctgacatgatctgttgccactcgctgtcaaattgtcgcgctaaagctgattagcacggtgatatttgatactctggcagacagcagaaacaacggatttaacctaatgatgaatgacggtaagcaacaatctacctttttgtttcacgattacgaaacctttggcacgcaccccgcgttagatcgccctgcacagttcgcagccattcgcaccgatgacgaattcaatgtcatcggcgaacccgaagtcttttactgcaagcccgcggatgactatttaccccagcctggagcagtattaattaccggtattaccccgcaggaagctcgggcgaaaggagaaaacgaagccgcatttgccgcccgtattcactcgctttttaccgtaccgaagacctgtattctgggctacaacaatgtgcgtttcgacgacgaagtcacacgcaacgttttttatcgtaatttctacgatccttacgcctggagctggcagcatgataactcgcgctgggatttactggatgttatgcgtgcctgctatgccctgcgcccggaaggaataaactggcctgaaaatgatgacggtctaccgagctttcgccttgagcatttaaccaaagcgaatggtattgaacatagcaacgcccacgatgcgatggctgatgtgtacgccactattgcgatggcgaaactggtaaaaacgcgtcaaccacgcctgtttgattatctctttacccatcgtaataaacacaaactgatggcgttgattgatgttccgcagatgaaacccctggttcacgtttccggaatgtttggggcatggcgcggcaataccagctgggtggcaccgctggcgtggcatcctgaaaatcgcaatgccgtaattatggtggatttggcaggagatatttcgccattactggaactggatagcgacacattgcgcgagcgtttatataccgcaaaaaccgatcttggcgataacgccgccgttccggttaaactggtgcatatcaataaatgtccggtgctggcccaggcgaatacgctacgcccggaagatgccgaccgactgggaattaatcgtcagcattgcctcgataacctgaaaattctgcgtgaaaatccgcaagtgcgtgaaaaagtggtggcgatattcgcggaagccgaaccgtttacgccttcagataacgtggatgcacagctttataatggctttttcagtgacgccgatcgtgcagcaatgaaaattgtgcttgaaaccgagccgcgtaatttaccggcactggatatcacttttgttgataaacggattgaaaagctgttgttcaattatcgggcacgcaacttcccggggacgctggattatgccgagcagcaacgctggctggagcaccgccgccaggtcttcacgccagagtttttacaaggctatgcagaagagattcagatgctggcgcagcagtatgccnacgataaagaaaaagtggcgctgttaaaagcnctttggcagtacgcggaa

SEQ ID NO: 1058 - DNA, 5947 bp, Escherichia coli
  Strain O55:H7
  modified_base (364)..(364): a, c, g or t
  modified_base (812)..(812): a, c, g or t
  modified_base (5842)..(5845): a, c, g or t
gtctaatgtgaagcctccgccgctggtacggcggaggacaatgttgagtcaggctttttgaacggtgatgctccacgctgcatcgccaatctgctgataatcggtgatggcatgcccttcttctgccgcccactgtgggattgcttcagttgcctgggtgcaatcaaactcaattaccaactcatcgccgctggccatttctgccagtgctgcttttgcttctatgagtggaaacggacagacctgcgtcaccacatccagctttttaatcgccatctttacaccttacttaatttgccgcagcagttgccagtcgcgccttacgctgcggtcgaacatacacaagccaggacgcagtccagantccgagaatcataaatacaaggccaacccagccctgccaggtcatcattgcagtcataaccagtccattaccgatagagcaaccacctgcaatactggcaccgaagcccatcagtacaccacctagcccgctacgtactgttgtttgtgcatcagctgcgcgaacgcggaactcacggctcgctttggctgcaataaatgcccccacgaagatccctaacaccaggaaaacgccccagttaatgtatttcacgtcacccgcgaccagaaattgcagaatattggccgttggggaagtgatgcctaacccaaacatacgtccggttgcttcactcaggggccaggctaaaagcgcaatcaaaccgatgagtacagctgtgacaaagggatgccagcgtttttcaaacagaatatgagcgatcccggttcggcgcggcggtaaggtcgcnactttgagttttggcttcttcaactctttcatcaccacccagagcgttatcaccagcaaaacggcaaccaacggccacacagacaaattaaaagtctcagcaatagagttatgttcagtagtgtagtgctgcaaggtttgatttaaaccactggcgtgtggagaacgcatcaccgcactcatcaccatataagtgaaaagcgcgatccaactgccgatcaatccctcacccgcgcgataccaggtcccggtggcacatccacccgccagaacaattcccagcccgaagagatatccacctataacagtaccaagccacgggaacgccccggcttcgtaagtcagtaggcccgcctgaattaacgcaaaaacccccacgctttgtaccgaaattgcaatcagcaaggcgtaaaacatgcgattatttttcgcgatatacatatcgcgaaaaccaccagtcaggcaaaaacgcccacgctgcatgacaaatcccagcagagcaccacaaattagcccgcttaatatcattgaaaacataaattaattaaccagatgaatgttaatggggaaattattcatgactggtggaatgcagaccaataaccaaattctctaaattagaacaaatggttattaatgaggatttcgataaaaaagaataaaaaaaccggagccaaatgttcattcgactccggtttattattagaaatgatgattatgctacgtcttcgtactgcggaaccgggttacggaagctcttggtgacgcaagccaggtaaatcagaccgatagcagcccagatcagacccagaaccattgagctttcttccaggttaacccacagcgcaccaacggtcagcgcaccacacatcggcaggaacagatactggaagtgatctttcagcgtcttattacgcttctcacggatccagaactgcgagatgaccgacaggttaacgaaggtgaacgccaccaacgcaccaaagttgatcagcgccgtagccattaccaggtcgaagttgattgccagcagggcaatcgcgccaaccaggatgatgttcatcgccggagtacgccatttcgggtgtacataaccgaagaaacttttcgggaacacgccgtcacgacccattacgtacatcagacgcgctacgcctgcgtgcgccgccataccggacgccagtacggtaatggtggagaagatcagcgcaccgacctggaacgctttacccgcaacgtacagcatgatttcaggctgtgacgcatccggatctttaaagcgagagatatccgggaagtacagctgcaggaagtaagttgcaaagatgaagatcatgccgccgatcagcgcggtcaggaaaatcgcacgcgggatcacgcgctctgcatctttggtttcttccgacagattgctgatgccgtcaaagccggtaaaggagaagcacaggattgtcgccccggtaatcatcgggataacatgcgcatcgccagaccagaatggacgagtgctcgccagcgtaccagcgccttcaccttcaaatacgccataaacaaccatgcccagaatcaccgcgatcagcactacctgcaacacgacgattacagtgttgaagttcgctacggatttcagactacgcaggttaaaggcggtcataaaggccaccagcgccaccacaaacatccacgatgggatggaaggcaccagagcttcaaaatagattttcgccagcagaatgttgatcatcggcgcgaacagatagtcgagcagagaagaccaacccaccataaagccgacagtcgggctaatggatttctgggcgtaagtatatgcagagccagcagaaggatagcggcgaaccagcttcccgtagctcagagccgtaaacaggatcgcaatcaatgcgaacgcataggctgtcggcacatgaccatccgtgaggcctgaaacgataccaaaagtatcaaacagcgtcatcggctgcatataggcaagacccatcattacaaccggaactaacgtaagcgttttacgcaattccacgcgagaggtgtttggagtaacgttatgcgacatggtcattctcctttacggtgataaccgtcgcgtaagcaaaaaattgccccatttttttggattcctcagcgacaacaactgtcgatttttagtaaatatctatccggtacgaagcccggcctcttggtatgaatgattggtttgaagcaaaaaataaccgacgctgatgaaacgtcggtttttagtcattttttgacagcggcgcattgtgcctaaatgggggggaaatgacaagagaatgagaggcttgtcataataatttttctttaaatggctgattttccgtcatcagattttgcataaacaccggcgatcgcactatttgctaaaatttcatcccgccaccagccgctggcaagtcctgcggtctgttcattccagccaatccagacgggttcaaagagagtttgggcgaccactttcttctcgattaacgcgccactatcgagaaaacgttgcgccagataacggggtaaatagccgcagccgaggccgctaatttgcagctccagcttggttttaaaatcgaaaacggtaatggcttcttgttcgtcgagaagttgtgaggccgtagaagcgcctgcctgcgcagtgtcccccaccacaatcgcccgatatcgtttaatgatacgacggtttaatggttcttcttcctgggctaacggatgatgaggcgcgaccgcaaagacttgttccagatcgcccaaccgcgagaaaccaaactcactggaagatggtggctcatgcatcgcgccaacaataatatccgctcgcccctgagtcagggcatcccatgaaccaccgagtacgccattgataaacttcaggcgcgtcacgttatgatgttgataaaaagcttcaatgagtggcgcaagcagagaaaaaggaaacgtgtcgtccacgccaatcaccagctcgttttcccagccttcatgcagtttgatcgcctgcttttccagttctcgcacggtatgcagaacttcccgccccttctctaataacatttttccggtacgggtgaatttagcgcggtgaccgctacgatcaagcaattgaatattaaggtcgctttccagcttgtgaacggtgtaactcagagcggacggcgtcttgtagagtttagccgacgccgccgcaaaactgccttctttttctaaggcatcgaggatcatcaacacatccagcagtggtttcatacacgcccccttgcagtgcatgcggcgtcctgctggcgtgatcgtttactccagcggcattaccagcggatcgggatactggtattcaaatcccagttcattacaaatccgactgccatcaataatcttacctttgccgctgtccagactatttctgaattgcggaggttccagccccagtaaacgggccatctgcggatagaaaacattacgcgcagggtgagctggcgcacatatattatagatgtgtccgcctttaggtgcctgtaacaacagagtgatagcgccaataacatcttctaaatggactaaattaacaccatgttcaccatcaggcgcggtttttccggcaaagaagcgtccgggatgacgccccggtccgaccaggcccgcaagacgcagaatatcgaccgaagtaccgggtaaattgtgcagccagtcttcgagttcttctaatactcgtccactgttggttaccggattacgcggtgtagtttctttcaccgtgccttgcgcgtcgccatagacagacgttgagctggtaaaaataatgcggggaatacgatgggccagcgcgctatccactaactcttgtaccgcttgtaaatagaactcatcgccggggccgctacgacgtgccggaagcgtaatgaccagcgcatcggcatccatcagggcatccagatcgtcagaatcgcaaactaactcaggctccatgcgaagcagatagctatcaatgccactcattcgggccgcttcgacaccatcttgtgtggttttactcccggtgacttgccagcctcgcgctgaaagtgacatcgccagcggcatgcctaaccaccctaacccgacaattgcgacctttttcatccgttatctcctgatacaccttagatctataaggctacgctagcgtatcaaaactgacaattcattctatgaatgaatctcttcaataatgataacgacatgctgcaatgagcagtgaatcgtcggtaaccgcgtataccagacggtgctcctctgtaatgcgtcgggaccagaaacctgacaaattatgtttcaggggttctggcttccccttaccttcaaatggtgttctgcgggtatctttgataagttcattgatctttttaacaattcgcttatctgtttcctgccagtacagataatcatcccatgactcctcagaccagattagtttcactcaataatgtccttttccgttcctttgcctgatttcaggctatcgattgagtccatcaatctccgggcgttagcgggggagcgcagtagataagccgtctcttccagcgagttgtattcttcgagtgacatcagaacacaagcctctccattctgacgagtaataaggatcggggcatgatcttcaacggctttcatcattgttgccgacaaattctggcgcgcttcgctgtagctaattgtacgcatttcaatctcctcttttgtacagttcattgtacaatgataggcgttaattaactatttattaattagtctgtagatcaagacattgtcagtgagacgaaaaatccaggtttcgctattttgggtgccgtcaggttaggggacactcctcttagccccctcctttccccgctcattcattaaacaaatccattgccataaaatatataaaaaagcccttgctttctaacgtgaaagtggtttaggttaaaagacatcagttgaataaacattcacagagacttttatgacacgcgttcaatttaaacnnnnccatcatcaccatcatcctgactagtctttcaggcgatgtgtgctggaagacattcagatcttccagtggtgcatgaacgcatgagaaagcccccggaagat

SEQ ID NO: 1059 - DNA, 3574 bp, Escherichia coli
  Strain O55:H7
  modified_base (885)..(885): a, c, g or t
  modified_base (3181)..(3182): a, c, g or t
  modified_base (3454)..(3457): a, c, g or t
  modified_base (3501)..(3501): a, c, g or t
tccgggggcttttttattgcgcggttgataacggttcagacaggtttaaagaggaataagaaaatgacagacaacactcgtttacgcatagctatgcagaaatccggccgtttaagtgatgactcacgcgaattgctggcgcgctgtggcattaaaattaatcttcacacccagcgcctgatcgcgatggcagaaaacatgccgattgatattctgcgcgtgcgtgacgacgacattcccggtctggtgatggacggcgtggtagaccttgggattatcggcgaaaacgtgctggaagaagagctgcttaaccgccgagcccagggtgaagatccgcgctactttaccctgcgtcgtctggatttcggcggctgccgcctttcgctggcaacgccggttgatgaagcctgggatggcccactctccttaaacggtaaacgtatcgccacctcttatcctcacctgctcaagcgttatctcgaccagaaaggcatctcttttaaatcctgcttactgaacggttctgtcgaagtcgccccgcgtgccggactggcagatgcgatttgtgatctggtttccaccggtgccacgctggaagctaacggcctgcgcgaagtcgaagttatctaccgctcgaaagcctgcctgatccagcgcgatggcgaaatggaagaatctaaacagcaactgatcgacaaactgctgacccgtattcagggtgttatccaggcgcgcgaatcaaaatacatcatgatgcacgcaccgaccgaacgcctggatgaagtcatcgccctgctgccaggtgccgaacgcccaaccattctgccgctggcgggtgaccaacaacgcgtagcgatgcacatggtcagtagcgaaaccctgttntgggaaacgatggaaaaactgaaagcgctgggtgccagttcaatcctggtcctgccgattgagaagatgatggagtgatcgccatgagctttaacacaatcattgactggaatagctgtactgcagagcaacaacgccagctgttaatgcgcccggcgatctccgcttctgaaagcattacccgcactgttaacgatattctcgataacgtgaaagcacgcggtgatgacgccctgcgggaatacagcgcgaagtttgataaaaccacggttaccgcgctgaagatgtctgctgaggaaattgccgccgcctgcgaacgcctgagcgacgagctaaaacaggcgatggcggtggcagtaaagaatattgaaaccttccacactgcgcaaaaactgccgccagtagatgtagaaacgcagccaggcgtacgttgccagcaagtcacgcgcccggtggcttcagtgggtttgtatattcctggcggctccgccccgctcttctcaacggtattaatgctggcgactccggcgcgtatagcgggctgtaaaaaagtggtgctgtgctcaccgccgccgattgccgatgaaattctttacgcggcgcagctgtgcggcgtgcaggacgtgtttaacgtcggcggcgcacaggccattgccgcactggcgtttggtacggaatctgtgccaaaagtggacaaaatcttcgggccaggcaacgcctttgtcaccgaagcaaaacgccaggtaagccagcgtctggacggtgcggcgatcgatatgcccgcaggcccgtcggaagtgctggtcattgccgacagcggtgctacgcctgatttcgtggcttctgatttgctctcccaggctgaacacggcccggactctcaggtgattttactgacacccgctgctgatatggcgcgtggcgtagccgaagctgtcgaacgccagttggcagagctgccgcgtgccgaaaccgcccgtcaggcactgagcgccagccgtctgatcgtgactaaagatttagcgcagtgcgtagagatctccaaccagtacggcccggagcacctgatcatccagacccgcaacgcccgcgatctggtcgatggcatcaccagcgccggttcggtatttcttggtgactggtcacccgaatcggcgggtgattacgcctccggcaccaaccacgtactgccgacttacggttacaccgccacctgttccagcctcgggctggcagatttccagaagcgtatgaccgtgcaggaactgtcgaaagaaggtttctccgagctggcttcgaccatagaaacactggccgccgccgagcgcctgaccgcccataaaaatgccgttactttgcgtgttaacgcccttaaggagcaagcatgagcaccgtgactattaccgatttagcgcgtgaaaacgtccgcaacctgacgccgtatcagtcggcgcgtcgtctgggcggtaacggcgacgtctggctgaacgccaacgaataccccacaaccgtggagtttcagcttactcagcaaacgctcaaccgctacccggaatgtcagccgaaagcggtgattgaaaattacgcgcagtatgcaggcgtaaaaccggagcaggtgctggtcagccgtggcgcggacgaaggtattgaactactgattcgcgctttttgcgaaccaggtaaagacgccatcctctactgcccgccaacgtacggcatgtacagcgtcagcgctgaaaccattggcgtcgagtgccgcacagtgccgacgctggacaactggcaactggacttgcagggcatttccgacaagctggacggcgtaaaagtggtctatgtttgcagccccaacaacccgaccgggcaactgatcaatccgcaggattttcgcaccctgctggagttaacccgcggtaaggcgattgtagttgccgatgaagcctatatagagttttgcccacaggcatcgctggctggctggctgacggaatatccgcacctggctattttgcgcacactgtcgaaagcttttgctctggcgggccttcgttgtgggtttacgctggcaaacgaagaagtcatcaacctgttgatgaaagtgatcgccccctacccgctctcgacgccggttgccgacattgcggcccaggcgttaagcccgcaggggatcgtcgccatgcgcgaacgggtagcgcaaattattgcagaacgcgaatacctgattgccgcactgaaagagatcccctgcgtggagcaggtttttaactctgaaaccaactacattctggcgcgcttnnaagcctccagcgcagtgtttaaatctttgtgggatcagggcattatcttacgtgatcagaataaacaaccctctttaagcggctgcctgcgaattaccgtcggaacccgtgaagaaagccagcgcgtcattgacgccttacgtgcggagcaagtttaatgagtcagaagtatctttttatcgatcgcgatggaaccctgattagcgaaccgccgagtgattttcaggtggaccgttttgacaaactcgcctttgaaccgggcgtgatcccgnnnntgctgaagctgcaaaaagcgggctacaagctggtgatgatcacnaatcaagatggtcttggaacacaaagtttcccgcaggcggattttgatggcccgcacaacctgatgatgcaga

SEQ ID NO: 1060 - DNA, 13300 bp, Escherichia coli
  Strain O55:H7
  modified_base (3)..(3): a, c, g or t
  modified_base (1553)..(1553): a, c, g or t
  modified_base (5410)..(5413): a, c, g or t
  modified_base (6038)..(6039): a, c, g or t
  modified_base (6045)..(6046): a, c, g or t
  modified_base (8664)..(8665): a, c, g or t
  modified_base (8771)..(8774): a, c, g or t
  modified_base (8776)..(8777): a, c, g or t
  modified_base (12724)..(12725): a, c, g or t
  modified_base (13294)..(13297): a, c, g or t
acntcgcaaggcgtgcagtttgatgaagtgctgatttgtccgcacctgcccgccgatgagtgcgactgccgtaagccgaaagtaaaactggtggagcgttatctcgctgagcaagcgatggatcgtgccaatagttatgtgattggcgatcgcgcgaccgatattcagctggcggaaaacatgggcattaatggtttacgctatgaccgcgaaaccctgaactggccaatgattggcgagcagctcactaaacgagaccgttacgcccatgtagtgcgcaacaccaaagagacgcaaattgacgtccaggtgtggctggatcgcgaaggtggcagcaagattaacaccggcgttggcttctttgatcacatgctggatcagatcgccacccacggcggtttccgcatggaaatcaacgtcaaaggcgacctctatatcgacgatcaccacaccgtcgaagataccggcctggcgctgggcgaagcgttaaaaattgccctcggcgataaacgcggtatttgtcgctttggttttgtgctaccgatggacgaatgccttgcccgctgtgcactggatatctctggtcgcccgcacctggaatataaggccgaatttacctaccagcgcgtgggcgatctcagcaccgaaatgatcgagcacttcttccgttcgctctcatacaccatgggcgtgaccctgcacctgaaaaccaaaggtaaaaacgatcaccaccgtgtagagagcctgttcaaagcttttggtcgcaccctgcgccaggccatccgcgtggaaggcgataccctgccctcgtcgaaaggagtgctgtaatgaacgtggtgatccttgatactggctgcgccaacctgaactcggtgaagtctgccattgcgcgccacggttatgaacccaaagtcagccgtgacccggacgtcgtgttgctggccgataaactatttttacccggcgttggcactgcacaagcagcgatggatcaggtgcgtgagcgcgagctgtttgatctcatcaaagcctgtacccaaccggtgctgggcatctgcttagggatgcaactgcttgggcggcgcagcgaagagagcaacggcgtcgacttgctgggcatcattgacgaagacgtgccgaaaatgaccgactttggtctgccgctgccgcatatgggctggaaccgcgtttacccgcaggcaggcaaccgcctgtttcaggggattgaagatggcgcgtacttttactttgttcacagctacgcaatgccagtcaatccgtggaccatcgcccagagtaattacggcgaaccgttcactgcggcggtacaaaaagataacttctacggcgtgcagttccacccggagcgttctggtgccgctggcgctaagttgctgaaaaacttcctggagatgtgatgattattccggcattagatttaattgacggcaccgtggtgcgtctccatcagggcgattatggcaaacaacgcgattacggtaacgacccgctgccacgcttacaggattacgctgcgcaaggtgccgaagtgntgcatctggtggatctgaccggggcaaaagatccggcaaaacgtcaaatcccgctgattaaaaccctggtcgcgggcgttaacgttccggtgcaggttggcggcggtgtgcgtagcgaagaagacgtggcggcgttactggaagcgggcgttgcgcgcgtggtggttggctccaccgcggtgaaatcaccagaaagggtgaaaggctggtttgaacgcttcggtgccgatgccttagtgctggcgctggatgtccgtattgacgagcaaggcaacaagcaggtggcggtcagcggctggcaagagaattcgggcgtttcactggaacaactggtggaaacctatctgcccgtcggcctgaaacatgtgctgtgtaccgatatctcgcgcgacggcacgctggcaggctctaacgtctctttatatgaagaagtgtgcgccagatacccgcaggtggcatttcagtcctccggcggtattggcgacattaacgatgttgctgccctgcgtggcactggcgtgcgcggcgtaatagttggtcgtgcattactggaaggtaaattcaccgtgaaggaggccatcgcatgctggcaaaacgtataattccgtgtctcgacgttcgcgatggtcaggtggtgaaaggcgtacagtttcgcaaccatgaaatcattggcgatattgtaccgctggcaaaacgctacgctgaggaaggtgcagacgaactggtgttctacgatatcaccgcttccagcgatggccgtgtggtagataaaagctgggtatctcgcgtggcggaagtaatcgacattccgttttgtgtggcgggtgggattaagtctctggaagatgccgcgaaaattctttcctttggcgcggataaaatttccatcaactcgcctgcgctggcggatccgacgttaattactcgcctggcggatcgttttggcgtgcagtgtattgtggtggggattgatacctggtacgacactgaaaccggtaaatatcatgtgaatcaatataccggcgatgaaagccgcacccgcgtcactcagtgggaaacgctcgactgggtacaggaagtgcaaaaacgcggtgccggagaaatcgtcctcaacatgatgaatcaggacggcgtgcgtaacggttacgacctcgaacaactgaaaaaagtgcgtgaagtttgccacgtcccgctaattgcctccggtggcgcgggcaccatggaacacttcctcgaagctttccgcgatgccgacgttgacggtgcgctggcagcttccgtattccacaaacaaataatcaatattggtgaattaaaagcgtacctggcaacacagggcgtggagatcaggatatgttaacagaacaacaacgtcgcgaactggactgggaaaaaactgacggacttatgccggtgattgtgcaacacgcggtatccggtgaagtgttaatgctgggctatatgaacccggaagccttagataaaaccatcgaaagcggcaaagtcaccttcttctcgcgcactaaacagcgactgtggaccaaaggcgaaacgtcgggcaatttcctcaacgtagtaaatattacgccggactgcgacaacgacacgttactgttgctggcgaatcccatcggcccgacctgccacaaaggcaccagcagctgcttcggcgacaccactcaccagtggctgttcctttatcaactggaacaactgctcgccgaacgcaaatctgccgacccggaaacttcttacaccgccaaactgtatgccagcggcaccaaacgcattgcgcagaaagtgggcgaagaaggcgtggaaaccgcactggccgcgacggtacatgaccgctttgagctgaccaacgaggcatctgatttgatgtatcacctgttggtgctgttgcaggatcaggggctggatttaacgacggtgattgagaacctgcgtaaacggcatcagtgagttgagggataagcggatgcgatgttgtcgtcgcatccggcaaaaaaaacgggcaaggtgccaccaccctgcccattttctttaaaaccgaaaagattacttcgcgttgtaattacgcagagcattacgccccaacacaatccccgcgccaaccatgccgcccagcagcaccgccagaatcaaggtgattgcctttttcgggctatcgcgacgaataggtaacgtcggtttcattacataacggtaagcatgaatatcaagatcatcaacttttaagctttcgatatccagcaggttttgacgagtctgatagtagtttggtgagaacaccaacggacgggtcgcctcatgcttaatcatcgactccagcgcttcgctccccaaaaggaacaacgtatcttgcgtgatatcttcgccagtctgttgaatttgcggttttgtcacctgcgcctgattcgcatactgcaacgcttcctgaatctgacggatacgcagatctttctgctcctgcgcaaccacttcctgcgttcttaaagagtcctgcaagtttttccgtcccagagcaatgatgtctttgagatccttttctagctcttgattcactttatcatcaacttgctgaatgtattgggccaacttcatttgtgctccctctgcagtttgcccaacataagaaacagtcaatggtaattgctggttcttaacagaaggttcgatggtaagtttttctggttcttcctgattatccagcgtttctgctaatgcagagaaggcagaactgaagcgaccaattaacgtctcctgtaaatccgatactttcggtgcagcctgaccatagataacattcacggcattgttatagccagcaatttgtcccacgtcgggctgagtgataattgctgttgacgtccatttctccttcgctactgccaaatatccaatagccagggcaatagccacaatgacggaaatgatgattgtcatcttgccacgccacaactgcactagtaaatcaatcaaatcaatctgttccgagtcatggttttgcccagaaacattattattttctactctcatcattaccctaacggacgaaataattttaagtcgccatagtttagcgataatcgccatgaatgctataggataaatgataaaaataatgaattattacaaagggaacataagagaatcagggcgaaaatcgccctgataacaggatgttagtcactgccaaagagatcgcgggtgtataccttatctgccacatcactaagctcttctgccatacggttggaaataatgacgtcggcttgttgtttgaaggtggcgagatcacgttccaggcgagagttgaagaatgaatcttctttcatcactggctcgtagatgatcacttcaacgcctttcgccttgatacgtttcataatcccctgaatagaagacgcacggaagttatctgaaccgctcttcataatcagacgataaatacccaccacttgcggtttgcgtgacaaaatggcatcggcaataaaatccttacgcgtgcggtttgcatcgacaattgccgagatcaggttattcggcacagactgatagttcgccagtaactgcttggtatctttcggcaagcaataaccaccataaccaaacgacgggttgttgtaatggttgccaatacgcggatcgagacaaacgccttcgataatctggcgagtattcagacctaaactttctgcgtagctatccagttcgttaaagtatgccacgcgcatcgccaggtaggtgtttgcaaaaagtttaatcgcttctgcttcggtcgaatcggtgaacagggtcgggatattttgcttaatcgcgccttcctgtaacaacgcagcaaaacgttctgnnnnttctgaacgctcaccgatgacaatacgtgaaggatggagattatcgtaaagggctttaccttcacggagaaattccggagagaaaataatattttcagtacgatatttcttatgcatcgcttcggtaaaaccaacgggaaccgttgatttgatgaccataaccgcataaggatttatctcaactacgtctttaattactgattctacactggatgtattgaaataattagttttaggatcatagtcggttggagtggcgatgatgacataatcagcatcccggtaggcttcatttttatctaatgtggcattaaagtgtattttatctgattgcaaaaactgctgaatttccttatcaacaataggagatatccgatcattcagcatagcaacgcgtgacggtaaaatatctaatgccacaacctcatgattttgtgcgattagaagcccgtttgataagcctacatagccagtaccggaaatggtgattttcatttcatgctctcagaattaacttaactgtgaatcatgatgtttttagcatcctgataagagctaaaagttttaacgctacgttgttcgatggtcaacgcaacgaaaaacaattcagattttctttataaanntagctnntatttattaagttaatattaagccgtgaaatttagtttataagataattggcaaataaatatcctccaccatagccggaggtttttcaaatgcgcctataaggctatcttaccaaccacgccctaacaggcgcacacgatctgacatttgcatccaacttcgttacagggcaagcttacgaaagcccgcaccccgcaaggactgacgcgagatagtctctgtccatggctgcttttctcatcttacgtcttaaccctgccttgaataccttatcattcgtcaaaatattaatgcaatgtgccgtatccctgaaaataattcggctgcatttcctcttcttattttgcagtcgtcttcattcattaccacgtccagacgccagtgcaacttattctccacgtgccagtggtttcggattgctgtggcgaacttctctgcggttaaatcagcagaactgatataatatctgaccgtcatttctggctctttcttttgttctgctattatggaccgaaaggagactgccacgcataatttcttcagccctttccattaaaacgtgaaatcaataagttcatcagggacatcgcaaacaatatgaagacggatttcttctctgccgtgacttttttcactaatatctttctggcaccccatcgcatcagttttgatgatttttccattaatgtccagcatgttaagaatttccgggatagctgtaatctcattagatttctcatccgtcttgatctgtccgatgaccagactgtgcattgttgagaacgcactaatggcatgaatcgctcccctgcggcgactcttgtcataagagtgctggagcgtttttccatcaattgcaatgacgtctttatcatctgaagaatggccgtcacgcatccagttaataaagcactcgtgaaattttgcaggactgatacaggatacaactctggcaatggtatcgtgaacaggaataccattttcaaaatcaccatattgcttcaaaaaatcgagatgtgattccccaaaatcctctatatcttcccaaccttctgcaccagaaataacggcacaaatagtcaacagtagaatatccgataatttatgttccattttccaggcttgtctgtaatcggggataatagaaatatgctccatcaattttttaagttccactttgttctccttaattatgtaaggagtatttgatcatgtataagcaataaaaaacagcttcaggtgatgaggaatatctcaatttttgaacataaaatgcgaattatttagtacaaaaaagcagcgttacatgatctttccctgcctctgactgagagtttactcacttagccgtgtgtccactattgctgggtaagatcagttttctgtgcacaaaaaagcccggaggagcgctccaggcctagattcacagtaagactaaaccagattaatctagctatgccatagcaaccatgatttcttcaatgccacaattaaactgcataaattctcaagtaaccatattgctactgtatctagtcataaaacaaacttccagctagacgtattaaacgcaacagctataaaatgccgcctctaacttgcgctggcaaaaaatataaacaactatctatagacagatagagttcgtaacttaaactataatattagtgtttataacagctattgtatggataaactcaatataatctaaataaatggaacgtattcaaataaaaattacccataagcattaaatcaagagtcattcactttttatcatttcaaaacctctctgagataatcaatctcatcaaatagttctatctgatgatttccaacaaaaagaccatttttatctaaatactcagcgttatctacattgttatgaacggtatagtcgaaatatttaagaacatctgtatttttcagaaagttaccagtgacaattggtctacactcaataccagcagaatttaaattttcaacaagttgtttcctaatgacaccagaatctttttttatgataaatgagaaaccaaaccagctactctcgccagtttcctgctgcacgtccaagtatggatgatccttaaatttatcaagaaaatactctgcattttttcttctaacagaaataaatcttggcaatttttttaattgttctatgcctattgcaccactcatttccaatggcctaacattatagccgggtaaaacgaatttgaatgactcttcaaattgatcatcactcttcacacctgtaactttattttttttcggtaaattacgcgtccaaccatgagctcgaatgcacagcaagatatgataaatttcttcatcatcagtgacaatgcatcccccttccatggtagctatatgatgagaatagaaagagctaaatgttcccatcagaccaaaagtgccggcgcatttattattaaaggttgctcccatagactcacagttatcttccaataagataatatctctacctccaataattttattaatttcatcgaagttattaggattacctaataaatttaccgtgagtattgcttttgtactatctgttacagcttctttcaaactttcaatatcaatatttaaggtattannatcgatatcaacaaacttcaccctcaatccatattgttgcaacggataataagtagttgaccaagaaacagcaggaactattatttcatcccccttttttaatctnnnntnntttgtgaaaaacaatgcagcaatcattaataaatttgctgtagaccctgaactcaccatcacggcatatttacttccaaaagtctttgcaaattgggtttcgtattgttttacatactcccccatcgtgaacattttagagtctaaaactgattggattgctttatattctaaatcatcccaagtgctacttgctaatgggtagttaatcatttatacacattctccaaataatacttataggtttcttttataccatctctcaattcaaactgatatttccaaccaaactcactcagcaaggtaatatcaacaagttttcttctcataccaacaggctttgttaaatcatgagtaaaactacctttatatcctatttcttcagctataactttataataatcattaatcgagaaatcatgacctaacccaacgtttaacatacatggtaatcgctgaatatttggaatcgcttggtaaataaaattcgcaaagtcttcggcatacataaattcacgacgggactcaccgtccccccaaatttcaatcaattttatattattaactttagcattatgtattctatttataacagcaggaatcatgtgtgaggaatgctcatcaaacttatcatatttcccatataaattacatggtataatcgttttataatgataaccttcactctctttagttatatactcgcacaattttgccactgtgattttagcaagtgcatacccttcattagtgtgttctaacttacctgtaagcaaagcatcttcagaaattgcagtgtcaatacctttagggtacatgcaagagcttcctaaatttataaagttcttaacaccacaatttttagcctcatttacaatgttaacacccattttcaggtttgagacaagaaaatcaacagggcgttttatattcgcttgaattccaccgactaaacctgccgcatgaataatcaaatcaggagaatgacatgtgatgtagtcatgaacagctttattatcaagcaaatttagctcagaactagtcgggcataatagctcatacttgtttgaattattattatcaacaatattacgaccgaccatcccagttgagcccgtcaacagaattttcatatgacctctaacatataacctgatgaatatatctaacttaaagatttcaaaatcgcgatccgtgacatcattagctcctcttaagatcgcaaatttaagattattgcatcgttattctagccattctgtatgaaaaacaccttctttatcaatgcgtttatacgtgtgcgcaccgaaataatcacgctgtgcttggatcaagttagccggcagaaccgcagaacggtagctgtcgtagtaagctacagcggcggagaaagtcggtaccggaataccgttctgcacagcataagacactacatcacggagggcttgttgatattcatcagcgatatgtttgaaatacggagcaagcagcaggtttgcaatatctttgttttcagcataagcgtcggtgattttctggaggaactgtgcacgaataatgcagcctgcgcggaaaattttcgcgatttcaccgtagttcaaatcccagttgtattgctctgatgcggcacgaagttgagaaaagccttgggcataagagacaattttgcctaggtacaaggcacggcgtactttctcaacaaactcagctttatcactagccagtttagcctgcgggccagacagcactttagaggccgcaacacgctggtctttcagagaggagatgtagcgggcaaatacggattcggtgatcaacgacagcggttcgcctagatcaagagagctctggctggtccatttgcctgtacctttgttcgcagcttcgtccaaaatcacatcaaccaagtatttaccctcttcatcttttttgttgaagatatccttagtgatgtcaatcagatagctgctcagctcgccttcattccattcattaaagatagaggctaactcttcattagacagatttagggcacctttcagcagagaataggcttcagctatcaattgcatatcgccatattcgataccgttgtgcaccatcttcacgtaatgacctgcaccatccgcaccaatatacgtcacgcacggttcaccatcttcagctatcgcggcaatcttggtcaggattggcacaaccatttcatacgcatctttctggccaccaggcatgatagatgggcctttcagcgcgccctcttcaccacctgaaaccccggccccgataaagttaaagccttccgcggaaagttcacggttacgacgaattgtgtcctgaaagaaggtattaccgccatcaatgatgatgtcgcctttatctagatagggcttcagggaattaatcgcagcatcagtgccagcacccgctttgaccattaacaggatacggcgtggagtttcaagagactcgacgaactctttaaccgtgtaataagggaccagtttcttacctgggttttcggcaacaacctcttcagttttttcacgcgagcgattatagacggatacggtataaccacggctctcgatgtttagagccaagttgcgccccatcacagccataccgatgacgccgatctgttgcttggacattacatactcctattatttatctttaaccagctaatgtaaatactttaattcaatattattccaggtaaaaatactggcttcatttataacttccggataaaaaccacacataatctacgaataaatttaataaaagaccaagatatggcaaaaaaacagatccactttcctttaagatttttatttatcgaagatatctcaccaagttgcatcttgatcaaatttgaactgagcccagagtgtccataacttggtttgccaagagatattaatggtgttttgacataacccattatacatttatctttagctaaccttagccataaatcatagtcttcagaaaatctttgtaattcattaaagcaaaccaaattccttttcattattactgatggagttgggaaataattcttgaacgcaaggttataaagatttataatttcgaactgggacacagtgcttggattatcattagtattaatggtaaatgatgcaccaatgaaatccaacccatatttatccatcaactcaatttgaatatttgttttattaggaaaccatatgtcgtcagcatctaaaaatgccacaaactcgccagaacaaaagcgaacacctttatttcgacttgctgccggacctaaattaatgtcattcttcacaagctttacgaaagggtgatttgttttaatatgttcatacgtattatctgtcgaacaatcatcaacgcaaacgatctctataaatttgtagtcttgatcgtatactgattgcaatgctttatctatagtttgaatgcaattaaagcaaggaataacgacacttattgttttcacaatcaatatctcactttatgtatttacagtatataaaagaagcaatagttctaatccctccgaagagatagttgatattacctgtcaaaaaaaagcatttcatctttattaccaaatcatttaccataaccatatacaagttttttttagcagttgactgaccttcatgcaacctgtaatagaataaatattccggtaaattttgaaattttatttttgctaaacttaatctattccataactcataatcctcagaatagtttgaaaacatataaccgccaattgaagcgattactttcttcctaaacattacagatggatgaacaatgcaacatttatacggtaagttttttacaatatccaaattttcttcaggtagctttgttttgtttatttctcgacctttatcatcaataaatattgcattagtaccgacgacatccacataaggattattttttaannaatcaacttgtttcgtgaatctatcaggatgagaaatatcatcggaatccatccttgcaataaactcaccattggacaaatcgatggctttatttaatgagtacggtaaataagcaatatttgtacgaatcaacttaattttgtcattaactttgtgtttcaactcattataaaaatcatccgtacaacaatttgcaactattattatctcgaatgacgaaaatgtttgcgataaaatactatttattgcctcatcaagaaaagggttttttttattaactggcagaataacagaaacaacaggatgagttgattcggcagattcagcttcatcgattatcataacaatatactctctttccttttaaataaccataacagtgatataaataattgaattaacgaacataacacccaacctatacctcccgctaaaaccccaactctagtagataaaagccaaattgttggaaatacacacagtaacgaagagatattgatacacagtattactattgctttttgttttattaacataatctgataaattatgttataaatagagtttnnnncaa

SEQ ID NO: 1061 - DNA, 122 bp, Escherichia coli
  Strain O55:H7
attaaccgcaatggccaaataattatagattctgcttcagcattatcaagccataaacttaggaaaaatggagaaatcagaaccataatgagacaagggaaaacacaaaatataattatgct

SEQ ID NO: 1062 - DNA, 926 bp, Escherichia coli
  Strain O55:H7
  modified_base (885)..(886): a, c, g or t
  modified_base (888)..(891): a, c, g or t
atattttgtttattcaaggccactgtcaatcgtgggaaaaagagccttaataaaggatattgtaactgaagaaaatattgagccaacgtagatgccaatacgtaatacccaaaatcactaatgtcaacatatttactaagaacaattctatcaagctgtgtaactagcaatcctatagctacagcgattgataaaacaccactttcacgaaaaattttatttatgccaattgatagtttttcctgccttttaatattgccatcaaaactaaaaagtatttttatagtattacttgtggattccagaaaagcaatcaaaagaaaaccactttgatataagattgcctgtggccacttagttacaagacaaatagcaacaatgtgttttaatgtaaaaaaaaagcattgtcttatatttgatttatgctgttgcaatgttccattccagtaacctatattagcattgttagggaactgaaataaaaactgcaatcctaacaggacaacgcaaataaaaacctctttctttaaggaaaaatccaaaactaaccaaaagtcaatgatgaaatagctccccactaaaatcaatgaaaacacaataatagctaaaagcgaatatgcatgtagaaaagacttatagattacataaagttctctagacttaccattacatcttgcaatatctcttggcattatttgggacatgccagcgtctgccaaatacattaatgattgtatagatatacaaatagcaactataccccattgctggggaccaagaatgtggagataatatggcagaacaataatactaactccccccatccatgccacacaaatataatttgatatcccattcttaataaagcctgaagaaaacattttnntnnnnatacataaaaatctctttattaaggatgccctaat

SEQ ID NO: 1063 - DNA, 4065 bp, Escherichia coli
  Strain O55:H7
  modified_base (156)..(157): a, c, g or t
  modified_base (1209)..(1210): a, c, g or t
  modified_base (2576)..(2577): a, c, g or t
  modified_base (2782)..(2783): a, c, g or t
taaaaatcaatctaaaggtcggtattatcgataatgttatccccaaaagcaccacgctatcttttttcttaatattagacaatataattgcagtacccaatatcgccgcgggaacaaaaacccgccaggaaagctgccaattatcacataaaaatnntgataatatacaaaaaaacaaagagagcttatataacacccaattattcgtctcactctctaagtttatcattaataataaaaacaagaaagttccgctaataattagacgttttaaagcttcattatcttgactcataaatagagacaactccccccccgacacaaataaggaagcataactcatccaatataaaaagtttgagataataaaggagataattatagatacaattacgaatttaaatttacctattttatttacccgacaaaaataatatacacaaagaaacaatataaaggtataatgaaacaataaaccgagaccaataaaaataattttcttatattttgtttttgaatagatcatcaatacaagaaaatataagcagataatactgcgccacacataaatgttattcgaaaaaacataataagacattagcattagtgtaacacataacaaacttgggctaattctaacctcatcatttattttaagatatattaaaacagcaagaaaattcaccaaaaacaaatttagaagaataaatacaaaccgcccctcccccaaaaagccctgcaagtaaaaaaataatcccataccaatttcaaatttattggtttgatgataaatagaactcaacccctccagtaatccattattccaaatataaatagcttgttcataataaacaagcgagtcgtcaaaaccaccctgaatagacagaggtaaagaacatagtaatgataatactcctccccaaattatcactacatattttttattaaacattagtacgactcttatttttcaattcgaacccatttctctgggcatggatcaaaactattaagttcttctctctcaaaccaaggcgttggcgcaattgtaatacctagatcatagttttttagccacgccccccaccaactaaatgaactattagctattatatgatatttagcatttgacattaaccacatatctacctcttgagtattcccttcaataaacttcacatcatcactccttgaaaatatttcattttnntatttcttacaccattcgatatcatcactaaatacaaaaaaaaccaagttattaaacctttcctttaaataacgaatgctgtcaatataatatctttcagtacacaacccatgtatttttaacgcttcgacgttcgatacataatctccgcggcgtatatgcacggagactgaattggtgcatcgaattacatcacttaattctttagcatccaaatttatattgataggtgtaaatatctctcttaatttttctttatgctctaaaaaatacctctcattttgccaaaaacctataaactccacacttcctttcatgctgccatttatcttctttgagtattgctctgactcaaaccttttgctacataaagataattttggaaatttattaatggcacgcactatgaaattagggaagatacacatttctttctttgacatgacaaatgtattatctatattcaacttatctaaacgaaaaccaccatgtagtgtatagtttttataccccctcaaatctaatttaagagagctatttcgctcaactgactcagcataacctttcgcatactggaacatctgatttcctaagcctccagccaagcgtgcaaccacgatactcatttattatctccggatgttaatatattcaatatcgatttagtcattttaattacgatttcactatctcctttcgattccacattcaggcgcaccaccggttcggtattggaagagcgtaaattgaaacgccagtcgacaaacgacatactgataccgtccgttctgtccaccgacagcgcctcatgagaaaaatactgttccacacgctcaattgctaccttcggctctgccagcgtacggtttatttctccgctcgccgggtaggccagcatccggtcatggatcagttctcccagtgacagtcctttcagacacagcaattctgctaccagcaaccaggggatcattccgctgtcgcaataggcaaaatcacggaaatagtggtgtgcgctcatttcgccaccataaatggcatcttcgcggcgcatgcgttctttgataaacgcatgcccggtttttgacatcaccggtttaccacctgccgccgtcaccacatccacggtattccaggacaggcgcggatcgtggacaattttctccccgggatacttctccagaaacgcttctgctaacaggccgacaatataatagccctcaataaactgacctttttcatcgaacaggaagcagcggtcaaaatcaccgtcgaaggcgactcccatatccgcgccgtgttcaatcaccgcattgcgcgtatcagcccggcactccggcagcagaggattaggaataccattggnnaaatttccatccggcgtgttgtggattttgatgaactcaaccggcactcccaatgccttaaaacgggcttcaatagcatcaaccaccggacctgctgcgccgttacctgaattgaacaccagcttcatcggtttcagtttggcgggattgatgtaacccagcaggtggtcaatgtaggcatcgcggatagtaatgcgctggtacnnggccacgttttgtttcttcaataacagggaaatcatttaattccgccaagcgctgcacgtcgcgcagaccggtgtcaccgctgatgggtcgtgccccctctcgcaccagcttcataccgttgtaatcaatcggattatggctggcagtcacttcaataccgccatcaatatccaagtgaaaggtggcgaagtaaatctcttcggttcccgacatgcctatatccagcacatcgacgcccgcatcctgtagtcctttcgccagcgccaactttagcgtctcgctggtcaggcgcgcgtcaccgccgaggacaatcgtttttggcttaaggtactcgccgtaagcgcggccaattcgccacgcgatatcttcattcagctcttcgcccagcctgccgcgaatatcgtaggctttgaaacaagttaatttattcatggttaatcttctttttatatctttctttctgcctgacaatatcatcttcaccaagataatcaccagagcttacttctattaatattaatggtataacacctggattttctaaactataggatgccccaagaggaatataaattgattcatttaccgtaattagcttttctgtacctcaagaatgacttttgctgtgccagacaaaacaatccaatgttcagaacggtggtgatgcatacgcaaagaaagcccttcgccgggtttcactactattttttttacagtatatctgtcaccctgatctatagagtcaaacttcccccatggtctaaatacttctctatgagtaacatgctctgtgcgattgttttttttaaggagatcaacgattttctttacatcttgaacctcagatttatttgctactaatactgcatccttagtttgcactatgacaatattctcaacacctacagcagcaactagcgcagaatcagagtaaatataattattttttgtgttgtatgttaaggtatcacctttacatacatcacctgatggacttttatcactgagctcccataatgattgccacgagccaacatcactccatccgatatcaacaggacacacaacacaacgttttgtgttttccattacagcaaaatcgattgactcagaaggacatttctcaaacattctctcaggtagacgtataaaatccaaatctttagatgatgccgatatggcttcttcgcatacttcaaaaatatcaggccgatattttttcaactctgataagaagactgaagctttgaacataaacatcccgctattccataaatattt

SEQ ID NO: 1064 - DNA, 790 bp, Escherichia coli
  Strain O55:H7
tatttctcagcaagttcacgttcaggtttttctacaaacttttttgccacgtaaaaatgagcgttatcaacttcgatattagattcaactctcgctccaatatttatgtaaccatatcccgtttcagcataagttggtattataccaaaagtgacaattttatcttcttcagccataaacatagccgattttatcgcttcacaaaatgcttcttcattttttattatatggtctgcagcgagcactaataagatagggtctttatttttatcacgcttaagggctgaaaaagcggctaaagcaatcgctggtgcagtatttttgccacaaggttcgagtattatattaccactaagttgattcatctgccttaactgctctgctacaataaagcgatgattgtcattagtaataaccaagggggcatcaaatgataatttagaaagtctattcaacgttgactgaagcagcgataattcaccaccaatttttaaaaactgtttaggatataactcacgtgatagcggccataatctacttccagtccctcctgccataactacagctatgaatgacttatcagacatcacatgcccctttatcgtttaatccaacaaaattattatcagttctaaaataagcacgagtattttcatgtacttcattgcaagtcaatgcaagttctggagaaaaccatttccactcatcatgctgtaatttaggaagttgtatattcgatagtaaaagttttattttaaaggcaataacaacatagtgtgttgaaaaattt

SEQ ID NO: 1065 - DNA, 2142 bp, Escherichia coli
  Strain O55:H7
  modified_base (3)..(4): a, c, g or t
  modified_base (925)..(928): a, c, g or t
  modified_base (2139)..(2140): a, c, g or t
atnntctttataaaaatgttgccaaacaccataaaaagcccccagcttaatatctattttaacaccaatttctttccagttatccggcaaaaagcttgcttgaatgtctcattcttatatatcctccctccgggaacaaaccaatatccctgcgcaggtctattacatctcttgcctagtaaaaattcaccatattcattctcaattatcaggtctattgagattaatggcgcataccgtacgactgttacaagatcctcatagtctaacaatatcctgaccccattatttaataatcaatccagcactatatgtttagtacaaaagaaacatttcatacttaacaactagtaaactgtattcttatttgtggaatttgccacttggcaaattccacatccaagatgatacgaagttagtttgttactcttgggctaaattggcattaaaaccgtgcgatttcaacagtacgtgtttttttgctgtctgcaaatcattagcgaccatttctgagatcatctcacgtaaagtaatttcaggcttccagccaagtttttcatgcgcttttgctggatcacccaacaatgtttctacttctgccgggcggaaataacgcgggtcaaccgcaactatgacgtctcctgttttgacgccaggtgctttatcgcccgtcacggaaacaacaatacctttttcatctacaccttttccttcaaagctcaatttgatgccaagttgctctgcagtcatttccacaaactcacgtacagagtactgaacaccagtggcaataacgaaatcttcaggttgttcctgctgtagcatcatccactgcatcctgacataatctttagcatgtccccagtcacgtagtgaatccatattccccaagtaaaggcaagactctagcccctgagcaatgttnnnnttgcacgggtaattttgcgcgtaacgaaagtttcgccacgacgcggagattcatggttaaatagaattccgttacaagcatatataccgtaagactcacggtagttaacggtgatccagtaagcatacagtttggctacagcatacggtgaacgtgggtaaaaaggtgtcgtctctttctgaggtatttcttgtaccagaccataaagttcagatgtggacgcttgataaaagcgtgttttcttctctaagccaaggatacggatcgcttccagtaggcgtaatgtaccaatagcatcaacatccgcggtatactctggtgattcaaatgacacagccacgtgactcatagcccccaagttgtagacttcatccggtttaacttcttgcagaatacgcgtaatgttggaagtatccgtgagatcaccatagtgcaaatggaagtttggcttggctgaatgcggatcttgataaatatgatcaacacgttcagtattaaacgacgatgcacgacgcttaataccatgaacttcataacctttttccagcagaaactctgccaagtatgatccatcttgtccggttacaccagtaataagagcaactttagtcataaaaaacctatattataaaatcaattatttaaatataacgactctaatattttagtccgttttgttaggtcgaaatcttctattagtgcctgatacgctttatgtgcgagattatttctaagttcaggatttgcgtgtaaaacattaatttttcgtttcagatccttgctatcttcatccttaaaaacgacaccagctgttttttcaataagatatttatttgcttcgatatctgaggatagcacaggaacttttgccgccattgcctctaacatcgctaagggcatcccctcccatctagacggtaagacaaaaagatcatatttatataaatgttcttctacagcatctatccagcccaaaaaacttactttatcggcaatgttatattgatttattttctctaatagcttgaccttgagtggaccatctccaataatatctacatggatattggattccaaatcctttattgcctcaattaatagcaatggatttttttggtcacataatcgtccaaccataacaattttaaaaatatctttatctttatctttatctttattgtatttatcgacatctattgcattgttaattnnaa

SEQ ID NO: 1066 - DNA, 1297 bp, Escherichia coli
  Strain O55:H7
tgattttttatttttaacaaaatattttcttgcgattctttcatcgctctcattcatgactataatgatattggaacaataagaggctatcaactccatcaaaaagtatataaacttaataagcttgttttcagttgaaggaaatgcgaagccgtgaaccgtatgcactatttttttcgtaccagctaattttgcagcaacacgcccaagaaaacctgttttagaggaatgagtatggacaatatcaaatttttctttttttattattttatataattgaaatagagatgcacaatctttaaataatgaaatttccctggtcaaagttggaattatatgtgtgcagactccaaaacaacgggcctgctcagctaatcttccctcctttgaacaaaccatcgattgttgaaattcttgacttaaagtatgcatctcatcaagtgaaacacgttgagcaccactaatgtcaccactcaggtgcacatgcagaatttttaccataataaatataatccaaattcatggtcattctataaacactgataacattcagtacgttgtagcgataaagaacaaaccttatacacttaattttattcaaaaaaacatcacgctaccgcccctggcttaacagctaccagattactgttctcataccaaaaatttaaagcacatgaagcactcaaaccacatggttggccgcaattatctaaccaatttcagttagaaacaagtgtaaaactgttcaaaatctagttaaggtcaatatctgcacaatgcaatttatttgacataaaaaatagtagtaacatcccaaactttaccacagagatattaaaagcccccatcgttaaacttgctttcacatatgtgctacataattatttagcaagtaattgctcaatattcttgagaaatttcgcaccttcctttaggttgcgcagcccatacttcacgaacgcctgcatatagcccatttttttaccacagtcgtagctgtcaccagtcatcagcatggcatcaacggactgttttttcgccagttcggcaatagcatcagtcagctgaatacgcccccatgcaccaggttgagtgcgttcaagttccggccaaatatcggcagaaagcacatagcgaccaacggccattatgtctgagtccagcgtctgcggctgatccggtttttcgataaattcaacaatgcggctgactttaccttcacgatccagcggttctttggtctggatgacggagtattcagagaggtcacccggcatacgttttgccagcacctggc

SEQ ID NO: 1067 - DNA, 1109 bp, Escherichia coli
  Strain O55:H7
tttcattgaagcgcgcaatcatggcagcaaggttgtaacgcgacgggtcggcgctggcgtcgtcgatcacaacgtctggcagcaccacgacaaatggattgtcaccaatggcaggtcgcgcacataaaatggagtggcctaaacctaaaggttcaccctgacgcacgttcataatggtcacgcccggcggacagatagattgtacttccgccagtagttgacgcttcacgcgctgttcaaggagagattctaattcataagaggtgtcgaagtggttttcgactgcgttcttggacgcgtgagttaccaggaggatttctttgatccctgcagccacaatctcgtcaacaatgtactgaatcattggcttgtcgacgatcggtagcatctctttgggaatcgccttagtggcaggcaacatatgcatcccaagacctgctaccggtataactgcttttaaattcgtcattcttttcctacctctaagtggctgatagtgcgtaaattattgccataggttagccaaacgttatggctatataccaaagcttagttccgcataactttgattaaaccttacgataacactacacaccatcagcatctgggttactcggattactcggaaatccacatactgataatttaatcagtacctctttccgaataatcgtagtccaacctggtccttttttctctgactcgtctgcattactcagaaacaaacgttatgtcgtcttttttggcatggacgaattcatactgcagagttcgatccagaccttgcgacagcgtatacggtgccacaaaacctgaagaatgcactttcgttgcgtcaaactgtgttgttgcgcagaattttttcacgcgcacagagctgacagcgtattttttgcccgtaattttgctcaggatatcaaagcaatatccacccagcattcctagtgggtaaggcaagtgcatagaagggatctttttgttcaggctttgttcaacttcagcaaccaactggttcatgttcaggtctggcttatcaacgtagttataaacctcgtaacctgcggcaacattcttcagtttgtacttgataaactcaacaatgtttccaa

SEQ ID NO: 1068 - DNA, 85 bp, Escherichia coli
  Strain O55:H7
gccatggacttatagttagtccctgcgcccaccatcataaacttgccgccagcgatctgtttcagcaagttatagacgttaccgc

SEQ ID NO: 1069 - DNA, 80 bp, Escherichia coli
  Strain O55:H7
ataacggtaggacggatgatggttaatgaacgttctgttggtgctttgttataccattcacgcagcacttcctctgcctg

SEQ ID NO: 1070 - DNA, 1232 bp, Escherichia coli
  Strain O55:H7
  modified_base (1230)..(1230): a, c, g or t
ggatcgtgtggatggttttcgtcagggttgtgtttgttcaaaccataaacagcaacggaactggtaaagatgatatttttaacgccatttttttccatggccgccagcacattgcgggtaccctgaacgttgacatcataatagagagaagtagggctgacgtcatcgcggtgttccgctgccagtagcacaacagtgtcaaaaccggctaacgcctggtcgagtgcctgttgatcacgaacatcaccaatctgtgtgatttctggataaaagtggctctgctgtttgtccaggttcttgatattaaagtcagcaattgccgtttcaagtagtcgggttcctacgaatccggaagctcctatgagcaaaacgttatcgttcataaatcactttagtctggttgttacgtaagaaacacaagataaagatgagtaccttccctgagtagtcaatgctgcccagccccagctttaacagttagtgtgaggattataatcttttagaacattatatccagtaagtttatgaatggtcgcaaatctactctctccgttccggcaatctaaagttaatcttttccacattaacaatatggtgattaatcctgtcgatatcgacggagctttgccctctttcattcaccgcatgaacatttgcaagagacagcagtgtttcttttttcgccataaacacgccgcgaacgtctttgcgcatgtcgaagttcatgctcaatgcgggtccaactgaggattcctgcatcaccttgatatttcgcataaaaagatgttgcggtttgttgtgtagctcaagcgaggcacgcttcatctcaatgttagtcagcgccacaaaggagacagcattcccggcggagatttggataccgcgcaatttataagcaagatgggtgttatccagctgaatattattcactcggaaattttgcggtatcgagagatatttgcctttaattaccccatagccgattaacatcccggcgctattaatcatttcaatattatcaatcacgaaattgtcacaaccgtaaatagcgaccgtcgcgttatcaatacctgctttcttactgaaatccggcgtgatattgctggctttgatattacgaataacaaaatgtttaccattttcaacatggatcaactgccgacaatccgatcctgtgatattcgccacaacaaagtttttcactgcctggtcttccgggtaattgttatngt

SEQ ID NO: 1071 - DNA, 4131 bp, Escherichia coli
  Strain O55:H7
  modified_base (1254)..(1254): a, c, g or t
  modified_base (2786)..(2786): a, c, g or t
  modified_base (2799)..(2802): a, c, g or t
  modified_base (2982)..(2985): a, c, g or t
ttcccgcaaggcctatgccgatgccccagttgattttgccgttagtacagttgatgcgctcgatgacatggtcggagatcaaaatatcactgtcgttaattgccacgttccattcaatggcgtcgccctgtaagtcgctgaacttacagttggtgatgttggcaccgattatctggttatgaaatccctggcgtaagatggcgtaattagcgtggctgacagtgaggttatcgatggtcaggttgcgcatgacccgtttgtttttgccgccgatataaatctgcgttaccgggccaaagccgctcatcgccagacctttgatggtgcagtcagagccgcgcacatccagggtgatgttatgcatactgctgccctcctcccctgtcacctggctgccgtcctgtaagacaaatcgccctctgccattgccgcgcaggcttccaaggatgtgtaacgttttaccgggagggataaagatgccggtgttgatattgtcacaagccaatccggcaggcacgacgaccgtttgcccttcgctgaaggcttgtttaaatgaggcgatccagtcgtgtggattgtagtcgttaatgttaacgctttgtcgggccggaagtgcgcgagcgaaaggggtatggaggaaggcaagcgccgagcttgccgtcaggaaggtgcgtcgggagagttttttaaatggcatgcgttctcctctataaagcctgcagcaagctggcgagttctcgattgatcacctgctggttaaaatcgtgttcgactttttcgcgcgcacgtttgacgaccggagccagttcgtcggtgtccagttggctaaacgtcgccagacgttgtgccagagcgcgagcatcgttctcaggcaccagccagccggatttatcggcctccaccaattcaggtattccgctatgcagagtagaaaccaccggaatgccgaccgccatcgcttccattagtgccaccggaataccttccatatcgccatccgcgcccgttaccgatggcaacaggaagacatccgcgtcatcgagcatctctttcacttcatggctcggtttaaagcccggcatatctaccacatcttccagttgatattgttcgatgagggtgcgcaggcgtcgttcccacgggccaatgccgaggatgcgatagcgaaatgccatgccctgctctttcaactgacggcaggcttcgatcgccacatgcaggccttttttttcggttaagcgtgcgacggagatnatttccagcggcgttgcgggcgctttcaccggacgcgggctaaaacgcgtcatgtccacgcccatgcgcgatacggcgattttttccctcgggcagcccattttttgcagccttccggcccacagatcgcttattggtagcatcagatcgccgcggcggaacagttgctgatattcgggagtgtaatggttgagcacctcccgactggagatatcaataccgtggaagatagtggcaattttgccgcgaatgacacccagttcgcggagttttgctgcggttacccctgcgggaccaaagtgagcgataaagacatcggcatgaagcggtgctacgacctggccgcaaatggcagacaaaatcaggttccgcgactcggcaccatagcgtttgaggttgagcgcctgccaggtatttttacgatgtatgccgcgtaacgtctggctggcgcggtggcgcagtttcgccactttgcccgtaggttcgtcctgtaaccagcgggttctggcggcaaggttgtatttcgtccatgccgcgtgggtgttctctgtatcgcctttttgcaacgcgacgatctccacctcaaatcccatatcaataaacgcggtaatttgattgaggacgaaggtttccgacgacagcggaaatttcagtaaaaagaagccgaccttcatttcgcctccccgatgcgctcaagcacagattgcaccatctgcattcccgtctgacgttcacgactgacggcttcgttaagtcgcgcgttcagcgccggaagttggcctaaggtatccgcaaccatcgcttgcaagctgccgtccagtaaatgacggatatcaatcgccatctctggcagccccagttgttgcataatcccggcggatttatgttcgtagttgatggcaattgccggagtggcaaaattcatcgagataatggcggagtgcaggcgcgtaccgacggtgagttcacaggccccgagaattttgcccatttccagatcgttgagttcatccatcactacgtggtaacgggcaggatcgctgatgtgctggcgcagattgagcgctaccatgcggtcgtctttgttatagctgtcgatgcccgtacaggtggagagcgcaatgacctgatagcctccgtcgagaatgcgattgaccaccccggcaaaggctttttcatacgcttgttgagtggtgccgaggcgtttgtcgaacggtgccagttcgcgcagggtaattgccaccgttttctgttgtgcggcaacgtccagccagtgttggacggcatagctggcggtgaaatcttctgtgtggtgatcgaccagccacgcggtatcgacgccatgttcaacttttgcagtggtgatattgctgcgtttcatcgaatcaaggctgaccgattcgcgcaggatcaacgcatcgcagtgaccaaaaacgtagttcgccagttggttaaattgctcatcctggaagggaccgacgctgtgaccaatcataaacagcggctttttcgccataaacgtgcaaagtgcntgttcaaactgcnnnncaccatagagatcgacaaaaaacgatccgccgacctgaataatggcgtcgtaacctgacagcaagcgcacgaagtcggtgaatccctgggcgatggcgatattacgcagcttgccagtgtcggtgacgcgtgagagcaatacctgatgctggtagcggcgacggaggacttttttaacgnnnncgacaacgcccgccgcgctgttgtgttgtttcatttgcaggaacagcggatcgcccattaccgggcggttgagcagccaggaagaactgaccggatagcggctcatcacgtccacttcggcatgtggattgggatgttgatggcatcaagtaagccgcgcaagatggcgctgtcgccacgattgccgcaagtgtggttgcccagaataagtaatttcattttttcctcataaatttgatgccaggtgaggttagttgttgttttcgttgccggaaccgaaaacagccattcaccccgcccgtaaaaacattttcattttttcgctgcgacaaaactgacgcttcacttccaccaccagcggatggcgcgacagcacaatcatcactacaaacgccagcacgcccgcggctatttgcaccgccagcagcatccccagcgccagttgccctttcagcaataggcccagcgcataactgaccaccagcgtcggcagcgagagataaaacggtagccataaactcaggatgtactggcgataactggaaccgagcaccggtttaatcatcacgaagtaactcagaatggtgttgataacctgcaccagcaggaaaccgagcgtgacgccgattgcgcccgccatctgcccacctataacaatcgccggaataaacagaaaggttttgaatacgttgaatttaaagctgatatcgacccgtgctttcgccatcagcagcgaaccaatcgggttacccactgagcgcagtagccccacaatacacagcaattgcagcaccggaataatgctgttccacttctcaccaaagaccagcggtacaaagttatttgacaccaccatcagcccgagcagcgccggaaagttgataatccccaccaccgacagcagcttgtagaagttgacgcgcagcttttcggtgtcgtcctgaattttggcaaacgccggaaacaacacgcgggtgatgatggggttcagtttcatcggcggcacaacggccacgttgtacgccaggttgtacccccctgccacattcgcgccgagaatacgcgccagcaccagcgttgaaaggttggtgttgagatagttgatgatgctgtccgccgtcagccaggcaccaaagcgtaagttcg

SEQ ID NO: 1072 - DNA, 2219 bp, Escherichia coli
  Strain O55:H7
  modified_base (38)..(38): a, c, g or t
  modified_base (243)..(243): a, c, g or t
agacgccagcgagaaatgcagaccagggcgataaattntgcggccaaagtagccaaacagcagcgttcttaccgcactattgaccagataaccgaggatcgcggtcatcgccagcggccagaaatgggcgctaaccaccgtaaaagtgaagcccgccagcaccgcgctggtttcgatcatgccgattttgttgaactccagctccttctgcatcaacgcgcggaactgttgcccgtgggggancaccacaaacgccagcgacaatgttttaatcaagggtgccaggtccgggttattcagcatgtcaccaatgagatcactcaacaaaaacaccgccacgcacaccacaagccccagcccaacgttcagccagtacagcgtggtgagttcaaggtggctgatttcttttcgctgaataatggagttagcgataccgaagtcagaaagcgtatctgccagcgcgatgatcaccagcgacacagtcagcaggccgaactggtggttgtcgataatccgcgccagcacggtcatctgcaccaacccgaggccgatgatgatcaccgtggcaatcgccgaccacttcgcgccgctgatggttttttcacgtaagctcatatcaatatgccgctttgttaacgaagcccttgaacaccgtcaggaaaacgattttgatatcgaaccagacgctccattcgcggatgtactcaaggtcgaactcgacgcgtttttccattttctccagcgtgtcggtttcgccgcgccagccgttaatctgcgcccagccggtaatgcccggtttcaccttatggcgcagcatgtagccttcaatgagctggcgatactgttcgttatgcgccaccgcatgcggacgcggaccgacaatcgacatccccccggtcagcacattaataaactgcggcaattcatccagcgaggtgcggcgtagaaaattccccactttggtgacgcgcggatcgttctgcgtcgcctgagtaaccactttgtcgttctccatcactttcatggaacggaacttccacactttgatcggtttgccgtccatgccgtagcgagtctggcggaaaataaccggcccaggtgaactgagtttcaccgccagcgcaatgcaacacagcaccggggagatcagcagcaggataagcgtcgccagcacaatgtcttccgcacgtttgagcaggcggttaaccccggaaagcggcgtgtcgtacagcggcaccaccggtacgccgttcatctcttcgatacgtgaatgaagaatattgaaggtaaagacgtcggggagcagcagcaccgaacaggtggtgtccgccagttgatggaccagttttttcactcgcgcgccgtcgcacatctgcatcgcgatatagacgttatgaatcttgcccgctttcgcatcctcgaccagctgttgcagattgcccgcccagtcgttagaaacgccgcccggtttcggatcgtgatagacacccaccacttcaaaccctaaccacggctgattacggaagctctccatcagcatttgtccggcggctaaatcccccgctacggcgaccatacgcttgttatagccatgattacgcagccagcccgccccaatgcgaatacatgaacggcaaaccaccagtccgatgctggtcagcccataccacgccagcaagattttcagttgcgtatcgaaatcattgttgaacgccaccagtccggcgctgaaaatcacgcttaaggtccagttttgtagcagcagggcaaattctgtcgctgcccgaacaccgcgccatgagcgataaaaatcggtgatgccgcccagcatctggaacaccaccagcgtaatcagcgccaccaacaggtgcatgtagaggaatgacaatccgctcacttcgcaaaccagccatagcccggcaaacatgatggtgatatctgaaaagcgttgcaccatagagattaacgatgcattggttttcgctcgctcgcgcttttttagatttgtcatcgttgttcctgttctattgtcgcctcgccccgcaccccggccctctccccaaaggggcgagggggagaagaaagttccgtgctcacttctctccgcaggcagtagagcgtcagggtgagggggaaagtaatgacattactcgttcagcaacgtcagcagagttcgcgttcgcgcttccatcagcggcacatcaccgcgcgattccaca

SEQ ID NO: 1073 - DNA, 203 bp, Escherichia coli
  Strain O55:H7
  modified_base (18)..(18): a, c, g or t
  modified_base (97)..(100): a, c, g or t
  modified_base (104)..(104): a, c, g or t
gttcggtgttggaggagngcaggttaaagcgccagtcggcaaaggtcatgctgatgccatcggtgcgatccaccgccagcgcctcacggctaaagtnnnnttcnacgcggttaatctcctcaacggggtgcgccagtttgctgttgatctcaccgcttgccggaaacgctgccatccgatcgcgtaccagttcgcccagcgtt

SEQ ID NO: 1074 - DNA, 2263 bp, Escherichia coli
  Strain O55:H7
  modified_base (74)..(75): a, c, g or t
  modified_base (244)..(245): a, c, g or t
  modified_base (1985)..(1985): a, c, g or t
ttcaggcacaccagttcggcgaccagcagccacgggatcatgccgctgtcgcagtaagcaaaatcacggaaatnntggtgggcgctcatttcgccaccgtagatggcgtcttccttgcgcatacgttctttaataaaggcgtgtccggttttcgacattaccggcgtgccacctgcggcagtcaccacatcaacggtgttccaggagagacgcggatcgtggatgatcttcgcgccgggatttnnttcgaggaacgcttctgccagcaggccgacaatgtagtagccctcaataaactgccctttttcgtcaaacaggaaacagcggtcaaaatcgccatcaaaggcaatgcccatatccgcgccgtgtttgatgaccgcattgcgggtatcgtcgcggcattccggcagcaatggattaggaataccgttggggaaattgccgtccggcgtgttgtgtactttgatcaattccacgggtgcgccgagggctttaaagcgggcttcaatggcgtccaccaccggacccgctgcgccgttcccggagttgatcaccagcttgagcggcgtgaggtttttgacgttgatataaccgaacaggtgatcaacgtaagcgtcacgcagattgatttgctgatagcgaccgcgtttggtttcatcaacgggaggaaagtcgttggcttctgccagacgctggacatcgcgcagtccggtatcgccgctgatcgggcgagccccctcgcgcaccagcttcatgccgttataatccatcggattatggctggcggtaacttcaatgccgccatccacgccgagatggaacgtggcgaaatagatctcttcggtgccggacataccaatatccagcacatcgacgcccgcatcctgtaaacctttcgccagcgccagttttaagatttcgctggtgaggcggacatcaccgcctaaaacaatggttttcggtttgagaaattcgccataggcgcgaccaatacgccaggcgatatcttcattcagttcttcgcctagttttccgcgaatatcataggctttaaagcaggttaattttttcatatcgttaccctttttcaggcaatagttggccctgaccgaaacggccaattttgtttttgtcgttatttaccgaagaattaatccggttgattatgcaactgctacacccgtccgtagcgatccgcgaagcgcaccacatcatcctcttcgagataagagccggagcgcacttcaattaaatcgagcggaattttccccgggttttccaggcaatgcgtcgcccccagcggaatataaatggactcgttttcaccaagcagtttgatatcaccgtcgatagtgacttttgccgttcctgcgacaaccacccagtgttccgcgcggtgatgatgcatctgtaccgacaagccttcgcccggtttcacggtgatgcgtttcacctggtagcggtcgcccgcgtcgatagagtcatatttgccccacggacgatacacttcgcgatgcacccgatgctcatggcgaccatcggctttgatctgctcgaccacttttttcacatcctgcaccgcgttacggtcggcaatcagcactgcatctttggtctgcactaccaccaaatctttcaccccgacggtggtgaccaggccagattcggcatacacatagctgttttcagttttgtgattaatcacatcgccgtagcaaacattgccctcggcggtgtgggcgctgatctcccataatgaagaccaagaaccgacatcgctccagcccgcatccatcggcaccacaacggcatctgccgttcgttccatgaccgcgtaatccaccgactcttccgggcaggcgagaaacgcttcttcatccacacgaataaaatcgagatccgaatcgacggcgctcatcgctttttcacaggcatcgaggatatccgggcgatattttttcagttcttcgagatagcgtccggcncggaacaggaacatgccgctgttccagtaatattcgccgcttgccacataggcctgcgcggtttccagattcggtttttcgacaaactgcgccacttcaaaggccaccgtatcctgctcacccgcagacacttcaccgcgacgaatatagccatatccggtttcagggagatccggcacaatgccaaaggtcaccagcttgcccgcttcggcatacggcatggcattacgcacggcggcacggaacgcgtcttcatcggcaatcacatgatccgccgc

SEQ ID NO: 1075 - DNA, 134 bp, Escherichia coli
  Strain O55:H7
cagcattaacgggtcgctctccgggctatgacgttttgccgccagcgccgccagcgcaatggccggtgcagtgttacgccctgccggttcgagaataatgttctcggtgagtttgttcagttgacgcagctgtt

SEQ ID NO: 1076 - DNA, 557 bp, Escherichia coli
  Strain O55:H7
  modified_base (413)..(413): a, c, g or t
  modified_base (416)..(416): a, c, g or t
acaataaagcggtgctgctcattgcaaatcaccaccgggctttcgcactccacgccgttcaggcggcagatggtggtttgcagcatggtgagatcgcctttcaggcataaaaactgcttggggtaaagtacgcgggaaagcggccataagcggctcccggagccacctgccatcacaactggatagagtttcgactgcgccataattatccccgaatatcatttataaattgacgtaacacgttctctttatcgagcgtgcgttcggcatattcacgtgccaccgtgttgtgtttgggcagcaggagcgcctgacgaatccccgccaccagcgcctcgaccgattccggttctacgcaaaccgcaatgcccggaaaggtttcgcaaagctgccccagttcggtgtgggcttcngcngtaatcaccgcgttaccgcctaccgccagaatattggtcagtttcgacggcaatacggcatctgccgcgccgcgtttttgcaccaccagatggcaatcgcccatcttcagcagtgcgggtaaagcgtcatacgattgcagc

SEQ ID NO: 1077 - DNA, 1799 bp, Escherichia coli
  Strain O55:H7
  modified_base (120)..(120): a, c, g or t
  modified_base (1484)..(1484): a, c, g or t
  modified_base (1725)..(1728): a, c, g or t
aaattgcatgttgtgcagtccacgctgctgcgccattttttcaagccgcgctttgccgccgccctgcccgacaatggcaaaaatcagcggttcatcacgcaggcgatcggcagcttcaanaacgttttccagcccctgcttttcaccaatattgccggagtaaagaatgatttttttgttatccggcaggccaagctggttacgaagggcatcaacatcgacatctgcgacatgctgaaaacgggcaatttctgaccagttggggaagaagatgacgttttctgccgccacgcctttttcgatggctttattcatcatcgaacgcgaaatcgtggagacgttatcgacgttatgcagtccgctacgttcgaacgccgttgccagctgtgccactttgccgcctttgccttttccggcaaggcccagccccagcatggcgtccacttcgtaatcctgaatatgcagcacggtacgcgcgccagagagtttcgccagcaggcgcattcccggcgtgcaaaacagcgttggcactacgccgataatgcgatccggcttccagcgacgttgcgccatcaacgggaaaaaactgctgacggcaaaactgccgagatgcaacaggcgtttcagggtgctcggctgttttggcacgtacagcgggcagcgccacaccgtagcggccccctcttctcgtttgtaccgccaggcggaatagttctcgcccacctgccactgcgggtagtaaggcggtgcggtaataacccgcacctcatgaccttgcgccgccagccattcaaccatctctccggtgtatttgccgatgccggttaactccggcgagtagttaatgccgtagaccagtattttcataatccgggtactccggcacgcttctcagcgagaaaataggcgcggctgttagcgtgaacatcgttactggcgagcagcgcgtccggcgtcagccagcggtaatcgtcatgctgctcatccggcagtaacagatcttcttcagcgactctgaagcgaaaaccgagcaccacatagtgagtggtgaaatccgtgccggagaagttatcgtcataaaagtgctgccagacaccgtaaaactggcctgctgttatcggtagacgcagccccagttccgccatcgtcagccgctcaaatgcggcttccagcatttcgtctttctgcacgcgccctcccggcacaaaccagtaaccctgcgccgggcggttggttcttttgccaagcagaaactcgccgcgactgttctcgacaataaaatcgagagagacaagcggagtggagcgcactaccgtggcaaagtcttcctgacgtaaaaacatcattacccccgaaagcggtcttgattctcaaggaaccactggtaagtgctggcaagccccgcttccagtgagatttcgtgataccagccaagctgatgcaggcgcgtcacatccagcagtttgcgcggcgtaccatccggnttgctagcatcaaaaaccacccgacctttgtaacccaccactttggcgatggtttgcgccagctcgcggatagtgcagtcaacgcccgtgccgacgttaatgtgtgacagcatcggctgggtgttttccagccagacttcgtgcgccagctccatcacatgaatgctcgccgccgccatatcatcgacgtgcagaaattcacgcatcggtgtaccgctgccccacaccaccacgtccggcnnnntctgtgccgtcgcctcgtggaagcgacgcagcaatgctgggatcacatgcgagttactcggatggaagttg

SEQ ID NO: 1078 - DNA, 5059 bp, Escherichia coli
  Strain O55:H7
  modified_base (315)..(315): a, c, g or t
  modified_base (338)..(341): a, c, g or t
  modified_base (1054)..(1055): a, c, g or t
  modified_base (2830)..(2831): a, c, g or t
  modified_base (4678)..(4678): a, c, g or t
  modified_base (4866)..(4868): a, c, g or t
ccgtacaggttggtcggcatgaccgagcggtaatcgcgtccatactggcggttgtaagattcgcacagtttgatcccggcgattttggcaatggcgtaaggctcgttggtcggctccagcgtaccctgcaataactcgctttctgccatcggctgttttgccagtttcgggtagatacaggacgatccgagaaacagcagtttgttcacgtcgttctgatgcgcggcgtgaatgatgttgctctcaatcatcatgttctggtagatgaaatccgccggatacgtgttgttggcaacaatgccgcccactttcgcngccgccagatagacctggtcaannnnttcgctggcaaagaaatcatgcacagcgcggctgtccagcaggttcagctcgtcgcgggtgcgtaataccagttccacatcaccgcgctgttcgagctgccgcctgatggcggaaccgaccatcccgcgatggccagcaataaaaatgcgttgtttactcatgcttatgactccagcgcgatcgccacgtcgtagccgtgagatttcagcagagagtgttttttcgccgcttcgaggtcattagccaccatttcagacaccatctctctgagggtgatttccggtttccagcccagtttttcgtgcgctttggtcgggtcgccgagcagcgtttcaacttctgccggacggaagtaacgcgggtcaacggcgataatcacatcgcccggtttaacgcccggcgcgtcatgcccggtgacggaaccacaatacccttctcttcaacacccgtgccttcaaagcgcagtttgatgcccagctgtgctgccgccatttctacgaactgacgcacggagtactgaacgccggtagcaataacgaaatcttccggttgttcctgttgcagcatcatccactgcatttttacgtagtctttggcatggccccagtcacgcagggaatccatattgccgaggtacaggcacgactccagcccctgggcgatgttggcgattgcgcgggtgattttgcgggtaacgaaggtttcgccgcgnngcggggattcatggttgaagagaataccgttacaggcatacatgccgtaggattcgcggtagttaacggtgatccagtaggcatacagtttggcgaccgcatacggagagcgtggatagaacggcgtggtttctttctgcggaatttcctgcaccagaccatacagttcagaggtggaagcctgatagaaacgggttttcttttccagaccgaggaagcggatcgcctccagcaggcgcagcgtacccatcgcatcgacgtctgcggtatattccggtgactcaaaagaaaccgcaacgtggctcattgcgcccaggttgtacacttcatccggctgcacttcacgcaaaatgcgcgtcaggttggaggtatcactcaggtcgccataatgcagatggaatttcgggttgcaggtgtgcggatcctgataaatgtgatccacgcgctcggtgttgaatgacgatgcacgacgcttaataccatgcacctcgtaacctttttccagcagaaactctgccaggtaagaaccgtcttgtccggttacaccggtgatgagagcgacttttgacatgtcttattcctctgtattttttttgaatttattcagtttcaacgcgttcgcgtatcagcactgcgggattcccccggcaaaccacatttgccggaagcgatttaaaaacactgcttcgcgcacccacgacggtgccgtcgccaatcgtgacgcctggggcaacaaagacatcggttgccagccagcatttctcgccaatcacaataggcgtggcgttaatggtgaaatgttgacttgcatggtcgtggctaccggtgcataaataacttttttgcgatatcaccgaatgtgcgccaatggttatttcaccgagggtatataaattgacctcatcgccgacccacgcgtaatcacctaaggttaatttccacggataggtaatttttactgacggacgaataactacgttttttcctatttttgcgccgaataaacgtaataaaaaagcccgccagcgatacaatacttgtggcgaccaggcaaataatgttgcctgtactgcccaccacaattgcactttaatagcgttgccgccccggaaccctttcggcaccgagaaaccacttaaatcctgcatcgttttcccttatattcagcttttgttatataaggctttcgtctttgaggtagtacgttggcgtaaatgccaggataattctgcccagaagccaggcacatgtaatatctgccgttggacttttttggcgtcagcacataattccatattattggtggtagataccccacccatggaaaattcagacaccaggccattgagttttttaaaagcataaccggctttatacattttggccgccagcgcgtagtcggaagaaactttatattccaggtcataacgccattttttcaagccggataccgggaaaaatatcgcctgatgactggcgggcaggctgtgataaatataccaacccggtttggcgctacgtttaattttatgcccgtcgccaaaatccagcagcgcatcgccggtgatcatcacgttatctttttgcatttttaacttacggacaaaatttgcggcatcctgatgaaaaatatcgcccgagttgagaaacaacgcgaacttgccttgtgccatcgcaatgcccttgttcatggcgtcgtagataccgttatctggctcgctgacaaagcgtaggttatagatacccttgagattttccaggtactcacgggtacnntcgttggaaccgccatcgacaacaatccattcgaagctgatatcgtccgcctgcgccagatgcgccagcgaggcgtgtgttttgactatccctgcgaggttacgaaacgcgacagtgattatgctaagcaacatgttcttattcttacctcgtaatatttaacgcttttcgcaaaataaacggacagacgattaaaaatgcatattccgggctaaatatcgaaccggtaaaaaacagcgataccggagtaaaaagatataattgcacgcgaaaattgcggttatcaccaaaagcgttgatcatcatttttatcactttccccatgtaccacagcgataaaaacactgcgaaccaggaaaaataaataatcagcagatacaaaccattgtctatggtttttccgacatccgcaccgttaaatattccgaatgatgcgacatattcataaagtgagccaaatctgactacaccgtcaatatgggtcaaagaataaccgaccatcaccagcggaccgacaatacgataatatgatgacgatccttccgtacctaaatcgcccagacgggtggaaatataaggaaatgcaattaccacaccaaccaggaatacagccagagaaatcaatgctaacggtaactttttcttaatcgcctctttattcagatattgaaatgcccactccagcaaataaaacaggataaaggtcataacccctgaaaacgatccggataatattatccctgcgagaatcatagcatcggttttaggcgttttgataccaaactgtttgatgctgagccaaattgagattaatgccagagcaaaaaatgccggttcgaaataaagtgctgtcgtgcgcttgccgccgaatttaatgaaattcagcacatagctgttgctgtaaatcagatatttcgaaatcgactccataatactgctgccgccggtgaggataatttgcgccatctccaccgccgccagcgccaccaccagcccgaccaccagataaaagaaacgtaatatcttgcgatggttgtgtggcgaaatcgttttaaagcgaatactccacaccatgccaataatgatcacaatatagacaaacagcatggttgaagtgacgtatttactggcatccaacgactgaccaaacaggtagttaaacgccgtgagtcccgcgccaatccctaaggcaatcatcaattttttaacgctgatgcgttctaaaaacagcagtaacaagacaggtaaaaaagtgacgatggtgatggggaaactttcgccaagctgggcgattttgacgttaaccaacaggtaaatcagcggcagcagcaggtagctacagattctgatagaagttgacatactcctccagcatctgttgtccactgtaggcggcacggctgcgttggctgaactcagccagcgtggtaccaaatatcgcctgcgcgatttccggtttgcttaactgcaccagttgcagcacgtcttcttcgctgacggttttaccgccggatttttgcagcacttcccgcgccgcgtcgctatgggtggcaatcaccggcacgccaatcgatagcgcctcacacaaaatcagcgggtagttatcgacgcgagaactgaataccagcgcatccatctgattgagcgcgctcatcaacttgcgcttgtcagtttcaaagccgtgattaaccacgttgccagcggtgaacggcgagaacttaccaaaggtatgcagttcaattttgtcgcccagcgccatcatctcacgcaccagttgctggttagtcttgccgtcgtaacgcaggtcatgcgccaccaccgcgattttcggcttgccctgagtttcncgcaccggaggcaagtccgccagaatcgcttcggttgccatatcaatgccattattgataatccggcaacgccctagaccgtacagactattgaaagcatcagccacatgctggctgggggaaataaactgacagcccagcgccagcatctcacggaataactggcgtttgcccgccaccagctggtnnncgcgatcaatcttcaccggcggataattatttaaggtcgggcatttctggcagccctttttccagccttcgcaaccgtcggtaaaggcgcagcgtccggtaacgctccagtgatcgtgtaacgtccagaccaaagtgatatccggtttgtggtttttcactttttcgcaaaagcgcaccacgctcttaaga

SEQ ID NO: 1079 - DNA, 929 bp, Escherichia coli
  Strain O55:H7
  modified_base (39)..(39): a, c, g or t
cagtagctgtgcagcacatgaaaatgcaggaccaccggncccggtgtgcgagtaatggtgcgatataactcattgaaattgccaaacagatcgcgattaaacagacgaaacagggcaatattcgccattgcggtcatccgcggcgtatgtttgatgacctgcggatagttctgatggctgacgctctctttgccgcctttgccgtagccgtagacaaaatgtgacgccagcccctgttgcagcgcacgctggtggagatctaacgccacacctgctgccccgccttccgccagtcgcacattaaattgcagaatattcatttaattaccttcactcgcgctttttctcccaccaccagcgcgttgtccgggacagagtcgagcaccacgctgcccgcgcccacggtgacgttgttaccaagcgtgatatcaccaagaataatgacgttggcaccgagttcgacgctgttgccaatgtgtggacatgccatgttatcggcaccacgattgccgatagttacgccgtggcgaatggtaaaatcatcccccgctaccacgtttttattgataactacggcgtaaccgtgatggatagtaaagcggcggccaatggtcgcggcagcctggatttcataaccgaaaaagcattcggtgataatgcgatacagcaccagcagcggggccgcccacagattgttgaggacgttctttttgcgccacaccgaacaaaaatgagcaacacgataggcaagtaccatgcagcacgggcgtaaactccagctgttggcgcgcagatcttccagcatctttagcgcccccgaataccatcagccagacgtttgccgttacgcaccgacagcagcgtcagcaaagtgcgccaggtcatgcgtttattgcggatctggtagagggtaaacagctgatattttt

SEQ ID NO: 1080 - DNA, 4801 bp, Escherichia coli
  Strain O55:H7
  modified_base (3)..(4): a, c, g or t
  modified_base (1951)..(1951): a, c, g or t
  modified_base (2948)..(2948): a, c, g or t
  modified_base (3619)..(3619): a, c, g or t
  modified_base (3621)..(3621): a, c, g or t
gcnnggtcaaatttgtctttgtgcttgcggtaaaagtggaagtatccggagaattttttcggtgacgaggtgatctgcatttcaccgtgattgatatgcaggatctgcgtcgcctcttccactttccacggttcgccgtactccaccaccatccgcaggaagatgtcgtaatcctgtgccgctttcagttcggtatcgaacaaacactctttgaaacgccatgcccaggtaaagacctgattgccaatgatattgcgtttatagaacaggcggcgtgagtacggcgatttgggatacagtggtaagcttgccggttgggaataaacttctccctggcaaacgtagtcgttagcgtacaaaaaggcgtgagtgaccagttgctgtttatgggcgaggaagacgctcagacggttgggtgtccattcatcatcatcatcgatcccggtaatgtattccccttgcgccagcataatagcctggttacgtaccgcgcacgccccgctgttaatgtcgttgtgaatgtaagtgatacgcggatcgttgagggcggtgacgtactgttgcagttgttcccaggaggtggagcaatcatccacgatgatcatctcccagttgctgtagtcctggcgcaagaccgattttatcgcccgaatcgccagttgttggcggttccaggtcggcatatagattgagatcagcggattgtctttcataggttgttctcccggcttatgagctggtttgcttgccggatgcggcgtgagcgccttatccggcctacggggcggtgcgaatgcaggcgtcgttatttcgcatccgacttatattcgtattcgtaatagccataatcctgatacgcgctggcgcggcggaagatggagttcagaatcacccctttcaccggaataccattttgctcaaagcggctcagactggtttccacttctttcaatgtgttgaccgcataacgcgccaccattaacgtggttccgacatgacgaccaacaattgccgcatcggtcactgccagaatcggcggcgtatcaatcaacaccaggtcatagtttttactcgcccagctcaccagttcggcaaagcgttcgctcattaacagttcagaaggatttggcggcacctgaccgcgcgggatcaggtcaaatttggcaatagaggtcggtttagcagcggtagtaatatcgccctgaccaatcagaatttccgacaggccattaacgttattagtgcccaacagctcatgggtgtagcctttgcgcatatcgcagtcgatcaacaacacgcgtttattggtctggctgatcaccgccgccaggttggcgcagacaaaggttttaccgattgacgggctaaccccggtcatcatcaacacattgttctgcgcctgcatcatcgcgaagtgcaaactggtacgaaggctgcggatggcttcaatcgccagatcggttggattccccaccgccagtagctggctctgtttatagcgtttaatccctttgatggttttgacgctatcgcgcgctttctgccactccgacagcgggatgctggcatagacgctgataccgtgttcttccagcacttgcgggctttcgataccgcgattaaacaacgagcgcagcagcacacccacgatagagagcatcagaccaaggataatcgccccaaggataatcagccctttcttcggttttagcacaccaggctgagtgattgccgggtcaacaatgcgcacatcgccgacggtgctggcttcggtgattttcagctcctgctctttattcagcagttgcatatagacctgctgaccagactcgacatcgcgggtcagacggacaatctcctgctgtgttttcggcatcgccgttacgcgaccgttaagtttggctttttcgtcttccagcgcctgacgtttctccagcagcgtgcggtacgncgggtgaactttggtgtacagcttggagatttccgcctctttaaaggtcagttcgttcaactgggcgtcgatgttcaccatcgaatcgagcaccgctttcgcttccagcggcagatcaacagaatctttatcctgacggaaggcattcagtttgttttcggcaacatcaaggcggctacgtacttccggtaactgttgcgcgaggaaagcgagacttttcgacgcttccgccgatttgcgctcaatattttgttcctgatagttacgggcgatgctgttaagaatgtcgcggatctgttcgcgatcttcaccggtataagtcaggctcagtacgcctgcgtctttgccgttctccgttaccgtcaggctgttttgcagttgattgatcatccccagcgtggagtatttggtgacggtaaactcactgcccgggcgggcgtgaatggcttcaaccatcagcgtgacgccttcttttttcagcatctggcccgcttgcccacgggcgctaaagccgccatcactgctcagggtgtagtttttatcgtccagcacattaagcgtaaacacctgatccgccatctctttcgggcggttaaaggtggtcactttcaccgtttcgttctgacgtcccatcaggcgatcccagcccgcaccgaaaatcgggaacgtgtttttgctcaccgcaatatcgaggtcgagatcgtccaccgttttaccaagcaccaggcgcgaacgaatcaactggatctcggcgtccgatgcaggcggtttgttggctaacgccgatccgatatcctgcactaacgaattgccgctgctttgctcgatttgtaccagtgcgtcggcactataaatcggcgtggcgaagaaggtgtaaaccacggcacagagggcaaatacagcggtgatgccaatcacccaccagcgcgcttcaatgacggtgccgaccaagcgaccaatatcgatttcatcactgcccgttaccggagcggcatgntgtttactttttctgtcattcttatacctgctctgcgttcaatgcctgcgcccactggcgggcagaccgttcaagtaatgtgtacaccgctgcaaacgtttcccggcttttgcgatacggatcggggatttcacattcgttatcccagtgaccaaacagcatcactttgccgcgcatctccggtgccatctcgcataagcgttcgatatggcgcttttccatggtcaaaatcaggtcatagttgcgacacaggcggcggctgatttgtcgtgcacagtggccttccagagacagttgatgttctgcggcgacgctgatagcggtaggatcagcgcccttaccgaccagcgcgccgagtccagcggactccactttcagttccgggtgataacgttgcagtaagcgttccgccgtcggggaacggcaaatattgccgacacagacaactaagatgttgttaaacatgacgattaccagttatgaatgtcgctggctgtatccgtcatgtaacggacaccgctaatagttggcagcaactgattgatcagacggttccagcgggaaaccggggcggtggtgacatacaccacgtcataaggttgcaggcggaattctgtcgccatcaccagcgacgtcgcatcggacatatccagctggtagatattggcaancntgccgttacgcccgccctcgcctttcaacggacgaatgacaaagataccgctggcgttggaggtggtcatgtcgataccttcggcattgcccagagcttcagtcagggtcatgccgctaaagtccattttcagggtgctctgtttcttcacttcacccatcacaaacactttcagatcatcattacgcggcacgtagagaatatcgccggggtaaagcaggcgattctggttgaggtcgccgttttgcatcaacgcctgcaaagaaatgcgctcttcacgaccattgtgtgttagcaccacgttgcgccagtcagcggtgtcggtcaggccacctgcggcgttgatggcatcgagaatggtcagtggtacgttggtaatcgcctgttgaccggatttattcacctggccggagatataggctttttgcgagcggaaggcggcgatattaacgtccacctgcgggtcagcgatgtacgtcgctaagcgcccggtaatatcactgcggatttcagcgagcgttttccccacgacgtgaaccttgccgatatacgggtagaacatggtgccgtcaggctgtacccagttgccggtgtcgctggagctgcggtactgaccggctggcgtggtgagttccgggtgatcccagacggtgacattcagaacgtcgcccggcccgacgcgatactggtaattcgcgatctcgctttccagcgtcatattggggcgcgctacattcgggcgtgggcgtaattggtcaatcaggcgcggggtcagcggataaacattcaccattttgtcgagatcgaaatcagcgtcctgctgtttgatgacgtctttgcccatcgtcgacatattgctgcccggaagtactgtgcaaccgcttatcaaggttactgacaccaataatggcatcaatttcattttggatttcatcattgtttatttatcactttggcagagtaattatcctgtgcactattaatagcaatgtcgccatgcacatttaccttgcagttaattgaataaaaatttaactggcatcagtcctaaaaaaattgatttcatccgcaggctattgacagaataattcagactggtctttcaggcatccagacacgctaccgcccctggctttttagctaccaatacactgatttagcttaatttttaaaaccctct

SEQ ID NO: 1081 - DNA, 2726 bp, Escherichia coli
  Strain O55:H7
  modified_base (295)..(295): a, c, g or t
  modified_base (1491)..(1491): a, c, g or t
  modified_base (1815)..(1815): a, c, g or t
tacagtcgttgatgagaaagggttattgcggaaattaacttccgaatataaggtgacattatggtaattgaatattggctctccaataatgcaggaggaagtgttacagctaacggaatagcaggcaaggtaacaattcggcaattggctatttttaagaattatattaagtgtcattcaatatggtttttaggagtttctttaggttgacaatatttaatattgcgtctccacatgcgatatttcttaaacaatgttttattattaccacttttaattcagggataatgtgagngttattaccctcaaataatatgagataaatagtgctgcaacattgcatttttgccccgatttatccatgatcgaattgtgacatttgtcatacaacgaataggttttgtacttactatggaatggattgccgatccgtctatctgggccgggttaatcacgctgattgtgatcgaactggtcctcggcattgataacctggtctttattgccatcctcgccgaaaaactaccgccgaagcagcgcgaccgcgcacgggttaccgggctgttgctggcgatgttaatgcgcctgttactgctggcgtcaatctcctggctggtcaccctgactcaaccgctgttcagcttccgctcgtttacctttagcgcccgcgacttaatcatgctgtttggtggtttcttcctgttgttcaaagccacgatggagctgaacgaacggctggaagggaaagacagcaataatcccacacaacgcaaaggtgcgaagttctggggggtggtgacacaaattgtggtactggacgccatcttctcactcgactcagtgattaccgccgtcgggatggtcgaccatttactggtcatgatggccgccgtggttatcgctatcagcctgatgttgatggccagcaagccgttaacgcaatttgttaacagtcacccgaccatcgttattctctgcttaagcttcctgttgatgattggctttagcctggtggcagaaggtttcggcttcgtcattccgaaaggctacctgtacgctgccattggtttctcggtgatgatcgaggcactcaatcagttggctatctttaaccggcgacgttttctttccgctaaccagacgctacgccagcggactaccgaagcggtaatgcgcctgcttagcgggcaaaaagaagatgcggaactggacgccgaaaccgcgtccatgctggtggatcatggtaaccagcagatctttaatccgcaggaacggcggatgattgagcgggtacttaatcttaaccagcgtaccgtcagcagcattatgacgtcgcgccacgatattgagcatatcgatctcaacgcgccggaagatgaaatccgccagttgctggagcgaaatcagcatacgcggctggtggttaccgacggtgatgacgcagaagatttgctcggtgttgttcacgttatcgacctgctacaacagtcnctgcgcggcgaaccgctcaacctgcgggtgttgattcgccagccgctggtgttcccggaaaccttgccgttgttacctgccctggagcagttccgtaatgcccgcacgcactttgcttttgtggtggatgagtttggctcggtggaagggattgtgacattaagtgacgtcactgaaaccattgccggtaacttaccgaacgaagtggaagagatcgacgcccgccatgatattcagaagaatgcggacggttcctggacggcgaatggtcatatgccgctggaagatctggtgcaatatgtgccgctgccgctggatgaaaancgtgaatatcacaccattgccgggctgttgatggagtatttgcagcgtattccaaaacctggcgaagaagttcaggtgggggattatttgcttaaaacgttgcaggtggaaagccatcgcgtgcagaaggtgcagattataccgctgcgtaaggatggcgagatggagtacgaggtgtgataaaacatcaaatgcgcaggttcaaactgcgcatttgatttatacaaaatttagtataatctaaggatggagtaatgagaaaaaagctggcttttcttgataccagtcttgacgatttacgcgcatttccagaatcgtctcgacaggaaattggctatcaactcgacaggatccaacaagggttaaacccatacgactggaaacctttttcaactatcggccctggtgtgcgagagattcgtactcgcgatgctgatgggatctatcgcgtcatgtatgtcgcaaaatttgaagaagcggtttacgtattgcattgttttcaaaagaaaacacagactaccagtcaatcggatattgatttagccaaacgacgctataaagaacttgttcaggagcggaaaaatgaaaattgaaacctttgatagtgtgtgggatgcggtgagtgacacccctgaacaagcggaaaatatgcggatccgtgccgagcttgtaacgatcattaataactggattgaacaacaagggtttagccaggctcaggcagcttctgctttaggggtcactcaacctcgcatatctgaacttgccagaggtaagatccagatctttagtatcgataaattgatcaccatgatggctcatgcaggattgcatattcaacgtattgaaattcaatatccacatgctgcttagtgctataaatacagatggcgacaaattgacgccgccat

SEQ ID NO: 1082 - DNA, 229 bp, Escherichia coli
  Strain O55:H7
aacttgtcttacatcttctccagcaacttcttcacatctttgccattgcgggaatctttattccgctcggcccagtcattcaggcgacgtttcgcttcgtcctgtagatgtttgcgcagtaactgatccacttgcagactgtaattgagttgctgccagttgccataaacccgcagcggtactggcgtttctttgaggaattcaatcagtttgctttcaccgttccagc

SEQ ID NO: 1083 - DNA, 48 bp, Escherichia coli
  Strain O55:H7
cacgaatatcaaactgggtgtcgcaggtttgctccgccagattcaacg

SEQ ID NO: 1084 - DNA, 6 bp, Escherichia coli
  Strain O55:H7
cgccag

SEQ ID NO: 1085 - DNA, 1918 bp, Escherichia coli
  Strain O55:H7
  modified_base (655)..(655): a, c, g or t
gcgattgaccttgcatgtcgtttaacgtcacgacgccatccttcaacgtcaaatcggtggtaaagcggtcaagacgcgttacgttatcgaagttttcagcggccttcacatcaccaccattacgttctaccgcttgctgaatcatctgctggaagttcatcccttccatgcgcgtgtcggtcatttcgacatgtgcctgtccttgccagttgtggcggaatgcgtcggcatctatgtcagcaccggagaaatcaccagccagtgacatttttccggtcaacgaaatcggatagttaaacgccttcagaatggtaccaatctcaacgttttccagccgtggctggaagtttatccgcggatttattgatgtcgcgtccagcgtgcccggcagtgaaacctgtccaccgttaagcttgccctgcagttgagtaatttccagcaaacccgacttgttggtcatttgcgtggcaacatctgtaaaattcattccgcgccagcgcacgttactggcctgcaacaaaatatcagccgtaaagccttgcagtccctgataggccggttcatcaatacgtgaagaaatgaccgggcgcggcaacgttgattggctctgcccctgctgagcggcaccgttttcaccattcgctgtttcattaancgggatgaggttgtcaagattcagttgcgggaattgcagtctcagctgccattccggtttctctgtcagcgtgacctgtgcttgcccgctcagcgtactatcattggcggtcaaactaatttggttaaatgaaaggcgtttatgtgactcctgccactgggcctggaaactcccctgcccctgaataccttgttttggtaaatctgcaccctgcaactgccagttaatttgttcaatagccgccgttaaatcatgcggataatcagaagcatctaccgtaccgttaagggatatcgtgagatcgcgctgatcgcgattaacccgcccggaaaactcaaatgagccacgatgttggggatcttgttccatttgcaggcggatattgcggattgtcacctgctcgtcatcttcatgctggaacaccagcacgctgtccgccaccttaagactggatatatcaaacgaccatccgcgatcgtctgacagatccggcaaggtattgtcgcgcggtgcaaccggagcgtcttcactgcgcaccgcttccgtctgcggcgtcagttggatcactgccccttttagcatcacctgcttaacgctcagttgatgactcagtagtggtaaaagcgccacgtccaggcgcatgttgtcggcgcgaaccagtggctggctcgcgccctgggcggtgagagacattcgcccggagaggatactaagctgcggccagacgtgccaacgcagtggcccgtcgagctgcaattgataaccgctacgtgcagcaacttgcttgaccatatagtcgcggaaatcattcggattcaccagcaacactaacgcagataacccggccaccagcacgaccaggagtatcatcagcgtcgtcagaaatcgtctcatggtatcctcaatgggcctgaattagtctttatcgattcggctggctaccgcgccctgctggttgcgatatttcgcatcttcacggcggttgtaaggtcgcgccgccgggccggaaagcggctcaaagctcagcgcaccaattaacatgcccggacgcagcgccagcggcagcttaccggagttgtagaactccagcacaatgcaaccagaccagcccggatcgatacggtgcgcggtgacgtgcaccatcagccccagacgcgccagtgaggaacgcccgtccagccagcccaccagatcggctggcagcgtcaccgactccagcgttaccgccagcgccagctctcctgggtgaagatagaacgcctc

SEQ ID NO: 1086 - DNA, 1733 bp, Escherichia coli
  Strain O55:H7
  modified_base (56)..(56): a, c, g or t
  modified_base (383)..(383): a, c, g or t
gtcgagaacgatctcatcgctcatcacgcggtcaagcgcggcgctcacttcatctntgggaccgctcagatcgataaacgctgccgtgtgaccacggaaggtacgaaatttattgcccaggcgcacatccaccgtcgcgccgttaatacgctccactggcggacgtgggttgatcgacaaacggccttcatcaagccaggcttcaatatctcggtcacacagacgcatggcattttctcctttcgcgcatcactcccttaacgccaattacgtcaagggcataccaggttatcactgaacggtacacaatttatcaaacttattcaaagaactgacttattttcgctttcaatatatcgatcgcgatgcggtttttcccgccncgcggcacgataatgtccgcatattgtttagaaggctcaatgaattgcaggaacatcgggcgcacggttttttgatattgcgccatcacggaatccattgaacgcccacgctcgttaacgtcacgcttgatgcggcgcatcaggcagatatccagcggggtatcaacgaaaatggagaagttaagttcgtcacgcaaacgtgcatccgtcagcaacaaaatgccttcgagaatgatgaccttcttcggctcaaccgtcaccgtttctttcatacgcgtatgttcaacatagctgtaaaccggcaggtcaattgccgagccgcgtttcaacgcttgtaaatgctcaagcagcaggctgtgatccatcgcgctgggatggtcgtagttggtcttaacgcgttcttccatcgacagatggctttgatctttgtaatagcagtcttcgggaattacgccgatgtgttcatcaccgacttgctcacgtaattcacgataaagggtactggcaataagactcttgccggaagccgatgcgccagcgataccgataatgacgcactgatgagactgatcagtcatatatttagcgacctgattaacctggatgttaggaagggggcgacgaagcgccaaacgcggcaattatagggatttcatccgcctgataccagtcgaatagcgttgccgcgcgctcagagttaattgttgacgaagaattcccggtggcaaattacgttgatcagttttatgtaaggtaaaaaatgttatacgcggttgcgcaaattatccgcctttacgtcactttatgagcaattcgcatataaaatgtaaaacttttgtactagcataaacacagaaacgaatactggcgacctggccttgcggataaagcggtaatgagcaaacaatcacagcatgtattaattgccctgccccacccgctgcttcacctggtcagtttaggtttagtctcgtttatctttacccttttctcgcttgagctttcgcagtttggcacccaactcgccccactgtggttcccgacgtccatcatgatggtggcgttttatcgccatgccgggcgcatgtggccgggaattgcgctgagctgttcgctgggaaatatcgccgcatccatcctgcttttttccaccagctcgctgaacatgacctggacgaccatcaatattgttgaagccgtggtcggggcagtgctgctacgtaaattgctgccgtggtataaccccttgcaaaatctggctgactggctgcgtctggcactcggcagcgccattgttccacctctgttggggggtgttctggttgtcctgctgacgcccggagacgatcc

SEQ ID NO: 1087 - DNA, 1009 bp, Escherichia coli
  Strain O55:H7
agggcatttttgatatgggtactgtcagaatccatcggcgctctggcactggtgccgctgggattgttatttaaaccacactatctgctgcgccatcgcaacccacggttgctttttgagtcgctgctcacgttagccatcacactgacgttaagctggctttcgatgctgtatctgccatggccttttactttcattattgtgctgttgatgtggagcgccgtgcgcctgccacgaatggaagcctttttgatcttccttactacggtgatgatggtgtcgctgatgatggccgcggatccctccctgcttgctacgccgcgtacgtacctgatgagccatatgccgtggctaccgtttttgctgatcctgctgcccgccaacatcatgacgatggtgatgtatgcctttcgtgcggaacgcaaacacatttccgaaagcgaaacccgctttcggaacgcgatggaatattccgctatcggcatggcgttagtgggcaccgagggacaatggctgcaatccaacaaagcactctgccagtttctcggttacagtcaggaagagctgcgcggactcaccttccagcaactgacctggccggaggatctcaataaagatctccaacaggttgaaaagctgataagcggtgaaataaacacctattcaatggaaaaacgttactacaaccgcaatggcgatgttgtctgggcgttgcttgccgtctcactggtgcgccacacggatggcacgccgctctattttatcgctcagattgaagacattaacgagctaaaacgcaccgaacaggtcaatcagcaactgatggagcgcatcactctggctaacgaagcgggcgggattggcatctgggagtgggaactgaagccgaatatttttagctgggataagcggatgttcgagctgtatgaaattcctccacatatcaaaccgaactggcaggtgtggtacgagtgcgtgctgccggaagatcgccagcatgccgaaaaag

SEQ ID NO: 1088 - DNA, 133 bp, Escherichia coli
  Strain O55:H7
  modified_base (20)..(20): a, c, g or t
  modified_base (123)..(123): a, c, g or t
caatcgcgctcgccctttangctggaatttcgcattgccgtgaaagatggcatccgccatatccgcgccctcgccaaccgggtactgaataaagaaggcgaagtcgaacgtctcctcggcatnaatatggata

SEQ ID NO: 1089 - DNA, 539 bp, Escherichia coli
  Strain O55:H7
aacagcttaacgaggcattgtttcaggaaaaagagcgcctgcacattacgctggactccatcggcgaagccgtggtctgtattgatatggcgatgaaaattacctttatgaatccagtggcggagaagatgagcggctggacgcaggaagaagcgttaggtgttccgctcctgacggtgttgcatattacttttggcgacaacggaccattaatggagaacatttacagtgccgacacctcacgttccgcgatcgaacaagatgtggtgttgcactgtcggagcggcggcagttacgacgtgcattacagtattacgccgttaagtactctggacggcagcaatattggttcggttctggtgattcaggacgttaccgaatcacgcaaaatgctgcgccagctgagctacagcgcctcccatgatgcactgacgcatctcgccaatcgcgccagttttgagaagcaactgcgtatcctgctgcaaacggtaaacagtacgcatcagcgacatgcactggtgtttatcgatcttgatcgc

SEQ ID NO: 1090 - DNA, 1993 bp, Escherichia coli
  Strain O55:H7
  modified_base (1426)..(1427): a, c, g or t
agcggtgaatgacagcgccgggcatgcggcgggcgacgctttgctgcgcgaactggcgtcgttgatgctgagtatgctgcgctccagtgacgtgctggcgcggctcggcggtgatgaatttggtctgctgctgccagactgcaatgttgaaagcgctcgttttatcgctacacgtattatcagtgctgtgaatgactatcactttatatgggaaggccgggtacatcgggtaggtgccagcgccgggattaccttgatcgatgacaacaatcatcaggcggcagaagtgatgtcgcaggctgatatcgcctgttatgcctccaaaaatggtggccggggccgggtgacggtttacgaaccgcagcaagctgccgcacatagcgaacgggcggcgatgtcgcttgatgaacagtggcggatgattaaagagaatcagttgatgatgctcgcccacggtgtcgcttcgccacggatcccggaagcgcgtaatttgtggctgatttcacttaagctctggagttgcgaaggcgagattattgatgaacaaacatttcgtcgtagcttcagcgatccggcgcttagccatgctcttgaccgccgggtattccacgaatttttccagcaggccgcaaaagcggttgccagtaaaggcataagcatcgccctccccctttccgttgccggtttgagtagcgccacgctggtgaatgatctgcttgagcagctggaaaatagccctctaccaccacggttattacatctgattattccggctgaagcgattttagatcacgcagaaagcgtgcaaaaactgcggctggcgggatgtcggatagtgctcagccaggtgggccgcgatctgcaaatcttcaactcgctgaaagcgaatatggcagattacctgctacttgatggtgagttatgcgccaacgtgcagggtaatttgatggatgagatgctgattacgattattcaggggcacgctcagcgactcgggatgaaaaccatcgccgggccagtcgttttacccttagtgatggatacgctttctggcatcggcgtcaatctgatttatggtgatgtgattgccgatgcccaaccgctggatttgctggtgaatagtagttatttcgcgattaactgagggagcgtttgcccattgcctgatgcgacgctaacgcgtcttatcaggcctacaaatcgctcattccgcaaggcgctcgcaccgcttccggcgaccaacgtcatgcttcgtctggctgccagccttccgtataccagatatgcaacagcgcataagaacgccagggcttccagcgctcggcataacggcggatttgcgccggtgtcattcccggaaatcgctgtttaatcagataatcatccggcaggaaaacatctttcgcctgccagccacgtaaagcgnnataattcgccgtccagcgcccgatacccggaaaagtttgcagcgttttcatcgcttgttctacgtcgcccggtattgtcattggtaaggtgccctccagcgccgcatttgccagatgaatcagcgcctctgcccgtttcaacggcatgcctaacgcttttaatgcctgcgggtcggctgctgccagccgctgaggcgtggggaagcagatatactccggaaaatcatccagccgttcgccataaagttgtaccactttggcagtcaattttgccgccatcgccacgctcaccagttggcctaaaatcgcccgcacgccctgctcaaaagcatcaacacagccgggtaaacgcaatccgggccgcgccgcgcctaacctgcccaacgcaccgttaacaatctgcgggttacattgcagatcaaacaggcggctcattttcgccagacactctgcggcaacaggttctaaacctgcacttaaatttatgtgcagagtatggcgggctatatccggaatagcagtcaccacgccgcgatattcgcccaccgccagactacgggcataat

SEQ ID NO: 1091 - DNA, 778 bp, Escherichia coli
  Strain O55:H7
ccgcgaccgtttccacaccgctcactgcacgggcggcgagaaatcccaacatccacgaccagtcatacggcggctgccagttcagggtatacatcgcatctccttattcatccgctttcagcataaacgttattcagacgctgcgctttgctttcatattccggttgtcgcgacggcaacatttcgctaaagtcacgccccttcttcaccggcatggggattatttcgtgtttattggttttgattacggtacagcaaactgttcaatggcggtcatgcgtgacggtaaaccgcacttgctaaaaatggaaaacgacagcacgctgctgccttcaatgctttgcgcgccaacgcgtgaagcggtaagcgaatggctgtaccgccatcatgatgttccggcagacgacgatgaaacgcaggcgctgttgcgtcgggcgattcgttataaccgcgaagaagatatcgatgttacggcgaaaagcgtgcagttcggtctttcctcactggcacagtacattgatgatccggaagaagtgtggtttgtgaaatcaccaaaatcgttcctcggtgccagcggcttaaaaccgcagcaggtagcgctgtttgaggatctggtctgcgcaatgatgttgcacattcgccagcaggcgcaggcacagctgccagaaacgattactcaggcggtgatcggtcgcccgatcaacttccaggggcttggcggcgatgaagcaaacacccaggcgcaggggattctggaacgcgcggcgaagcgtgccgg

SEQ ID NO: 1092 - DNA, 1850 bp, Escherichia coli
  Strain O55:H7
  modified_base (52)..(52): a, c, g or t
  modified_base (55)..(55): a, c, g or t
  modified_base (58)..(58): a, c, g or t
  modified_base (977)..(978): a, c, g or t
ggatgtggtattccagtacgagccggtagcggcagggctggattacgaagcnacnttncaggaagaaaaacgggtgctggtggtggatatcggcggtggtacgactgactgttcattgctgctgatggggccgcagtggcgttcgcgtctcgatcgtgaagccagcctgctaggtcacagtggttgccgtattggcggtaacgatctggatatcgcgctggcgtttaaaaacctgatgccgttactgggcaggggtggcgaaaccgaaaaaggcatcgccctgccgattctgccgtggtggaatgcggttgccatcaacgacgtacctgcgcagagtgatttctacagtagtgccaacggtcgtctgcttaacgatctggtacgcgatgcccgcgaaccggaaaaagtggccctgttacagaaagtctggcgtcagcgtttaagctatcgcctggtgcgaagcgcagaagagtgcaaaattgctctttcaagcgtagcggaaacccgcgcctcactgccgtttatcagcgatgaactggctacgctgattagccagcaagggctggaaagcgccctcagccagccactggcgcggattctggaacaggtgcaactggccctcgataacgcccaggaaaaaccggacgttatctacctgaccggcggtagcgcccgttctccgctgattaaaaaagcgctggcagaacagttgccgggcattccgattgcaggcggcgatgactttggctccgtcaccgccgggctggcacgctgggcggaagtggtgtttcgttaattgaaaaatggctcagcagcggcttaaatctgcctgcgcctgagccagtttttctgccgcctgacgtaacggttccatcaacggcatggtccgtgctggagcatgaaggcggaatcgctgcaactctgtcgcgccgacagtcaacgtcgattccagccgatgtcgtttggcggccattttnntcattaccgcttgtctgtctgcaggcgttaccgcttcgttcggcctgaacacaaaacggcgttcacagctcgctttccagtcgataaccgcctgggtcagatggtcgccaaaccctttcacttgcttaacgccacgacgggtaacatctgctgctgtttcaataccaaaagaccgtaacgccgctttacgcgcaggaccaacgccgggaatagaggcagcatcaataaaaaatccctccagaaacttctgcttctgccgttcccttgcagtgtcgtgaagtgctgccagagcacgtttttcttcttccggtaacccgagaatttcgtccttcattttttcgagcatcgtccgtttggcgataaaaccttccagcccgcccaactgttggatctggctgactaaatggtcatagtccattttcgcgcgattaaatgcctcacggcgttgctggatttctgctttataagctttgcttgtcagactgccaataatccagatagccgccagcacaggaaccaaaataatataacgcggttctgcctgaaggccgcaaagcagcagcgataccgctgacagtgcgatctcaagcagaatgatgtattcgcgccgtaacaggcctaaaggaagcggcctgccagtcggttggaaatgatcgggtaatggcaattgcactgctggcggtgctactgacgccatcaccatcgcccagactttcgccagcacaaaatcaccgccggtggtaatgacctcttcgccgagatcaataaaatagataacgccttgattatccagcgtacaccacgggcagtcggtcaaatgagcgggataaacatgcattgccgaaacggtacatttctttaactgttggcgt

SEQ ID NO: 1093 - DNA, 705 bp, Escherichia coli
  Strain O55:H7
  modified_base (37)..(37): a, c, g or t
  modified_base (45)..(45): a, c, g or t
  modified_base (656)..(656): a, c, g or t
tccagtgctgctacccacgctttagccgtcggacgcncggttgcnacgccactttccgtaaacgcctgctgaaacatggcttcaacatcgcccggtaacatcgacagcggaatcgatcgtggcggcggttttaaaccacgtcgctggttgtctgacgcgtaggcataacggaaatgggcaatatccgtctccagcgcattacccgcatcagagataagcggcacaccagaataaggatgccgcccaccaaacaagacgtgaaaaatcagcaacgcaaggccaaaattatcgtgattcgcggtacgttcaaaaccgacaaatgacggcaaggtttgtagctctggcggcgtaaaatgcgacacgccgacttcgcataaatgcagtgtgccattggcgttaatctgaaaggagtcactatcgatcaacaccactttgctgtcgcgacctaccataaagctgttctggtttacgtcacccacgacgtgcccgtgctcgtgaaccgtagcaaaagatgaagcaatattacgcgcaacatagagtagaaaatcccacgcacaatgagggtaactctggcgacgatgtgccgggttatagatcatatgaatcggttctttaccagaaacttttggcatcataaaaccgataacttttccgcntcgtccaccgtgaagcgttgcctgcggccaggcgacataattcagcaac

SEQ ID NO: 1094 - DNA, 89 bp, Escherichia coli
  Strain O55:H7
gtcagctgtcgcagccataaaggcaagtttgtcctgttttaaggcgggtggcggcgtgtgataaatcttggcgacgctatcggcaaact

SEQ ID NO: 1095 - DNA, 3620 bp, Escherichia coli
  Strain O55:H7
  modified_base (15)..(15): a, c, g or t
  modified_base (2083)..(2086): a, c, g or t
  modified_base (2147)..(2150): a, c, g or t
  modified_base (2173)..(2174): a, c, g or t
  modified_base (2239)..(2239): a, c, g or t
  modified_base (2713)..(2713): a, c, g or t
  modified_base (2758)..(2758): a, c, g or t
  modified_base (3369)..(3372): a, c, g or t
  modified_base (3454)..(3454): a, c, g or t
  modified_base (3616)..(3617): a, c, g or t
atatcataaaccgcnccttcaccgcctttgcccagttcacggcctggcgtaacgcactcaccagtagcagtatataaagtgggtttcatggtaaccacagcgccagtgccaacgttttatcatcatcggtacgctcgtttaccgccgggctggacaaaaactgctttaacaattcaggtaataaatcgagctgttcctgcgttgctgccgccagcccattgaaaaaaggggtaaagaaaggcacatgcggagaattatccaacatatttaacgccagtcgctggataccatccgtaaatgctgcaactttatgcacacgctcagtgctggtgaaagtttccagtctggaaacggcatcttcatcggtaatgaaatgcgtcatattggcatattcacccaccatcggcgtaagcggtaattgcagaccgtgaccaaaatccaccaccacgccgccatcgccaatctgcataatcaaggtgccgttagccgatgaaatcaatcccagaaacgtgcaggcaaaatcgcgaactgctaattctttggcttccgcctcggcaaaaagtcgctgacgaacggtcagcacaatatccgtggcgaggatatcattgagtccaaattcaccgtgctgcactttttgcgacacataagccatcgcttcattgatggcaagcatcgcgccttcgccaccctgcgagacactgcctgcgccatcagtgacaaataccgacaataatggctgctggtcatttagccaggcaacctgcatctggcaggcatcctgacaaggtaaatcagcgctaatgtgcgacgttccaacagcggatgcataaaccagacgccagctcacactgacgtccagccttttggcgcttccagtacaacttccgttcccggcgtggagcgggaaaccgaacgcagtgaactggataaccagctaaacagttcgcggaattgtaatccctgcagagacaaaggctgacggacactgatttgggccagcgtcttcatatccgccccctgaacaccgatggaaaagaaggcaaacttcttatcttcttccccctgaaacactttgttggcggcagcctgccactcatcggttggtgcaccatcggtgatcaggaaaatccacgggcgataatacgaaataccatttgcacgatactcacgtttccgctcctctaccatatccagggctttggtaatggcggcacccattggtgtatcgccctgggcaaacaggatgggcgggaaaaaattagcggcgctggtaaagggttgttccacatgcaccgggccgaacgtcacaataccaagttccactctttttaaggccagcgggtcggcaagcagctcatcgcgaaaggtaaccaatccggcgttaagttcattaatgggtctaccgttcatcgaaccagaaacatccagcagcaaaatgcaggggcaacgtggttccgggttactggcaaaatcgctggtggcaaacgtgatttgttcgctcataagaaatccttttcttagagaattattgaggtccggtatcataccgattgcaataatgaaataagagcaaacgaagaaactttcagaattaggcccggcggcgcagaaaattttgctattcgcctcgcaagaacggagagccgtcgattgacactaaggacagagtgacataatttcaggagtgagggttagggagaggtttccccctccccctggtgttcttagtaagcctggaagctaatcactaagagtatcaccagtatgatgacgtgcttcatcatgaccctttccttatttaaggccccttcctcgggaggggctttcccgtttcagcgtcccgctgaaatcgtcggcttacctcctttcgccctgaattcagtctatcgctaacgcgtgaacaaaatagtttcctctgtgattattgcgtaacgtctcgcaaagaatatttgctggcaggatcgcagactgcaaagcctgcggattgacattctgaacgtgaaggcatactttcaggagtgagggtagagcggggtttcccccgccctggtagtcttagtatgctgggtagctaatcactaannnncaccacgatgatgagtatcttcatcatgaccctttccttatttatggccccttcctcgggnnnnggctttcccgtttcagcgtcccnntgaaatcgtcggcttacctcctttcgccatgcaagcagtctatcgctaacgcgtagataaaatantttcctgtgttattactggatgcgtgctcgcaaatgtgcccgccattcagacgattcccgatagtgtttcataattcctccatttttctcccttattggctggctacactagtatcattccgcgaaacgtttcaggaagagaaactcttaacgatgaaaggcagttataaatcccgttgggtaatcgtaatcgtggtggttatcgccgccatcgccgcattctggttctggcaaggccgcaatgactcccagagtgcagccccaggggcgacgaaacaagcgcagcaatcgccagcgggtggtcgccgtggtatgcgttccggcccattagccccgattcaggcggcgaccgccgtagaacaggcagttccgcgttacctcaccgggcttggcaccattaccgctgctaatactgttacggtgcgcagccgcgtggacggtcaactgatggcgttacatttccaggaaggccancaggtcaaagcaggcgatttactggcagaaattgaccccagccanttcaaagttgcattagcacaagcccagggccaactggcaaaagataaagccacgcttaccaacgcccgccgtgatctggcgcgttatcagcaactggcaaaaaccaatctcgtctcccgccaggagctggatgcccaacaggcgctggtcagtgaaaccgaaggcaccattaaggctgatgaagcaagcgtcgccagcgcgcagctgcaactcgactggagccgtattaccgcaccagtcgatggtcgcgttggtctcaagcaggttgatgttggtaaccaaatctccagtggtgataccaccgggatcgtggtgatcacccagacgcatcctatcgatttgctctttaccctgccggaaagcgatatcgctaccgtcgtgcaggcgcaaaaagccggaaaaccgctggtggtagaagcctgggatcgcaccaactcgaagaaattaagtgaaggcacgctgttaagtctcgataaccaaatcgatgccactaccggtacgattaaagtgaaagcacgctttaataatcaggatgatgcgctgtttcccaatcagtttcttaacgcgcgcatgttagtcgacaccgaacaaaacgccgtagtgatccccannnncgccctgcaaatgggcaatgaaggccattttgtctgggtgctgaatagcgaaaacaaggtcagcaaacatctggtgacgccnggcattcaggacagtcagaaagtggtgatccgcgcaggtatttctgcgggcgatcgcgtggtgacagacggcattgatcgcctgaccgaaggggcgaaagtggaagtggtggaagcccagagcgccaccactccggaagagaaagccaccagccgcgaatanncga

SEQ ID NO: 1096 - DNA, 3678 bp, Escherichia coli
  Strain O55:H7
  modified_base (2403)..(2403): a, c, g or t
  modified_base (2408)..(2408): a, c, g or t
  modified_base (3276)..(3279): a, c, g or t
  modified_base (3427)..(3427): a, c, g or t
  modified_base (3441)..(3441): a, c, g or t
  modified_base (3461)..(3461): a, c, g or t
gctcgctcctgatgcaggtgttacccccgagcagcacaagcggcccgtcgcgcctgtttattatgcgtcctgtggccaccacgctgctgatggtggcgatcttactcgccgggattatcggttatcgcgccctgcccgtttcggcgctgccggaagtggactatccaaccattcaggtggtcacgctctacccaggtgcgagcccggatgtcatgacctctgccgttaccgcgccgctcgaacgccagttcgggcagatgtctggtctgaaacagatgtcgtcgcaaagttccggcggtgcgtcagttatcactttgcagttccagctaacattaccgctcgatgtcgccgagcaggaagtacaggccgcgattaacgctgcgaccaacttgttgccgagcgatctgcctaacccgccggtttacagcaaagtgaacccggcagatccgccgatcatgacgctcaccgtcacctcaaccgccatgccgatgacgcaagtggaagatatggtggaaacccgcgtcgcgcagaaaatctcgcagatttccggcgtcggcctggtgacgctttccggcggccagcgtccggctgttcgcgtcaaacttaacgctcaggcgattgccgccctcggcctgaccagcgaaaccgtgcgcaccgccattaccggcgctaacgttaactcggcaaaaggtagcctcgacggcccttcccgcgcggttacgctttccgcgaatgaccaaatgcaatctgcggaagaatatcgccagttgattatcgcctaccagaacggcgcgccgattcgtctgggcgatgtcgcaaccgtagagcaaggtgcagaaaacagctggctcggcgcatgggcgaacaaagaacaggccattgtgatgaatgttcagcgccagcccggtgctaacattatctccaccgccgacagcatccggcagatgctgccacagctcaccgagagtttgccgaaatcggtgaaggtgacggtactttctgaccgtaccaccaatatccgcgcatccgtcgacgatactcagtttgaattgatgatggctatcgcgctggtagtaatgattatctacctgtttttgcgcaatattccggcgaccatcattcccggcgtcgcagtgccgctgtcgttaatcggcaccttcgcggtcatggtgtttctcgatttttcaatcaataacctgacgctgatggcgttaactatcgccaccgggttcgtggtcgatgacgccatcgtggtgatcgaaaatatttcccgctatatcgaaaaaggcgaaaaaccgttggcggcggcgctcaaaggcgcaggtgaaatcggctttaccattatctcgctgaccttctcgctgattgcggtgttgatcccactgctgtttatgggcgatatcgtcgggcgactgttccgcgaatttgctattaccctggcggtagcgattttaatctcagccgtggtgtcgctaaccctgacaccgatgatgtgcgcacggatgctcagccaggagtcgttacgtaaacagaaccgcttctcccgtgcctcggaaaaaatgttcgacaggataatcgccgcctatggtcgtggactggcgaaagtgctgaatcatccgtggctgaccttaagcgtggcgctcagcacgctgctgcttagcgttctattgtgggtgttcattccgaaaggtttcttcccggtacaggataacggcattattcagggcactttgcaggcaccgcaatccagctcctttgccaatatggcccagcggcaacgccaggtcgcggacgtgattttgcaggatccggcagtgcaaagtctgacctcatttgttggcgttgatggcactaacccgtcgctgaacagtgcgcgtttgcagatcaacctcaaaccgttggatgaacgtgatgatcgggtgcaaaaagtcatcgcccgtctgcaaacggcggtggataaagtgccgggcgtcgatctcttcctgcaaccaacgcaggacctgaccatcgatactcaggtcagccgcacccagtaccagtttaccttgcaggccacgtcactggatgcgctcagtacctgggtgccacagttgatggaaaaactccagcagctgccacagctttctgatgtctccagcgactggcaggacaaagggctggtggcgtatgtcaatgttgatcgcgacagcgccagccgtctggggatcagcatggcggacgtcgataacgccctgtacaacgcgtttggtcagcggctgatttccactatttatactcaggctaaccagtatcgcgtggtgctggagcacaacaccgaaaataccccagggcttgcggcgctggataccattcgcctgaccagcagcgacggcggcgtggtgccgttaagctcaattgccaaanttgancagcgttttgcgccgctttccatcaaccatctggatcagttcccggtaacgaccatctcttttaacgtgccagataactattcgctgggcgatgcggtgcaggcgattatggacaccgaaaagacgctgaatctgccggtggatatcaccacgcagttccagggcagcaccctcgccttcctgtcggcgctgggcagcactgtctggctgattgtcgcggcggtggtggcgatgtatatcgtgctcggcattctgtacgagagctttattcacccgatcaccattctctcgacgctacccaccgcaggtgttggcgccctgctggcgttaatgattgccggtagcgaactggatgtgattgcgattatcggcattattttgctgatcggtatcgtgaagaagaacgccatcatgatgatcgacttcgcgctggctgctgagcgcgagcaaggcatgtcgccgcgcgatgcaatctaccaggcttgtctgttgcgttttcgtccgatcctgatgaccaccctggcggctctgcttggcgcgctgccgctgatgttgagtaccggggtcggcgcggaactgcgtcgtccgttaggtatcggcatggtcggcggcctgattgtcagccaggtgctgacgctgttcaccacgccggtgatttatctgctgtttgaccgcctggcattgtggaccaaaagtcgctttgctcgccatgaagaggaggcgtaagtgaagttttttgccctcttcatttaccgcccggtggcgacgattttactgtcggttgccattaccctgtgcggcatactgggtttccgtatgctgccggtcgccccgctgccgcaggtcgattttccggtgattatggtcnnnncctcgctgcccggtgcgtcgccggagacaatggcgtcttccgttgccacgccgctggagcgctcacttgggcgcattgccggggtcagtgaaatgacctccagcagttcgctcggcagcacgcgtattattttgcagtttgattttgnccgggatatcaacngtgcggcgcgtgatgtgcangcggcgatcaacgccgcacaaagtctgctgcccagtgggatgcccagccgcccgacttatcgcaaagcgaacccgtcggatgcgccaattatgatcctgacgctaacctccgatacttattcgcagggtgaattgtacgatttcgcctcgacgcagctggctccgacgatttcgcaaatcgacggcgtcggtgatgtcgatgtcggcggcagctcgc

SEQ ID NO: 1097 - DNA, 3062 bp, Escherichia coli
  Strain O55:H7
  modified_base (2375)..(2375): a, c, g or t
  modified_base (2457)..(2457): a, c, g or t
  modified_base (2883)..(2886): a, c, g or t
gcgtcgggctgaacccgcaggcgctgtttaatcagggcgtgtcgctggacgacgtacgcgctgccatcagcaatgccaacgtgcgtaaaccgcagggggcgctggaagatggcactcaccgctggcagatccagaccaacgatgaactgaaaaccgccgctgaatatcagccgctgattattcactacaacaacggcggcgcggttcgtctgggcgatgtggcgacggtgaccgactcagtgcaggatgtgcgcaacgccgggatgaccaacgccaaaccggctattttgctgatgatccgcaaattgccggaagccaatattatccagacggttgacagcatccgggcaaaattaccggagttgcaggaaaccattccggcggcgattgatctgcaaattgctcaggatcgctcccccaccattcgcgcctcgctggaagaagtcgagcaaacgctgattatctcggtggcgctggtgattctggtggtgtttttattcctgcgctcgggtcgcgccactattattcccgccgttgcggtgccggtttcgctgattggtacgtttgcggcgatgtacctgtgcggattcagcctcaataacctttcgttaatggcgctcaccatcgctactggtttcgtggtggatgacgccatcgtggtgctggaaaacattgcacgtcatctggaagcgggaatgaaaccgttgcaagccgcactgcaaggtactcgcgaagtcggttttacggtgctgtcgatgagtctgtcactggtggcggtgttcctgccgctgttgttgatgggcggattgccggggcgtctgttacgcgaatttgccgtgacgctttctgtcgccattggtatttcgttactggtttccctgacgctaacgccaatgacgtgtggctggatgctgaaagccagcaagccgcgtgagcaaaagcgactacgtggttttggtcgcatgttggttgccctgcaacaaggctacggcaagtcgctgaaatgggtgctcaatcatacccgtctggtgggcgtggtgttgcttggcaccattgcgctgaatatctggctgtatatctcgatcccgaaaaccttcttcccggagcaggacaccggcgtgttgatgggcgggatacaggcggatcagagtatttcgtttcaggcgatgcgcggaaaattgcaggatttcatgaaaattatccgtgacgatccggcggtggataatgtcaccggatttactggcggttcgcgggtgaatagcgggatgatgtttatcaccctcaagccacgcgacgaacgcagcgaaacggcgcagcaaattatcgaccgtctgcgggtgaagctggcgaaagaaccgggggcgaatctgttcctgatggcggtacaggatattcgcgttggcggacgtcagtcgaacgccagttatcagtacacgttgttatccgacgacctggcggcactgcgcgaatgggagccgaaaatccgcaaaaaactggcgacattgccggaactggcggacgtgaactccgatcagcaggataacggcgcggagatgaatctggtttacgatcgcgacaccatggcacggctgggaatcgacgtacaggccgccaacagcctgttaaataacgccttcggtcagcggcaaatctcgaccatttaccagccgatgaaccagtataaagtggtgatggaagtggatccgcgctatacccaggacatcagcgcactggaaaaaatgttcgtcattaataacgatggcaaagcgatcccactgtcgtatttcgccaaatggcaaccggcgaacgccccgctgtcggtgaatcatcagggattatcggcagcctcgaccatctctttcaacctgccgaccgggaaatcgctctcggacgccagtgcggcaatcgaccgcgcaatgacccagctaggtgtaccttctaccgtgcgcggcagttttgccggaacagcgcaggtgttccaggagacgatgaactcacaggtgatcctgattatcgcagcgatcgccacggtgtatatcgtgctgggtatcctttacgagagttacgtacatccgctgacgattctctccactctgccctcggcgggcgtaggagcgctgctggcactggagctgttcaatgccccgttcagcctaatcgccctgatagggatcatgctattaatcggcatcgtgaagaaaaacgccattatgatggtcgattttgcccttgaagcccaacggcacggtaacctgacgccgcaggaagctattttccaggcctgtctgctgcgttttcgcccgattatgatgactaccctggcggcgctgtttggcgcgctgccgctggtgttgtcgggcggcgacggctcgganctgcggcaacccctggggatcaccattgtcggcggtctggtaatgagccagctcctgacgctgtataccacgccggtggtgnatctatttttcgaccgtctacggctgcgtttttcgcgtaaacctaaacaaacggtaaccgagtaaatgacagatcttcccgacagcacccgctggcaattgtggattgtggctttcggcttctttatgcagtcgctggacaccaccatcgttaacaccgcccttccctcaatggcgcaaagcctcggggaaagtccgttgcatatgcacatggttattgtctcttatgtgctgaccgtggcggtgatgctgcctgccagcggctggctggcggacaaagtcggcgtgcgcaatattttctttaccgccattgtgctgtttactctcggttcactgttttgcgcgctttccggcacgctgaacgaactgttgctggcacgcgcgttacagggcgttggcggtgcgatgatggtgccggtcggaaggnnnncggtgatgaaaatcgtaccgcgcgagcaatatatggcggcgatgacctttgtcacgttacccggtcaggtcggtccgctgctcggtccggcgctcggcggtctgctggtggagtacgcgtcgtggcactggatctttttgatcaacattccggtggggattatcggtgcgatcgcc

SEQ ID NO: 1098 - DNA, 5281 bp, Escherichia coli
  Strain O55:H7
  modified_base (2892)..(2893): a, c, g or t
  modified_base (4577)..(4577): a, c, g or t
  modified_base (4809)..(4809): a, c, g or t
atgttgatgccgaactacaccatgcagacgcggcgctttgatctttccggctttttattgctggcggttggcatggcggtattaaccctggcgctggacggcagtaaaggtacaggtttatcgccgctggcgattgctggcctggtcgcagttggtgtggtggcactggtgctttatctgctgcacgccagaaataacaaccgcgctcttttcagtctgaaactgttccgcactcgcaccttttcgctgggcctggcggggagctttgccggacgtatcggtagcggcatgttgccctttatgacgccggttttcctgcaaattggccttggcttctcaccgtttcatgccggactgatgatgatcccgatggtgcttggcagcatgggaatgaagcgaattgtggtacaggtggtgaatcgctttggttatcgtcgggtactggtagcgaccacgctgggtctgtcgctggtcaccctgttgtttatgactaccgctctgttgggctggtactacgttttgccgttcgtcctgtttttacaagggatggtcaactcgacccgtttctcctccatgaacaccctgacgctgaaagatctcccggacaacctggcgagcagcggcaacagtctgctgtcgatgattatgcaattgtcgatgagtatcggcgtcaccatcgccgggctgttgctgggactttttggttcgcagcatgtcagcgtcgacagcggcaccacacaaaccatctttatgtacacctggcttagcatggcgtttatcatcgcccttccggcgttcatctttgccagagtgccgaacgatacgcatcaaaatgtagctatttcgcggcgaaaaaggagcgcgcaatgaagttctggcggcccggtattaccggcaaactgtttctggcgattttcgccacctgcattgtcttgctgatcagtatgcactgggcggtgcgtatcagttttgagcgtggctttattgattacatcaagcatggtaatgaacagcgattacaactgttaagtgatgcgcttggcgagcagtatgcgcagcatggtaactggcgcttcctgcgcaacaatgatcgctttgtctttcagatcctgcgttcatttgaacacgataattcggaagataaacccggcccgggtatgccaccgcacggctggcgtacccagttctgggtggttgatcaaaacaacaaagtgctggttggtccgcgagcgccgattccacctgacggtacacggcgacccattctggtcaacggtgcggaagtgggcgcggtgattgcctcccctgttgagcggctgacccgcaatactgatatcaatttcgataaacaacagcggcaaaccagctggctgattgtcgccctggcaacgttactcgcggcgctcgccacctttctgctggcgcgtggtcttttggccccggtcaaacggctggtggacggcacgcacaaactggcggcgggcgatttcacaacccgcgtgacgcccaccagtgaagatgaactgggcaaactggcgcaagacttcaaccagctcgccagcactctagagaaaaaccagcaaatgcggcgcgattttatggccgatatttctcacgaactgcgtacgccattagcggtgctgcgcggtgaactggaagccattcaggatggcgtgcgcaaattcacgccggagacggtggcgtctttacaggcggaggtcggtacactgaccaaactggttgacgatctccatcagttgtcgatgtctgatgaaggcgctctcgcctatcaaaaagcaccggtagatttgatcccactgctggaagtggcgggaggcgcatttcgcgaacgattcgccagccgtggcctgaaactgcaattttccctgccagacagtattaccgtatttggcgatcgcgaccgtttaatgcagttattcaataacttacttgaaaacagcctgcgctacactgacagcggcggcagcctgaaaatctctgccgagcaacacgacaaaacagtgcgcctgacctttgccgacagtgcgccaggtgtcagtgacgatcagctacaaaaattatttgaacgtttttatcgcaccgaaggttcccgcaaccgtgccagcggcggttccgggctggggttggcgatttgcctgaacattgttgaagcacataatggccgcattattgctgcccattcgccttttggcggggtaagcattacagtagagttaccgctggaacgggatttacagagagaagtatgaccgagttaccaatcgacgaaaacacaccgcgtattttgatcgtggaagatgaaccgaagctgggacagttgctcattgattatctgcgtgctgcgagctatgcgccgacgcttatcagccacggcgatcaggtactgccgtatgtgcgccagacaccaccggatctgatcctgttggatctgatgctccctggtaccgatggcttgacgctgtgccgggaaattcgtcgtttttctgacattcctatcgtgatggtgacggcaaaaatcgaagagatcgaccgcctgctcggactggagattggcgcagatgattatatctgtaagccgtacagcccacgggaagtggtagcgcgcgtcaaaaccattttgcgccgttgcaaaccgcagcgcgagttgcagcaacaggatgctgaaagcccattgattatcgacgaaggtcgttttcaggcttcatggcgcggtaaaatgcttgacctgacgcctgcggaatttcgtctgctaaaaacgctctctcatgaaccaggaaaagtgttctcccgcgagcaattgctcaatcatctttatgacgactaccgcgtagtaaccgaccgcaccatcgacagccacattaaaaacctgcnncgcaagctggaatctctcgacgccgaacagtcatttatccgcgccgtttacggcgttggttaccgctgggaagccgacgcctgccgcatcgtttagttttagcgacattactttgttagccggagatggcgttcagaccagatccggcaacattatcccacgcatggtcagcaaactgacattatctctccgccctggcaggcatcagaaaatcgctcatactttaatcggtaaacagcacctttagatgctgttttcgatacgcaatttcaatcaaggagtcattatggctggttggtttgaactcagtaagagcagtgataatcagttccggtttgtgctaaaagcgggcaatggtgagactatcctcaccagcgagctgtatacttcaaaagcctctgcggaaaagggcatcgcgtcggtgcgtagcaacagcccgcaagaagaacgctatgagaaaaaaacggcaagcaacggcaaattctatttcaatctgaaagccgccaatcatcaaattatcggctccagccagatgtacgccaccgcgcaatctcgtgaaaccggaattgcctccgttaaagccaatggcacaagccagacggtgaaagacaatacgtaattacgatgccgggcgtgggttgttggcgtccggctttatttccaaataacgcttatttatttacctgcgccattaaaatagtggacactgatgaatactcattgtgctttctttgtttaacatctccatgcttatcctcctgaacatgttcatctgccaaaatatcttctaatacttttcgtgacgctatccggtttatgacatacactgatgtaagatttttacttacaggagagcataaacatggccagaacgatgacggttgatctcggcgatgagttgcgtgaatttatcgagtccttaattgaatccggcgactatcgcacccaaagcgaagtgatccgtgagtcactgcgcttacttcgagaaaagcaagcagagtctcgcctgcaagcgttacgtgacatgcttgcagaagggttgagtagtggtgaagctcagccgtgggaaaaggacgcgtttttacggaaggtgaaagcagggataaggaaataatgtgcgtattattaaactcatgccaaaagccaatgaagatttagaaggcatctggtattacagttatcaccatttcggcgaaccacaagccgacagatatgtggaacatctttcagacgttctccagattctgagtaacaataatgtaggtacgcccagacctgaattaggcgaaggtatttttgttcttccttttgaacgccacgtaatttatttcctgcaatcaccaggggaaattatcgtcattcgtatccttaaccaaaaccaggacgccaccagacatttacactggagctaaacccgccgattgcgctacaatgcccgcccttaaagtgggggcactcccctaaccgcttcatcaggtgaagcggatctgacctgtcatcagaacgagagaattatgtttaaaccggaactcctttccccggcgggaacgctgaaaaatatgcgttacgctttcgcttatggcgcagatgctgtttatgcgggccagccgcgttactccctgcgtgtgcgcaacaacgaattcaaccacgaaaatcttcagctcggcatcaatgaagcccacgngctggggaaaaagttttatgtcgtggtcaacattgcaccgcacaacgccaagctgaaaacctttatccgtgacctgaaaccggtggtggaaatggggccggatgcgctgattatgtccgatccagggctgattatgctggtgcgtgagcacttccctgaaatgccgatccacctctcggtgcaggctaacgccgtaaactgggcgacggtgaaattctggcagcaaatgggnctgacccgcgtgatcctctctcgcgagctgtcgctggaagagattgaagagatccgtaatcaggtgccggatatggagatcgagatcttcgttcacggcgcactgtgcatggcctactccggtcgctgcctgctctctggctatatcaacaagcgcgacccgaaccagggtacctgcaccaacgcctgccgctgggagtacaacgtccaggaagggaaagaagatgaagttggcaacatcgtacacaagtacgagccgattccggtgcaaaatgttgagccgacgctgggtatcggcgcgccaaccgacaaagtgtttatgatcgaagaggcccagcgtccgggcgagtatatgaccgcgtttgaagatgagcacggcacttacatcatgaactcgaaagatctgcgcgccatcgcccatgtagaacgccttaccaaaatgggcgtgcattcgctgaaaatcgaaggtcgta

SEQ ID NO: 1099 - DNA, 1879 bp, Escherichia coli
  Strain O55:H7
  modified_base (36)..(36): a, c, g or t
  modified_base (245)..(245): a, c, g or t
  modified_base (1363)..(1363): a, c, g or t
  modified_base (1705)..(1708): a, c, g or t
  modified_base (1875)..(1878): a, c, g or t
tctttctactattgcgcacgcaccgcacaggtttancgcaaagctatcgatgatgccgctgcgggcaaaccgtttgacaccagcctgctggaaaccctggaaggtctggcgcatcgtggctataccgaaggtttcctgcgtcgtcatactcacgacgattatcagaactacgaatacggttattcagtttctgaccgccagcagtttgttggtgagtttaccggtgagcgcaagggggacctcgnggcggtagcggtgaaaaataaattctccgttggcgacagccttgagctgatgacgccgcaaggcaacattaactttacccttgagcacatggaaaacgccaaaggcgaagctatgccggtagcaccaggcgatggttatactgtgtggctcccggtgccgcaggatcttgagctaaattacgcgctgctgatgcgtaatttctccggggaaaccacgcgtaacccacacggtaagtgattaatttcgattatttttcccggatggaaaattcttagaaaccgatcacatacagctgcatttattaaggttatcatccgtttcgcagaaaaacataacccataaaatgctagctgtaccaggaaccacctccttagcctgtgtaatctcccttacacgggcttattttttatgcataagccctatccctggtcaccgtcttccattgaccacatcaatagaatctcccttcatagcacgatgcctttcacataacggcatcgtgctcgcccaggttccggctacgcacagccagaacgcgcatgtttgacgcttaccaaaaaatattctcactctccacatttgaatgtcagacgagcgacgccatgtaatcctgcaccttctgtcttcaggtcaactatctgcatttttttgccctgagtaacacagaaatgggctgcatcattttttactatattttctgcaccagatattctgcccctggctaaagaagcttcggcttcggtgtagtattggttatcgagtttacgctgaatattacttttatatgcaaggccaaatttactgatacttgtctcatcattatgcacagcacaaccagacataagaaaaacactaattaatgatatagcagctatcttgttcacctcaccttcccccattaaataccaacgacactctctagtgtttaaatataataatggcatgattattataattgaataggattataataaatgttctgtacaacatttcctacataagtaggaattacggacatggaggcccttccgggtaactccatgggggctttaatatattatattgaagatgccactgtttggttgaatattaggcatatgctcttttttgaaatttntcggtggctaccgttaatattcgctgttcccattgcaagctcctggtggtaaccactgaatcccccatacttgaactgactttttattctccgactttcatcctgttctgactccaccttttcttttctgctctacactatctacagaccaatcataaaggcacatacgatcatggcagaatttcccgccagcttactgattcttaatggcaaaagtactgacaatttaccattgcgcgaagcaattatgctgttgcgtgaggaaggaatgacgatccatgtgcgggtcacctgggagaaaggcgatgccgcacgatatgtagaggaggcccggaagttggnnnncgcaacggtgattgccggtggtggcgatggcaccattaatgaagtttctacggcgttgattcagtgtgagggggataacatacccgcgctgggaattttgccattaggaaccgccaatgattttgccaccagtgtagggattcctgaggcactggataaggcactgnnnnt

SEQ ID NO: 1100 - DNA, 280 bp, Escherichia coli
  Strain O55:H7
  modified_base (160)..(163): a, c, g or t
  modified_base (276)..(279): a, c, g or t
tgccggtaacgccattgcgatagatatggcgcaggtcaacaaacaaacctgttttattaatatggcgacaggcgggtttgggacgcgtattaccacagaaacgccggaaaaattaaaagccgcgctgggtggcgtctcttacatcattcatggcttaatnnnnatggatactctgcaaccggaccgttgtgaaatccgcggtgaaaactttcactggcaaggtgacgccctggtcattggtattggtaacgggcgtcaggccggtggcggtcaacnnnng

SEQ ID NO: 1101 - DNA, 11244 bp, Escherichia coli
  Strain O55:H7
  modified_base (1033)..(1033): a, c, g or t
  modified_base (7103)..(7106): a, c, g or t
aattaacgatggcttgctgcaactgcgcatttttaccggcgatgaaattcttccggctctcgtatcaaccttaaaatctgacgaagataacccgaatattatcgaaggcgcttcgtcgtggtttgatatacaagccccacacgaaatcacttttaatcttgatggcgaaccgttgagtgggcaaacttccatattgaaatacttccggcggcgttgcgttgtcgattaccaccagattgtccactgttaaggtaagtacaaaacaagcgcagaagcaggatccgcaggccggcatcatcccaggattcttctgcgctcacaattttttcatgcagccaccgttgccattaactcttcaagtgatgcatacccgactaccgcagagttaaagcacggctgttgaaaatcctcggcgacaacaaccgttttaattcccgctgcctgtgcagctttaaaaccactcagactgtcttctataaccagacaatctgcggcgggcaggcgtaattttcgtagtgcggagaggtaaactgccggatgtggtttgccgtggctttcgtcgtcggcactgcaaatcaccgaaaaacagtgttcaattttgagttttgtcagtaccgcatcaatcacctgataagatgaagaggtcgccagtgccagttggtatcctgactggcataaaaaagtgagcacattctttacccccggcatggcctcgcctttttcagcaattaacgtggttatcaggcgacggatctccgcttctagttccgtgggcgtaatagacagatgacagtattcgcaccaggttcgggctatctcatcaagccttttccctttcgtcagttggatacactcttcatcgctaacgctggcaccccatcgtgccagcgctccttgttgcgcctgacgccataatccttccgaatcaataatgacgccgtccatatcaaaaataactgctttgcaattaaacatcgttcctcacaataaagcctggcattacaccaggcttgcctccatcaggaagccgtcncggcttcacctgctcttgatttctgggttgagaatcctggttgttcaacccgaataaacgggcaaataataaacgcgataatatacagggttgtataagctataaccacaccaattgtactgaaataaggtaacagcaccacggctatcgcaggggcaagaaagttagacagaccggcagaaaggttataaaccgaaatcgccgcgcctttgtgttttggctccagcgccgggaaaaccgccgccatcggcacgaacgctgcaacaaagatccccagcgcaacggcgggcaccattgccatccaatagttatgcccgaagtattgcggcatgtagtagaaagccagactggaaagtgccattcccacacagccgaaccagcgaacaactttcatccagccaatcttctctgccagtacgccccagaaaatgttggtaaaaattgtcgtgaagaagaagaccgcccacacctgtagccactcggacgtagtaaagcccagctcatcgacaaacatcatcggcataatcaccgcaaagccaaacagtgacaatgtattgataattcgcacaatactggagagcaaaatgttgcggttggtgtagagtaaggtgacagcacggccgagttcgctgaacttctctttggtcgtcagattttgcatatgatgcggagtctgaactttacgcatcgaaaccaacgcaagaatgccgccagttacgcaaaatgccagcgccagccacagggtgcccatttcgccgataaccggaatggtaaagctgggaatgtaactaccgaaaacgccaataccaatggagtaaaccgcccagaaccagcccagcgcggcactggtactgtcgctgcgcacgttatgcacaacggcaacgataaaggcgtaaaggaagagaggatatgccagaccacgaatgccatagaacagcagaattaatgcatagttcgcctgccccagaccgaagaccagaaacagcacatggaaaatacaccacagtacaaaaccgatgaacatggtcttttgcggcgtaataatttccgccaccacgccggatacccatgcagagagcgccgccgcaaggccatacagcgtaaaagcaaatgaagcttccgcaggcgtaaagcccagcgccttaatatagtgcgataggaatgccagttcaaaaccatcgccggtcataaagatagcaatcgctatatatccccagaccagatttaaaggtaatcccagccattgtttattgtttaacgacatagtgacctcgtttgtagggtacaaaacgccgctccggtgtcaccaccggagagcattaatgacagttgttattggttgcgatagttaagatcgttgttgtatagcgagttaaactgttgataacgttgcatcaaagcctgatggcgttcagcatcgctgtgccaggtttggtagatttccggtttttcgcagaccgccgtcagcggtttacctgcggcgagacaagccagacgcgccgcgccaagcgcaccaccggtttccccacctttatgcgttacaaccggcatgttgagaatatccgccagcagttgcgcccagaacggacttctcgcccctccccccaccagcgaacattgttcaatagccgttccactctcttgcagaacacgcagcccatcagcaataccaaaactcacaccttccagtacggcatagcccatcagtgctcgctggctggaatgggtcagtccccagaacatccctctggcatccgggtcgttatggggagtccgttctccggaaagatatggcagaaacatcggggcactggctttttctgctggtgaaagctgggctatctcttcgagtaactctgtttcggtaacgcccaccagacggcaaaaccattgcaagcaacttgcggcgctaagcatgacgctcatctgatgccataaattcggcagcacatggcaaaatgcgtggacggctgactgcggggccggacgataagcatcagtcaccacaaacagaacgcccgatgttcccagagaaatgaacgcatcgccgggagatactgcgcccacaccgatggcgctaaccgcgttatcccctccgccgccagctaccaccaccgaaggcgtcagcccccagcgttcggctacgcacggatcgagcgtggcagagacatcacaaccttccaccagttccggcatatttgcccgcgtcaggccgcacttttgcaatagcgagtctgaccagtcacgtttttccacgtcgagccacaacgtgcccgccgaatccgacatatcggagacttttttgccagtcattttgaagcgcaaatagtctttcggcagtaacaccgtcgcaatacgcgcaaaatgctgcggttcatggttccgtacccacaacagtttcggcgcggtaaatccgggcatcgccaggttgccagccactcgatgcagctccggtgctatctcttccagttcagcacactcaagagcactgcgggtatcgttccataaaatcgccggacgaatcgccttcccggcttcatccagcagcactgcgccgtgcatctgaccagaaaggccaatcgctttaatcgcctgccagtgctgaccgcatttttcccgtagcgttgacatcaggtattccgtcgcctcccaccaggcctgcggcgattgttctgaccagtgtggatggggccgctgaatagtcagcggcgcgctatgtgtggcgactatttcattgttttcatcaatgaccagcgccttaacttccgatgttcccagatcgatacccagatacataaccgcctcctggttaattaatcagcgcgtagacgtcagcaattttttcgcgcagcaacgcggcaaaatcagcacggtcggttaaatcgccgaacagtgccttgtcgctggcataaacggcaatcgggtctgcggattcgaacatcgcatgtaccgctggcgcatcaagaataccgtcctggtattcatacggcagtttgccgagatgccactgctgcataaacacatagaacaatgccggtaacatagcggtagcatttggacggacgccgcgctggtaacattcacgcaaagttggcgcaatcatcgccggaattttagagaaaccatcggcggcaacgcgctggttagtgtcctgaatatgcgggttggtaaaacgcctgagcaccacatcacggtaagtttcaagatcaatgccattgtcacccaggcaaggaatgacatcttccgttacgtagcgatcggcaatctgataaataaaatcagtcagcgtactttcgtggatatatttctgaccaaccagcgtacctgcccaggcgatacagctatgagaagagttgagaatacgaattttcgcttcttcataaggaataaccgactccaccagctccacgccgacattctccagtgccgggcgcacatcgcggaaattatcttccactacccactggataaaggtttcgcccatgaccggggctttatcactcataccggtttgcgctttgatacgttccggaagttctgtcgacgggcgtggcgtaatacgatccaccatagtattcgggcaggtcgcattggcgcttaaccagtcgataacggtctgtttacccgtaagttgtaagaactccaccaggccatcatggaaacgctcgccgttatgccgcacgttatcgcagttcagaagagtcagcggtccggcgttatttgccatacgtgcttcaagaatgcgggtaataacaccataaatggttttacattcgcccttgaggtcagcagctaaatcagggtttgtaacttccagcttatggctggtgttaaggtagtagccaccttcggtcaccgtaaaggcaatcactttggttttcgggtcagcaccttcggcaatcagcggttgtaaatcgacctgccagggcaacaatttctgaattgaagtgatttcttcatatacgctctccccttccgggctaaccgtttccagcacataacggcctttttgcgtcatcaacgcctgcacaacatgttcggcatcgttacgaatattgcctgctgcaatactccagcgcgcatctccccccgccagcaggcgatgcagataccacgcctgatgtgcgcggtggaaagaacctaaaccaatatgcagccacgtgtatttttcgttcattgtctattctccattgacgttatggctgcactgtaaatgaacatttgatttgaataagagctatagatcacaaaagagcaaatgctctataaaattacaaatgaccacatccaggtaaaaacttgcctcctggcagagctgtcgccaaaatgacgctatctgttgtgggatttttccattccgcacacaatcttgaggtagggaaacgtgaacaaagaagatgacatcaggctcgatcaaaaagtacgggcggcgtggatgtattacatcgccggacttaaccagagcgaaatcgccagtcagttagggacgtctcgtccggtagtccagcggctaattgcagctgctaaagatgaagggattgtgtcaattggattgcatcatccggtggcgaattgtctcgattacgcgcaacttttaaaggaaaagtactatttaaccgactgtaatattgtgccggtatacagtgttgaacgtaccctcgatagcgtgacatttggttgttatcaactgatggcgcgttatttacagggtgataaaccgactattgtcggtatcggttctggcttaaccttaaagaaaaccatcagacggattgattttgatagccaaaatacccgttgcgttgcattgatcagcgccatgaacgaacatggacaatgtaactattacgacgatgttccactactactggcgagaaaaattcagggcaaatattatcaatggcctgccccgcgctatgcccagtcacgggaagaacatcaaatgtggtcaaccaaccgactgttccgcaatgtctctgctgtcgcctgtaattccaatgttattttcgtcggcatcggtgcattaggtcgacaaagcccgatcttcaaagatggctttatcaatgaacagcaactggaagagttaacgatgctcggtggtgtcggggaaattctcgggcgctttatcgacgccgacggcaatgtggtggaaagccatattaaccggatgatcaccagctacgatatccgcgaaagtcagtgtccgcgaattgccgccgcctgcggtgaagataaacgcccggctattctcgcggcattaaaaggcggatggatcaacggcctggtgaccgatgaacacaccgctcgttggttattgactcgctaagtcaagcaaccacattcagactggggatcaattccggtgagatctcaatgcgccgcaccgtggtgtcaccggaatctataatctcaaacaccttctccagcatggcaggcacatcctgacgcaccatgtcgatatcatgcctcagcagagaaacaaacggatcccagtcaaaacagcccatcggcggttgattggtccccgtctgtcccgtttgcgccagccagcgcacaacgccttcaagagaaatggttgagttgacaaacagaccgtgaagcggcatcgctgaggagtgaaaaacgtctttcaacaatccttccactcgtgcggaagagtagccggtaaccagtttatgattatccggaacagttaatccaatcgcctgatgagcatcgacaaaaccgcgtaaacgctcagcggtattgttatcactgatacgcccgccgacaaacaccagcgcgcctgatttgccgtaacgtttctggctattagccaaaatgcgttcggtcaataatttcgcgcccgtgtagttatcagaaataatcgacggtgccagcgtccccggcagatccagattcagtgtcggcactcccgcctgctggcacatctgcgctattttatccggctgtgtggccccggttgctatcacccaatcgacctgccaggaaagcatggcgcgcacagcttctatctccagttctggttgtcgccgcgtacaggtgatgatgggcaataatcctctggcgnnnnccatctcttcaaatttttcagcgacagaaccgaagtatcggttgtcgtatttcggcacaatcatgccaatcacattggattttttactacgcagcaaactagcctgacgattgaccgcatagccctgctcttctgcgatacgggtcaccttctccgccagttttacgctgatacggcgcttcttccagttaccattcaaaatcgcgctcaccgcactggcagaaacgccggttaattcggccagatcgtagatggtcgttttcttcgttttctcaacgctcgccacaaatttgcctctttaatttgaatgtttcttgccgggaatttcagcgagtgctacatcagcttcatcgattgagcaacttgcttcacgcgctaacaaattccgtcgttcagccagtgcaagcaaacaaagactaaaaaaactcagagaaaggattataaaatgaatcactctgtaccctctatgaatacttcccttaacggtaaagtggccgccattactggcgcggcatcaggaatcggcctgcaatgcgccaaaacgctgctcgaggctggagcaaaggttgtcctgattgaccgcgaaggcgaaaaattgcaaaaaattgtcgtcgaactcggtgaaaacgcatatgcgctacagatcgacctcttcaacggcgagcaggtagatagcatgctggcgcgcatagtagaactggcgggcgggctggatattttccatgccaatgcgggcgcgtatattggcggcccggtggcggaaggcgatccggatatctgggatcgggtgtaaaatctgaatattaacgccgcgtttcgctgtgtccgcgccgtcctgccacatatgattgcgcagaaatcgggcgatattatctttaccagctctatcgccggtgtcgtgccagttatctgggaacctatctacaccgcgtcaaaatttgcggttcaggccttcgtccacacaactcgccgccaggtttcacaatatggcatccgcgttggcgcggtgttgccgggtccggtggttaccgccctgctcgacgactggccgaaagccaaaatggatgaagccctggcaaacggtagcctgatgcagccgatcgaagtagcggagtcggtgctgttcatggtcacccgttcaaaaaatgtcaccgtgcgcgatctggtgatcctgccaaacagcgttgatctgtaagggcgttactatgactgcaaccaaaactgtcatcggtgtcgatgtgggttcaggcagcgtccgggctggggtttttgctctccagggctcgttacttgctcacgcggcacacaaaatcacgaccacccgacgcagcggtagccgcgtcgaacagtccagtcagcaaatctggcaggccctttgttcaagcattcgggaggcattgtcaaaagcggatgtctctgcacagagtgtcgcgggtattggctttgatgctacctgttctctggtggtgctggataaaaatggtgaaccgttgccggtcagcccggaaggtgaagcgcagcaaaatatcattgtctggatggatcatcgtgctaccgaccaggcaaagcgaatcaatgccacacatcacccggtgctgaaatacgtcggcgggatcatttcgccggaaatggaaacaccgaagctcctgtggcttaaagaaaatatgcctgaagtcttcgatcgtgctggatatttcttcgatctggctgattttctgacctggcgcgccacgggggatctggctcgttcggcctgtaccgtgacctgcaaatggacgtggctggctcatgaaaatcgctgggatccggactacttccacaccattggcctgacagagttagctgatgaagaatttgcacgtatcggtcagcatattgcatcaccaggaacgccctgtggcaatggcctaaccgagcaggccgcagaagagatgggattactccccggcacaccggttgctgtcggtcttattgacgctcatgctggcggcattggtacagtgggcgtggaaggtggagcgcttaataatctggcttatgtgtttggtacatcttcctgcacaatggcctccgttaccgatccgctttttgttcccggcatctggggaccgtactataacgttatggttcctgggttatggttaatcgaaggcggacaaagtgctgccggtgcggctatcgatcagttactgtcgttccatcctgcgtttgatgaagcaaataaacaagctcagcaggccggacaaccattaccggtatggcttgccgaccaaatcctggcaaaaacggcgcaaccgtccgatgccgtggcgctggcaaaaggtttacatgtggtgccggaatttctcggtaatcgcgctcccttcgccgatcctcatgccagagcggtgatttgcgggctgggtatggagtgcgatcaggataatttactcgctctgtatgttgccggattatgtggcatcggctatggtctgcgacaaattcttgatgcgcaatccgctctgggcgtggtcaataaaaatatcgtcattagcggcagtgccggtcagcacccactggtgcggcaaattctggcagacacctgtggtctgccggtcattaccacgcagtgtagcgaaccggtattattaggctcggcaattctgggagctgttgccgggaaagtttcaccttcggtgagcgacgccatgcagcaatttacccatgtggatacgcaatattacccacaacaaaattaccagacgctgcataagcagcggtatgaggcttatcagcaattgcaggcgctggcaaaaaactgtcgggaataaataaaaaaaccgggaccccttgaagttcccggttttattgcccacaaaattgagaataaactacaccgtaattaattttacccgtgtcttctgcaatgccagtttgtccacctctgacacagcatcatcggtaataataatgtcaattttttcgattggcagtacctgattaaaaccgcgacgattaaatttcgatgaatcgagaacggcaatcactttatttgcggcggtgaccatcgccccgctaatcgaataaccttcattaaaggtcgtaataccattaaccgcatcaataccatcagcaccgacaaacattaaatcggcattaatatcctgcaatgaacgctcggcaatggaaccatgcatcgagcgcgttttatggcggaccgtgccaccacagacgaccagagtaatgtctttattttcggaaagggcaaacgctgccgggagactgttggtaatcaccgtgatatttttggcggtcattaatccttcggcgataagcattgtcgtacttccgctgtcgagaataacggtcatcccttcgtggatcattttgactgccgcctgcgctattctgttttttggcgcgctggcgagctgaaatcgctctttaaacccgacttcctgggtctcggtttcactattaccggacattattttcgccgcaccgccatgaaagcgtgtaaccacgcctttttgttcgagaaagcgcaaatcggcacggattgtcgcttccgaggcagcaaatactcccgccagatcctgaacaagcacggttccctgttcattcactaattggatgatcttattccttcgctcgaatgaattcatcgtcatttacccatattcaattgtggctagtgtaaacgaagggggaccattggtgaatgatctgttttgcacaataccgggccagcatcacgctggcccgcggtttcagggaatgagcaacactttgcccggcatagcattacgagcgatgtcacgcaccgcctgggcgaagcattcaaagcttccacggtgagcgattaatggctccaggcttaacttacgttctgtcagcaaccggctcgccgtttcccactcctgccccggccaagggctggagtagttcatccaactgccgataaccgtcagctctttacgcaatattttgccaaacgttgccgatgttaaatgcagatcctgatgcaacgtccccaccagcgccagttgggcatgaggaccggcaatctctaccgccagttccacagtttgcggtacgccagccgtctcgaggataagctgattaaagcgcagctcgcgtaaaacgccctgcatttgcg

SEQ ID NO: 1102 - DNA, 137 bp, Escherichia coli
  Strain O55:H7
actgttaaatgtttgcatcgcaccgaaagattttgccagtgccagtttttctgagctaatgtcgatcgccgtcacactctttgctcccagcgcgacagcgcactgaatagccagcaggccaatggttccggcaccaa

SEQ ID NO: 1103 - DNA, 1243 bp, Escherichia coli
  Strain O55:H7
  modified_base (618)..(618): a, c, g or t
tttattctcacaaccttgcgctaaatgaaaagcatgcaggccaacggtaatcggttcaataaaagccccatcctcaataggcatatccgtgggtagagcaaagacatttttccgcttaacgacaatatattcggcaaatccaccatcacgccgtgagccaataaaatcatattttgcgcactgggaataaaaccctttcagacactctggacaagtaaaacagggtaataacggcacacaggcaaccgcatcgccaggatgtaaatcatcaacaccggatcctaccgcatcaatatagccgctaaattcatggcctaacgttattggataataatgtgcaccatttttaaatatcctgggtaaatcggaaccacataagcccgagctggcaatttttacccgcacctcatcctgatgtttaatttcaggaatgacgctttctgcaacgcgcacgataccatcagtatcattcaccactgatttcataaaaactcctgattgttaagggggataacctccccctcaggtaaaaattattctgcgagaacggctttctcttgtttaataaagccacgcgctctacgccaggtcatgaaaataccggtcagataaattgcnccgataataatgaaaccgggaatattttgcggggagaaaacctgaatcagtaaccaggtaatgggagaaccgccctgatccattgaagccaccatacccccggcttttaacgccccagcattagccgccagttgggtgtgcaaaccaatagtttgcgtcgagatccacagggtgatgctcataatgatgacacccgagattaaggtgcggaacagatttccacgatgcaccgcgaccgccatcgccacaaagaagccgatagtggcaagatcgccaaacggcagcacctgattacccggcacacaaacagcaattaaaatggtgagcgggataaaaatcaggcttgccgataccaccgccgtatgccccagcagtaatgcgggatccaggccaatcaggaactcctgaccgccgaacttcgcctgtaaacgactacgggcctgcttagcgatgggcgttaaaccatccatgatgggtttaatcacccgtggcatcagcagcataactgccgccgtttttaccgccagctgcaatacacctttgacatcgtaatccgcgaggatgccgataatcagccccatcacaaaacccacggtgacaggctcgccaaacgggccaaatttgc

SEQ ID NO: 1104 - DNA, 3226 bp, Escherichia coli
  Strain O55:H7
  modified_base (1740)..(1740): a, c, g or t
  modified_base (3081)..(3081): a, c, g or t
  modified_base (3224)..(3224): a, c, g or t
cgtcggcgctaaatttaatacggtttacgcctgggattttctcgataatggcatcgaccagcaccgcaatcggccccatatacgccgacgtaccgtgcggaatagcaataccttccagctcaaagaaatttcgggtatcgcgggcaaaccagtcgccgagcttataaacaaacgccgcgtgaattaccacacccgccatccctatcatccatgaaccggttgccagatgcagcaacgcgccggtgaaggtcatatgccagatattccagatatcaacatttaccacccgcgtcatacgggtcagtaacatcgccacgttaaccagaatcgcaatcggaatcgccaccagcgcaatttgcgacgcccaggtcattggtgaagagcccggccagccgacatcgaccacatgcagattcaggtcgaaattttccgccatcgctttcgccgccgggccaatggaatccagcattaggccaatcacaaggccaatgccaacaaagccaatcccgatatgcagacccgctctaaagcaatcgcctgccttcatgcctaaaattttagaaaaaataatgatgacaatcggcaacatcaccgtagggccgagatcgagaatataacgcatgacttctgaaaacataggtcacccctgtaagatagtcagaattttattttgtaatgcttcgataccgacaccagaaacaaaaggcatgccgtgaactaacggaatatcgccaaaactacggtcaactttggcggtagtacatatcaaatgcacaccatccatataggtttctatttcattaacccgacactggattaattcaacaggaatattatgactctgacacaactctttaatttcttccgccgccatcgtagaggtcgcaaccgcgcctccgcaagcgacaataatcttgcgtttcataaatagtcctttttattgttacagagggatttattcgtctgaatctaaaacatactttgtgaagtattcctttaactgagtttcaggaagagtgattagtgtctcaacgatatcgggctgttgtaacttgccaaataaacagcgtaaaagtttcaattgctgctgcggattttccacaatcaacgaaataaccaacgataccgccacgtcattatcatcatccgcttgctgaaaatgaactttatttgttagccttaacagataaatggctgacgacttagcatgaatcgcctcacaatgcggtattgcaatggcgtgctgctcaagcattatcccggtagggaattctgcttctctggcaattaatgcctgtggccaggtatcatgaaccacacctttggcgagcatctcattaccgatatgggttaaaacttcgctacgatcgacaaaagaaattccgctacgaacaaacaggttagtcatataccgtccttattccgcacagccgtagcgataggcgcgcaaaacatcataaattttatccataatcagctgatgcggtattgctgataattccccggactgaatgcgttcaaattgtttgggaagatactgactaatcatgcccagtgggatgtccacgccttgcagattcaccatcatcgtttcaacgctatttttaatccgactatgcggccagtaataacgaatacgatccgacaggctgtaacgaatatccagtaatgaatcgttaaaacccgtgcgataatatttcttccagtactgcggttcgtcgagcatcacttcttcaattnccgccaggcaaccgctgcgattttcgggggcgataagttcctgctcaatttgcgccagcgcaaatatcgcctcgcgtaaagcaaaggttaatgcgggaccgactttcaatattgcaaagtgatcgcggactaattcccaataagccgtccgggtctggtaatcggtagaatgtgcttcataaaccattcgggtgttttctatccattgcgccagcgcctgcgcttcctgcggctgataatggataatattgctgtgatcaaattccacacccggctgcaccacgatggcaatcacgcgtgttaacgcctctgtcagcccacgggcaataaaggccttttgatgcgtacgtaaagtattggcggcatcttcaacatgggtgatgtgtactgactgaatggcgctggcctcaccgcccggaaccggaacttcggtgccaatgacatagctcagttgctcacgctggcaatctgtcgccacactttccgcagcaaagcaaagcacagcagctcgttccgcaaccgtttctggtgctaacggtatgggatcccccgcgcaggacattgacgcatcaagatgaattttactgaagccagcacgaacatatgcctttaccagctcgacggatttttccatcgccgcatccgcattttcttgctgccagcagtttggccccagatgatcgccgccgagaataatgcgttcgcgtgcaaacccaactttatcggcaatcgtaaaaacaaattcgcgaaagtctgccggtgtcattccggtataaccgccaaattgattgacctggtttgacgttgcttcaatcagcactttgcgcgtgctgttgcgatcaaatgccagcgccgcttcgataaccaacggatgggcagaacagactgaacatatgccgatatgttcaccagctttatgccgggcaattaacgttttcatgttttttccttgttaaatggcaggtgcgttatgccctgccctcgcagccacaatcggcaatcactttgctcaccacatcgcgcattgcggatttagccgactgcaaataatcccggggatcggtcgcttcggggtgctcggtcaggtaattttttaacgcctgcgagaaggcatttttcagctccgttgcaacgttgattttgcatatccccagtttgatggtttgctgaatatccttagtcgataaccctgacgcgccatgcagcaccagcggtaagttcacccactggcgaatgttctccagtcgagaaaaatcaagcgccggtgcgctggcatacataccatgagccgtgccgatggcgaccgccagggaatcaattccggttgcctcggcaaattcncgcgcctgagcggggttggtataaaaagcatcggcttcattgacttgcacatcatcttcctggccgccaagttgccccagctccgcttcgacgctgacatcaaagcgatggcaaaaatccaccacctctttgacccgtgaaanat

SEQ ID NO: 1105 - DNA, 1851 bp, Escherichia coli
  Strain O55:H7
  modified_base (24)..(24): a, c, g or t
  modified_base (1146)..(1146): a, c, g or t
  modified_base (1326)..(1326): a, c, g or t
gcaaaaggcaaatgcgaggcgtcnatcatgactgagcgcacgccagaacgaaccttctgagcgatatcgtcaaatttcgtgtgatggtcgagatgaattgccagtggatggtgatattgcttcgccatcgcgctgaccagcgccatcagattttctgtaccagcatgagtaaatgtgccaggcgttccggcgatgatgaccggcgcatgcaggttggcagcggtttctaccaccacttgcatcgtttcgagattgtgaatattgaatgccggaaccgcataaccgccgcgctgtgcgttgttcagcatctgctttgtcgataccacgtacattttcatatcctgtcgtttgctttcgatttcaaaatataatgaaatgatttgtttttaaatgtcgagataacgatcacaaaaacgacaatatgaaaattgttcgaggagtgaaaggcaaaaaaaacggcctcccgggggaagccgtaaagaagtgcgcgtgtttttatgtcggatgcggcataaacatacgtggcagcgctgtgtaggcatgataagacgcgtcagcgtcgcatcaggcataggttgccggatgcgacgtaaacggcttatccgtcctacggggtagtgctgttagtatgaggcgtatcaggcgatagtaattttgctatcgagataaacgtcctgcacggcgttaatcagtttcacgccgtcagccatcgatttcttgaacgccttacgtccaagaatcagccccattccgccagcgcgtttgttgataaccgcagtacgcactgcatcactgaggtcagtttcaccgcctgcagcaccaccggagtttatcaacccggcccggcccatatagcagttagctaactgataacgcaccagatcaatcgggttttcgctggttaacttgctgtacacgcgatcgtcggtataaccgtaattaattgctttatagccgccgttattttccgccattttttgtttgacgatatctgcacctatggttgccgccagatggttcgcctgaccagtcaggtcggcggagacatggtaatcaacgccatctttcttaaaggcggagttacgcaaataggcccacagcactgtcaccatgcccagctcgtgcgcacgttcaaaagccgcaganatttcttcaatctggcgacgtgactcttccgagccaaaatagatagtcgcaccaaccgccaccgcgcccatgttgaacgcctgctccacgctggcatacagcgtttgatcgtaggtattcgggtaacttagcgtctcgttgtgattaagtttgacgaggaatggaatgcgatgcgcgtancgccgcgataccgacgccagcacgccgtaagttgacgccacacagttacagcccgcttcgatcgccagttcaacaatgtttttcgggtcaaagtagagcgggttagcagcaaatgaagctccggcagagtgctcaacgccctggtcaaccggcagaatagaaagatatcctgtgccagccagacgcccggtgttgtacaacgtctgcatattacgtaacaccgctggcgggcgattattgtcaatcatcacgcggtctacgtagtcatgtccgggaagataaagctggtcagaaggaatagtcatacaacggtgctgtaaaaggttgtcggcgtctttgccaagcaactgcgcaatatctgtcattactatgctcccgtaaattccgattggatatcggctatggattgtcctggcccgccttttgcgggcaatcataatcctggtcgttacgggcgagtttttccatcttttggatgttttttcagcgttttctgttggctcgattcatcagaaaaaatgttag

SEQ ID NO: 1106 - DNA, 4144 bp, Escherichia coli
  Strain O55:H7
  modified_base (98)..(98): a, c, g or t
  modified_base (1005)..(1005): a, c, g or t
  modified_base (3975)..(3975): a, c, g or t
  modified_base (3977)..(3980): a, c, g or t
  modified_base (3986)..(3986): a, c, g or t
gttttcaccgcaaaggtatttaaaaggtattattaagtggtattatcatcgcgtaccttacattacctgtcatgaaggaattaaaagatgaaaacaanagcaaagctgtcgttcatgatgtttgttgaatggtttatctggggcgcgtggtttgtgccattgtggttgtggttaagtaaaagcggttttagtgccggagaaattggctggtcgtatgcctgcacagccattgcggcgatcctgtcgccaattctggttggctccatcactgatcgctttttctcggcgcagaaagtgctggcggtattgatgttcgctggtgcggtgctgatgtatttcgccgcgcaacagaccacttttgccgggttcttcccgttactgctggcctactcgctaacctatatgccgaccattgcgctgactaacagcatcgcttttgccaacgtgccggatgttgagcgtgatttcccgcgcattcgtgtgatgggcactatcggctggattgcctccggtctggcatgtggtttcttgccgcaaatgctggggtatgccgatatctcaccgactaacatcccgctgctgattaccgccggaagttctgctctgctcggtgtgtttgcgtttttcctgcccgacacgccaccaaaaagcaccggcaaaatggacattaaagtcatgctcggcctggatgcgctgatcctgctgcgcgataaaaacttcctcgtctttttcttctgttcattcctgtttgcgatgccactggcgttctattacatctttgccaacggttatctgaccgaagttggcatgaaaaacgccaccggctggatgacgctcggccagttctctgaaatcttctttatgctggcattgccgtttttcactaaacgctttggtatcaaaaaggtattattgcttggtctgatcaccgctgcgatccgctatggcttctttatttacggtagtgcggatgaatatttcacctacgcgttactgttcctcggnattttgcttcacggcgtaagttacgatttttactacgttaccgcttacatctatgtcgataaaaaagcccccgtgcatatgcgtaccgccgcgcaggggctgatcacgctctgctgccagggcttcggcagtttgctcggctatcgtcttggcggtgtgatgatggaaaagatgttcgcttatcaggaaccggtaaacggactgactttcaactggtccgggatgtggacttttggcgcggtgatgattgccattatcgccgtgctgttcatgatttttttccgcgaatccgacaacgaaattacggctatcaaggtcgatgatcgcgatattgcgttgacacaaggggaagttaaatgaaaacagaacgtattctcggtgctctttatgggcaggcgttaggggatgcgatggggatgccctccgagctttggccacgcagccgcgttaaagcacactttggctggattgaccgttttctgcctggaccaaaggagaataacgcggcctgttattttaaccgcgccgaattcaccgacgatacctcgatggcgctgtgtctggcggatgcgttactggaacgtgaaggcaagatcgacccgaatctgattgggcgtaatattctcgactgggcgctgcgtttcgacgcctttaacaaaaacgtactaggtccgacctcgaagattgctctcaacgccattcgcgacggtaaacccgttgctgaactggaaaacaacggcgtgaccaacggcgcagcgatgcgcgtctcgccattaggttgtttgcttccggcgcgtgatgttgattcctttattgatgatgtggcgctggcgtccagcccgacccataaatccgatctggcggttgcaggcgcggtagtcatcgcatgggcgatttctcgtgccattgacggagaaagctggtcagcgattgttgattcactgccttcaattgcgcgacatgcacagcaaaaacgcatcactaccttcagcgcctcactggcagcacgtctggagattgcgctgaaaattgtgcgcaatgccgacggcactgaatccgccagcgaacagctttaccaggtcgttggcgcaggtaccagcactattgagtccgttccgtgcgccattgcgctggttgaactggcacaaaccgacccgaaccgttgcgccgtcctgtgcgctaaccttggcggcgacacagacaccatcggcgctatggcgacggcgatttgcggcgcgttgcatggcgttaacgctatcgatcctgcgttaaaggcggaactggatgcggtaaatcagcttgatttcaaccgctatgccacagcgctggcgaagtatcgccaacaacgggaggtggtatgagcggcgctcgattacacacgctgctgcctgaattaaccacgcgtcagccggtgatggtcgtcggcgcggcggtcattgacgtgatcgccgacgcttatgccctcccctggcgtgggtgcgatatcgaactgaaacagcagagcgttaacgttggcggctgcgcactgaatattgccgtggcgttaaagcgcctcggcatcgaagcgggtaatgccttgccgctcggtcagggggtatgggcggagattattcgcaaccggatggcaaaagaggggttaatcagcctgatcgataacgccaaaggtgataacggctggtgcctggcgctggttgagccggatggcgaacgcacttttatgtcattcagcggtgtggaaaatcagtggaatcgccagtggctggcgcgattaaccgttgcgcctggcagcctgctctatttttccggttatcaactggcctcgccctgcggcgaattattagtggaatggctggaaaagctgcaagacgtgacgccgtttatcgattttggcccacgtattggcgatatcccggatgcattactggcgcggattatggcttgtcggccactggtgtcactcaatcgtcaggaggctgaaattgccgccgaacgttttgctttatccgcagatatcacgacgctcggcaagcaatggcaggagaaatttgtcgcaccgctgatagtccgtctcgataaagaaggtgcctggtatttcagcgacaacgcttcaggctgcgctccggcatttccaacgcaagtcgtagacacaattggcgcgggcgatagccacgcaggtggcgtactggccgggctggcatctggtctgccactggcggatgccgtattactgggcaatgcagtggcgtcgtgggttgtcgggcatcggggcggtgattgtgcgccaacgcgcgaggaactactcctcgcacacaaaaacgtatagatcgctgcgacagtggctaatgctgtattcaataggccgttgctgttggtcaagcgccacttgcttgatcaccagcaccggtattttgctatctaactgaatatgtgactgaaactcggcatctggcatccgggcgctaacgcgggaacgggtgcgttgtgggtagatgtgctggctgcggaagtagtcataaagagaaattccgatggcatcaacatcatgaattaaatgcgccggaacccacgattcctcaatcgataccgcttcttcatcgacatagcgaatacgcttaagcaaaaagacatcacttcccgcttcgaccgccagctgctgcgcgacttcttcgggacatttcacgacacgcttgttaacccatagcgtatcgggctttttcccgcgcaataccacctgctgagaaaaacctcgcgcttctttcaacgagtattcgaagatgttgttgatctgcgtgccgtaaccgcgcgaacgcgtcaccacgccctcttcttccagcgcctgcatcgccttgcgcaccgtaatgcgtgaaacgccggttaactgacttaaatcacgctcaccgggcaaaatattgccatgctccagcaccccgctgcgcacggcattttttaccgtttcggcaaacttaatanannnnggcgtnttatccgccgctaaaatacgctcgttcagttgggcaatcagctgggtatgcgcttgttccatttgtctttttcctgccagggagtctggtgggagtatatcactgcttcttatttaaggcgtttctttaatcccatcaacgaatgcctgcaactcctc

SEQ ID NO: 1107 - DNA, 470 bp, Escherichia coli
  Strain O55:H7
  modified_base (73)..(73): a, c, g or t
tgccattaaacacattaaaatccaccggaccattgatgccatctacctgtccacggtcggaatgctgccagangcgccaggccatgccgtcattgtccggacgacgttgatagtagtgagccacccaccacggatattcattgaaatagcccgccagattcgtgtgataaaaaacggctcctgagtaaataatcggctttttccccgtacttttttcgaccatttttagccactgacttaccctcttgcgtaattcttttgccgataattttccccgttcttctacgtccagcacggcagggaaatcgccttgtgagaaatccaccgtttgcagaaataatcgcgcctgaacaggcgctgctaccgacggggagaaataatgatacgccccgcgcagcaggccattttcgcggcttagttgccagttacgcgaaaaataggggtccaccagcttttcgccttccgtcgcc

SEQ ID NO: 1108 - DNA, 3170 bp, Escherichia coli
  Strain O55:H7
  modified_base (4)..(4): a, c, g or t
  modified_base (1033)..(1033): a, c, g or t
  modified_base (1208)..(1208): a, c, g or t
  modified_base (1498)..(1498): a, c, g or t
  modified_base (2245)..(2245): a, c, g or t
  modified_base (3168)..(3169): a, c, g or t
aaangcaaactgtaagcggataccgttgtcgcgcatttttgccacccgctgccagtcgatccgctcctgccagcgcgaaacatctattccgtgaatggtgtaactggcaggaatgcgaatagcgaaagatttaaccgggcgataaccgtagaagtggatgtagtctttaatctgaactgctgtcgaatagaaaaaattcaccgtctgacgtggacaaattgcaacgatggaaattagcccaagagcgcataataaagcggtgaatttttttcgactggtgattctcagctgcattggtttcatccctgaatgtcagtgccaaagactgacaataaccaaagcagctatagtacggtgctcaccaccaggcgtggaagtggtgaaccggaccaataccgtgaccaacttccagcgtgtcggcctgggctaacgccgatgaaagccagctttttgcctcctgtacggtgtcagcccagtttgtatggcgcgggcgtagtgcagccaacgccgcagagagtgtacaaccagtgccgtgggtgtttttggtcataatgcgcggtgcggtaaaccgttgttcaccctcgcgggtaaacagccagtccgggctttgctcatcatccagatgaccacctttcattagcactgcgccacatcccatcgccaacagcgatcgcccttgttccagcatttcctgttcggtgcgcgcgtgtggcgcgtcgagcaaggcggcagcttcgggcaagtttggcgttattaatgaaacctgtggcaataatcgactgcgcagcgtaacaaccgccgaaggtgaaagcagcgggtcgccgctttttgccagcataacggtgtcgagtaccacgttttggatctgataacgttgcaaccgttctgccaccgcttcaacaatatcggtttccgccaacataccgattttagtggtgtcgattcgcacatcgctgaacaccgaatcgagctgggcggcgacaaaatcaggctcaatgcgatacaccgactgtacgccacgggtattttgcgntaccagtgcagtaataactgagcaaccataagcgccaagtgccgagaaggttttaagatcggcctgaatccccgcaccaccactcggatcagtaccggcaatcgtcagagcgttaattcgtttcatgcctgcacctcctgcgtcaattgccagagcgcatcaaggaaatgtggancaaaactgcctggcccctcgcttctggcgactgcgcgttctccggcttgtttcatccagtgacaggcagatgcgacattttccagcgtatcgcctggtaacgcacagcaggcagcgacaaccgccgataatgcacagccagttcctaccactttggtcattaacggatcgccaccgtgaatgccaacggtgcgacgaccatcggtaacataatccatctcgccagtgaccacgacgattgcgccagtttcccgtgccagtgtttgtgcagcgggtatcgcattagctgcngcgtcagtggtatccactccccgtccgccagtagcaacgccagctaatgccatgatttccgaagcattaccacgtatcgctgccggtttaaaagataaaagttcatgacaaaaatggcgacgataatcgagcgcaccaaccgctactggatcaagcgtccagggggtttgagagctttttgcttgctcaacggcggcacgcatcgcctgtgcgcgtggctgcgtcagcgtgccaacgttaatcaacaaggcactggcgatagccgcaaactgactggcctcttcggtttcgataaccatcgctggcgatgcaccgatcgccagcaaggtattggcagtaaaggtttgcaccacatcgttggtcatgcaatgcacaagaggggaatgttggtgaaaaaggtgtaacgcgtgcgcagattgcgcggaactcagcaggtcgacttgcatagtttgctcctgccataacgtgaagaagcaatgacctggtggtccgtgacttccctacgctggcattatccagatcaggtgatacgggtatttctcagccttcacgtagaagggcaccccgagtcgtttggttgaatctctatattttgtgccagattaggggaagagacttgcagatgcaagctcgcatccattcattacgtcttcactgtgtaccccatatcagtaatgaaaaagaaacaattcacacccatcattcaggtggtaaaaactgtagactatcttaattagctaatttatnttatttatctaaatttgataggtgagataaaaatgacagaaacccagatctacgagaacattaagcaagccattagcagcgcaccacgaaatagccaaacgatggaaatgcacctccagatgatcaaatacgctgaccatctgaaaaacgtcacggcaaaagagttttgcgaaggtgtaggacttaaagccagctttgctacagagttcagcaaaatgagaaatcttaccgagcgactcaaagccgccggacttgataccacgaagttataacaaacgaaatcatcaatatattactttcgttttccagggttccctgtatatgtacctatgatcataaaaaccagttaccaccacgtagctgataccataatattttcatttttactttaaataaatagataaatttagagagtggaataattaaggtctattttctctagctttttgagattgatagttgagaatgataattctttcatctcaataacaccgaagtttgatagctgtttaagccacagttgaagaccagcatcagagcaacctgctcgatgtgttacatcactacattttattagtgttgatttcctcttatagagataaataaggacttcatagatgcgttttccggtgtcattggatacgcgctataccaccattcttggctaaatcttggttcataatcatactttaattaaaatggatctaaaaattcatcatagatggctggatttttcatagaaaaatatgtttgaacaccatttgatatttttatttattgatcacaggctaacgttcttgaatattctataaatgatgcttcctctattctaactctacccacgcaatatatatacaaccctacctatactcgaagtacgttcaacacataagacaacgaaaagtagttgtgtgctgtaaaannt

SEQ ID NO: 1109 - DNA, 49 bp, Escherichia coli
  Strain O55:H7
ttaataattaatttcaagagcatgctgtgccccctatattatgcaaatg

SEQ ID NO: 1110 - DNA, 1441 bp, Escherichia coli
  Strain O55:H7
  modified_base (5)..(8): a, c, g or t
  modified_base (1078)..(1078): a, c, g or t
  modified_base (1195)..(1195): a, c, g or t
aaaannnnataagacacattaaacgattacaataatcaaacatatattaaggtgaatagaaggtattcgaatgagtcatttctaatatttttagtcttacgggcaaaggctatctattacctaacatgcaatggaaagcggaaaagtatgtagatagtgcaacttgttccctgaactgctgtttatccaacctattgctatgaaagtacgtaataatttcaaacctaaacaataccattgctaaacaaatgaaaacttgttcgttttactaattaatagttttataatgactaccccaaaataggtaactcaaatccaagcaaagagaaaatatgaagagtaaaatttttgctgcacttctgctactacctctatctacttatgcaagctcctataaatgtgatgctcttcagcagggtcaaattggcagcaatgggaaaaccgttacggcacaatcctccatcgatattgacggcaaacagatgcattttagcttgaacggagtgagttgggatctctcatatattggtgaaaaacagattgcaaagatgtatagcaccgaaagcgggaacgtctctgtatctttcattgatgccaatcccatcatcttcgtgctacatctcgtaaacgatgatggtagaaaaggcacttacaacatcagtgaatgttctgaattataagaggctaaaatgaaaaaactactcgttaccgtcatctttgtggcaatgatgccaaatgcattcgcactaagtcacggagacagcgcaacacttaaagaaggtacatttaactgtaaaaagttaactgacttttacgagatgatcagttacatccaggacaatgaccaacaggctatgctgagtctcattacatccaataaatgtcgcgtgttagatgaatcaatgacggtagaaatccagagcgtcgatgacaaaggttttgtttcattcataactccaggtggtcatggtggctgggctgtgaagcaatttttcgaaaattaatcaaactataacctcgaatggcgtgtgtcctcacgccatttactctaattcagcttaacgtcacttgtccctcnatttattgcctcaactacggccatattaggcactttcatttgatataagaatccagcaccttcagaacaacatccagatcttcttcacattttagctcatccccctggtgaacgatntgttccgtcagatgacctttaatcacttcccgcatcagaccgtttaccgcgccacggatagcagcaatctgttgtaaaactgcagcgcattcgtgcggttcgtcgagcattttcttgagcgccacgacctggccctgaatcttactggcacgtgctttcagtttctgtttatcacggattgtatgagacatggcaacacctggttaacaagaacatgaaaaatcatagcactattaatctactggg

SEQ ID NO: 1111 - DNA, 7833 bp, Escherichia coli
  Strain O55:H7
  modified_base (174)..(177): a, c, g or t
  modified_base (585)..(586): a, c, g or t
  modified_base (2305)..(2305): a, c, g or t
  modified_base (3606)..(3607): a, c, g or t
  modified_base (3609)..(3610): a, c, g or t
  modified_base (4509)..(4510): a, c, g or t
  modified_base (5476)..(5476): a, c, g or t
  modified_base (5835)..(5835): a, c, g or t
  modified_base (6380)..(6381): a, c, g or t
  modified_base (6529)..(6530): a, c, g or t
  modified_base (6536)..(6538): a, c, g or t
  modified_base (6586)..(6588): a, c, g or t
  modified_base (6590)..(6591): a, c, g or t
  modified_base (6599)..(6600): a, c, g or t
  modified_base (7405)..(7405): a, c, g or t
gtatcaggtactgggggggagtagaatcagattgccgaattaatactaagaattattatcatgaccgaatttacaactcttcttcagcaaggaaacgcctggttcttcatccccagcgccatcttacttggtgcgcttcatggcttggaaccagggcactcaaaaacgatgatnnnngcgtttatcatcgccatcaaaggcaccattaaacaggcggtgatgctcggactggcagcaaccatttcgcataccgcagtggtctggttgattgcctttggcgggatggtgatcagcaagcgctttactgctcaatcagcagaaccgtggctccagttgatttccgcagtgatcattattagcaccgctttctggatgttctggcgtacctggcgcggcgaacgcaactggctggagaatatgcacgagcatgatcatgagcatcatcaccacgatcacgaagatcaccacgaccatggacatcatcaccatcacgaacatggcgagtatcaggatgcccatgcacgagcccatgccaatgacattaaacgacgctttgatggtagagaggtcaccaactggcaaatnntgctatttggcttaaccggtggccttatcccctgcccggcagcaattaccgtgctgttgatttgcattcagttgaaagccctgacactgggcgcaacactggtcgtcagtttcagcattggcctggcgttaacgctggtcaccgtaggcgttggcgcagcaatcagcgttcagcaggtcgcaaaacgctggagcggatttaacactctcgctaaacgcgccccctatttttccagtctgttgattggcttagtcggtgtgtatatgggcgtacatggcttcatgggcataatgcgataactcaatcctttaggcttgcatgttatcttcagcccaggatgattcttaaatcagctatttccgctgactctctgctcgataaggatgcttttagggcatcctttcatttacactttttacgaaatcatgggatcactaacaaaatatcgcttgtcagttatattgtatggcatgaaagatatgcgactgatattacagatccccaaagtggagagtttatgaccattaaaaataagatgttgctgggtgcgcttttgctggttaccagtgccgcctgggccgcaccagccaccgcgggttcgaccaatacctcgggaatttctaagtatgagttaagtagtttcattgctgactttaagcatttcaaaccaggtgataccgtcccagagatgtaccgaaccgatgagtacaacattaagcagtggcagttacgtaacctgcccgcacctgacgccggaacccactggacctatatgggtggcgcgtacgtgttgatcagcgacaccgacggtaaaatcattaaagcctacgacggtgagattttttatcatcgctaaaaaaagccccctcatcatgagggggcaatgcagacaccttgttattttttattattagccacttgctcgtcttgcttgttattagtcgtatttcacgttgattagtgcggttgcctccagtgcgccagatttaactttgtttgtatcgtagacgtagtaactggctgttatcggaattgaaaccgttgtatctgtaagttttgactttgccgcaatttcttttaaatttgtgtatcctttactgctgttagtgatatttaaaagtgtgactggcgaaccattactttcaagaataaatcctacgccattatcttccgcacctttcagtattgtgttgctgttggttaacaagtcagaacttgataaatacacctgcattttccgtgatgtttgattttgttgacctaataaatttttacaacgcagaataatatccccttgtttactatttattgttgctttgttacctgtggctggtaattgtgaaacgggaatgctgtctaaagtaattaataaatcgtccggtttgcaggttgtggttatcgggttgtatgacaatgtcagattaaaggaatagacacctgcattttgtgccaatgcatttctgtagctatttacacatgcatcccatgacttgccacctaataaacacagtagaaattgtactgcggcactcccgcgtgtcgatgatgaagcactggataatgtcgcaacaccattaatcatcactgaaccgccgccccccgcagaaacattcacttttgcattactggccgcaggtgtcaccgttaccgaataaccactggtgaaactggtctgattatttgacaacgtgatgttatttttattggtccattcaaaangtaaatttaatttaatagtatcgttataaagtccaacaataatatccgacgggctcataggggtgatagtatttgtactcacgcatgacgaatcattaaaattatgctcataggtcgccatttgtgtttgagtaagtgcaaaatccccctgaacaaccaaattgtgctgaacagataactcactataacatgctgcatagctcactggcataaccatcatcattaatataaatagcattatgcgaattttcatagaaccacctgactattactggcaaatataatttctactttcatcaatctctttaccgaaggtgattgtgcatgaaagtccttgttgcttattaattgccacattaaccgatggcggtacttcattggtgcgaataaataactgacttccctggccgacaacgccaatattatgaccgtggatatcattgacttcataaccaaacgttaatggttgcccatccgctcttaacgcttttataaaccagggcttgcgctgatcggtatcaaaattaaccagtacaaccgcgccgcgataaggtgcggcaattttccggttaccgcgcaattctgcttcgctatcgctttgcgacacatccagcatcaggtgattttcccgataaggtgtcattccgtcgtataccaccactccattacggtttgttgtgcgatatttttgcccattgacataagcatctttaattcctggcgcattcatcacagcaaacgtttcggaaagacggttcgccagattaacgccacccgaccaggcgacaatgccccctgaaacactggctccagcctgtcgataagtactcgactgactataactgccattcactgtcgcaaccggcgcgttccaggttaaattcgctccagctgtcgtttcatttccctgatgttgatgacttaggttgacaccataattgaactgatcccgactccctactgttcctgataatcccgtattatttgaggcaaacccctgatcatcaaacgtcgttgagttagacatatatatttgccgacgaggcgtcgaaacgtcatcaccccaatcaaagggaatcgatataaaaatattaaaacgtttctcttcatgatgattctcgtcataagcctggcttgccgcgagggtatagcttatccgtcgcaggttgttggaataactcaactgataatccttactactgccgctacgcccccagtaatctcgccataacgtacttaatgacacagaaccccaaccttctggcaatgactggctcatattggcggaaaagctatttttnngnncaaaatcattctggtaataatcggcaatgtcatagacatcgttttcatcacggcgataattatctttattgttagcccaaacgtgatcattaaatgtccgataatcacgcgacgaataacgctaggccgccagaccaaaacgcgtcgacgtttggctcacaaatttgttgtaggcaatttgataactttgcccgtcaaatacatcgccgttgtcttgtttactatgcgacttcgtggcatcgacggaaatggcaccaatgcgtgtattccagccagtccccaaagtgaacgcgtaataattattcgcgaccatcgagccaccatacagcgtcaataagttattaaaaccatactgataacccgcctggacaaaatcactttgtttgctcgccccttcaatatggctacgacccgccgcaaaatcatatttcgacacgccgggttgcagcatatttggcaccgctgcataaggcaccagataggtggttaccgagccgtcagcctctttcacgctaacatcaagatctgctccaccaccggccaactgcaaatctgtaatcgcaaacgggccaggaggagcctctttctgataaaccacaaaaccattctgttcaatagttaccagcgcgttactctgagcaatcccctgcacccgtggcgtaaaattttgtttcgagttaggcaacatctgcatatcacgaaacaaccgcacacctctgaagcgaacagaatcaaaaatatcgcttgatgtgtacatatcacccacgcgaagcgtgccgagaagttgggcaaatccacattccagatacagggtattgcttttccacacccctggattgttatttgttttactgaaactggcatcagaatgcagttgccaccccagtaaatttaacccnnttttaaaacgtacatatgtactcttactattacccgacgctttatagtcactgtaatactgactcacataataagaggtataaaacgcattaataccccgctcccagttttccggtggaacatagccactttccagttcttccacccaggcctgcgggacactgaaatcgagacgaaaaaccccgatatcccaggtatagctcccaccctgaacaagttgctcaaatgttaaacattgcttaccgctggcgaagttatcgctattaatgcctaaccgcttgataacttctcttgataaacatgtttcttgcgggttgtctttaacaataatctcatatttcccgcgccattgcttattgacataaatatcgatgtcatactgccccggtaagggttgattatcatcaagacgaatatttgcaacctgctggtctttcattccacctatcataaaatgggtatcaaaggtttcttcagctgcataagcttcaatgccgagcaataacgctacgattgctgatgcaagtggggtcattctcaacataggcagctcctgcaattaaattttgtcactaatatagttgccgtggtcatcgataatggtcagataccagttatttgcattattacttttgacattaacactctgactttctaagggggcaatcataatagtttcataattgactttaacattattagctttgacatccgaaatcgtcacccaattagctgagtcatttttttatcaccaatccattgccactgcgatttaccagtaactttttaaaggtcgctttatttaccggagcaatacccgccggccggtaaataatttgattctgttttgcatcgcaaacttcagtgcattcttaccttcttgttctggactatttggtggaatatccagaacattcagataaaaaatgctttctttattagtgggcagtttattcggcataattntgatttttacttgctgcccggaatttgcccctatttttgccactggtggcgttaacatgaaaggaacctgaattttttctggtggtaacgacgtatcgccatcatcaatccacgcctgcagcagcgaagaacggtttccctggttcatcaactgcaccataacttctttattttctgccgggtaaataatgcgcgtcccgtagataacaattccggcatgtgcaggaaggaccatagaaaaaatgagtaaagataataatcctttcatcttaatgcctcttaaattaaaaagccgccatggggatagcggccatgtttattacctggagaaacttgcaattttatttattaatcctgcnccacacgcataaccagagaagataatacatcacctgattgcactgagttatctgtcagtttcaggtattttgctttaaacggaatagcatattgaccttccgctgttttataactctcaatattaaaaggtgcagaaacatccaggacatcgctgttatcacctaaatagagatagtaacccacagtatcgttgctactggctatcgccttatcgttaccagttattttatcgttggtaatcaacgagagttttacaccagcaacttctttcgggcagctaatttttaacatgctgctggttacaccgactgcatcatcataggtagaatatttagctttaccttcaaagacagtggttggtacagtcggcatattaatacttactgaatcaccacccgcttcgaatttacacggagattctgcaatattccctttaatagttaatgttccggtatcaacgtctgcagcaaatactccagcgctcataaaaaaagaagaaaagacagcgacagcaataattgaacgtttcataatatgttccttnntaaaatttatttttggttgttaagagtctgtatctcttggaaacaaatttctcacatcaaaaaagttgccgcaatgtaaacatattgttttattgatttaaaacaaattaaccattgcaatataaatacaacaaatacttaatagtannaaatannnatcgcatctattaattaatgtagatttatgtaaatggcattgttgatnnnannaaaaaaanncgaaatcatttatataaatgatttcggctttctaaatgcaattaaaatcaggttgccaaattaatcgtagcgatttaacacgattcgacgtttgctatcactacctgcaacaaccacttctgtcgttacacctttgacgggcgaagaaacctgatgacgggtatcgacattatacgttaactgaccacaatgctgttgaggttgactattaaccatagccatactgcatgttgggggactgatcctgccattaatcgttaatgtggcagtctctgaagagaacgcgggagaagccaatccataggcaagaaaaataattcctgacagccaatacttattcattgaacgttatccctgtagtaaaggttatgcctggatagaatgagtgcataacaaactatagctgtacatccactacacagcacgaaggatgataatgaagcattgcctgtacgatcaatcgactttgtagagtttcggacgaaggtccgcagaatattcgcagtattaaataagtgttcattaatgcggcaaaaacaaatacaccgcatcaatgtaacatctctgcggtgtatgaagaatcaccagaatggttaataggcgttagaccgcgcggaaggaaatctcgcctggaatgacttcaccctgccagtagagctgagctgcaacgcggtcagccagctggcggtagatagcggtaaattcgctctccggacggctgataaccgttggcgtgcctttatcgagatcctcacgtaaggaaatatgtaacggcatctgccccagcagttgtgtgtggtatttntctgccagtttctctgcaccaccggtaccaaaaatcggttcatggtgaccacagttactgcaaatatgcacactcatgttctcgacaataccgagcaccggaacctcgactttctcgaacatcacaatgccttttttcgcatcgatcaacgcgatgtcctgcggggtggtgaccacgactgcaccagttactggaatgttttgcgccagcgtcaattgaatgtcaccggtgcctggcggcatatcaagcaccagatagtcgagatccggccacaaggtttcctgcaacatctgcattaacgccttgctcgccatcggtccacgccacaccatcgcattgtcgtcagtgaccagataaccaattgaattggttgccaggccatgagacataatcggtgccatatgggtaccgtccggcgaagttggacg

SEQ ID NO: 1112 - DNA, 2105 bp, Escherichia coli
  Strain O55:H7
  modified_base (121)..(124): a, c, g or t
  modified_base (641)..(641): a, c, g or t
  modified_base (1115)..(1115): a, c, g or t
  modified_base (2032)..(2032): a, c, g or t
tctgcgcccagcatggtgggaattgatgggccgtagatatcggcgtccagaatgccgactttcgccccttccgccgccagtgccagcgccaggtttaccgccgtggaggatttacccacgnnnnctttaccggaactgaccgcaatgatgttcttcacgccattaatacccggctgattcttcacgcgttttaaggtggcgatattgtgcgacagtttccagtcgatagctttcgccccggtgatacgcagcagttcggcgctacattgctcttttaactcttcaaacgcgctatgccagacgaatggcataaccagttccacatgcaacgtgtcgtccatccaggcgacatggtgcaacgctttcagcgtggtgaggttatgcttcagggttgggtgctgaaaattggccagtgtcccggcgaccattgcgcgcaaggcttctggtgatttggcctgggattgttcgttcatcccgactccttttttgtatagataaaccatcagctgatagtttacctgaagaatatagagaagtacttacttaacattttcccatttggtactatctaaccccttttcactattaagaagtaatgcctactatgactcaagtcgcgaagaaaattctggtgacgtgcncactgccgtacgctaacggctcaatccacctcggccatatgctggagcacatccaggctgatgtctgggtccgttaccagcgaatgcgcggccacgaggtcaacttcatctgcgccgacgatgcccacggtacaccgatcatgctgaaagctcagcagcttggtatcaccccggagcagatgattggcgaaatgagtcaggagcatcagactgatttcgcaggctttaacatcagctatgacaactatcactcgacgcacagcgaagagaaccgccagttgtctgagcttatctatactcgcctgaaagaaaacggttttattaaaaaccgcaccatctctcagctgtacgatccggaaaaaggcatgttcctgccggaccgttttgtgaaaggcacctgcccgaaatgtaaatccccggatcaatacggcgataactgcgaagtctgcggcgcgacctacagcccgactgaantgatcgagccgaaatcggtggtttctggcgctacgccggtaatgcgtgattctgaacacttcttctttgatctgccctctttcagcgaaatgttgcaggcatggacccgcagcggtgcgttgcaggagcaggtggcaaataaaatgcaggagtggtttgaatccggcctgcaacagtgggatatctcccgcgacgcgccgtacttcggttttgaaattccgaacgcgccgggtaaatatttctacgtctggctagatgcgccgattggctatatgggttctttcaagaatctgtgcgacaagcgcggcgacagcgtaagcttcgatgaatactggaagaaagactccaccgccgagctgtaccacttcatcggtaaagatattgtttacttccacagcctgttctggcctgcaatgctggaaggcagcaacttccgcaagccgaccaacttgtttgttcacggctatgtgacagtgaacggtgcgaagatgtccaagtctcgcggtacctttattaaagccagcacctggctgaatcattttgacgccgacagcctgcgttactactacactgcgaaactctcttcgcgcattgatgatatcgatctcaacctggaagatttcgttcagcgcgtgaatgccgatatcgttaacaaagtggttaacctggcctctcgtaatgcgggctttatcaacaagcgttttgacggcgtgctggcaagcgaactggctgacccgcagttgtacaaaaccttcactgatgccgctgaagtgattggtgaagcgtgggaaagccgcgaatttggtaaagcagtacgcgaaattatggcgctggctgatctggctaaccgctatgtcgatgaacaggctccgtgggtggtggcgaaacaggaaggccgcgatgccgacctgcaggcnatttgctcgatgggcatcaacctgttccgcgtgctgatgacctacctgaaaccggtactgccgaaactgactg

SEQ ID NO: 1113 - DNA, 2001 bp, Escherichia coli
  Strain O55:H7
  modified_base (1966)..(1966): a, c, g or t
cagaagcattcctcaatacagaactgacctgggatggtatccagcaaccgctgttgggccataaagtgaatccgtttaaggcgctgtataaccgcatcgatatgaaacaggttgaagcactggtggaagcatctaaagaagaagtgaaagccgctgccgcgccggtaactggcccgctggcagacgatccgattcaggaaaccatcacctttgacgacttcgctaaagttgacctgcgcgtggcgctgattgaaaacgcagagtttgttgaaggttctgacaaactgctgcgcctgacgctggatctcggcggtgaaaaacgcaatgtcttctccggcattcgttctgcctacccggatccgcaggcactgattggtcgtcacaccattatggtggctaacctggcaccacgtaaaatgcgcttcggtatctctgaaggcatggtgatggctgccggtcctggcgggaaagatattttcctgctaagcccggatgccggtgctaaaccgggtcatcaggtgaaataatctcctttcaaggcgctgtatcgacagcgccttttctttataaattcctaaagttgttttcttgcgattttgtctctctctaacccgcataaatactggtagcatctgcattcaactggataaaattacagggatgcagaatgagacactttatctatcaggacgaaaaatcacataaattctgggcggttgagcagcagggaaacgagctgcatatcaactggggcaaagtcggcactaacgggcaaagccagataaaaagttttgcggatgctgcggcagcggcaaaagcggagcttaagctgatcgcagagaaaacgaaaaaaggctatgtggaaaatgcttcagcaaacgtgcatatcccccccattaccaaagccactcctgaagttgaaacttcccctgagagtaaaaaccaacgcccctggctggctgatgatgcggtcatcggctaactgacgatattaatcgatttgcttttcctcatcgctctcgccccagagagatcaattatctgcgcaaagacggtgagatatggaagcgtattgcagataacactagggcatatgatcccgacaacaattaccgctcttatccagaaaactggcagcaggcttttgctgagttacaaatgcgagttcagggtaatcaacagacaggaagtgcgcaatctgatgcggcattgctctggagtttctggaactcttactctacagatgaactggtcgatgacttagtcattcgctgtggtctggaaagtgccgttgaaatcgcccttctcgctcttcaacttagatataaaccagtaaaaggcgcagtaaccaccaccattccacctaatcacaaagcagaatcgctacctagttggcatcaacgtctatgtcatcatctttcactcgcttcagaagatgagtggcaacgctgtgtagataaagtactcgcggctattccctcgctatccccagcacgggaaccttttgcggcgttactgctccctgaacgcccggatattgccaatgctatggcgctacgttatgcagaccaaaacgttccggcgatcacctggttaagtatgatggtaagcgatgatgttgccctggccatccaggaaaaatatggtttcccaccgctatataatgatttccgcaaatatctggctacgttgctggcaaataatggaatgcgtggtgtaagccggattcttctcaagctacctgtcgactatcccgtaaaatacacggaccttttcactcacatacacgccaatgctgaagatcttgtcaaatggctatggaaaacgaatcacccggatgcgattcaaattctgatcctcggtgtaaatggcaagaaaaagcacctggaatacttaagcaaagcctgccaaaaacatcccgctgcggctattgccgcttatgctactttgctggcaatacatgaanataatgagtggcgtaaagcgcttgtcaaactgatt

SEQ ID NO: 1114 - DNA, 6638 bp, Escherichia coli
  Strain O55:H7
  modified_base (43)..(44): a, c, g or t
  modified_base (48)..(49): a, c, g or t
  modified_base (519)..(519): a, c, g or t
  modified_base (1450)..(1450): a, c, g or t
  modified_base (3118)..(3118): a, c, g or t
  modified_base (3977)..(3977): a, c, g or t
  modified_base (5212)..(5212): a, c, g or t
  modified_base (5242)..(5242): a, c, g or t
  modified_base (5471)..(5471): a, c, g or t
  modified_base (6411)..(6411): a, c, g or t
  modified_base (6415)..(6416): a, c, g or t
  modified_base (6422)..(6423): a, c, g or t
  modified_base (6488)..(6488): a, c, g or t
  modified_base (6492)..(6493): a, c, g or t
  modified_base (6495)..(6496): a, c, g or t
  modified_base (6500)..(6503): a, c, g or t
  modified_base (6593)..(6596): a, c, g or t
  modified_base (6632)..(6632): a, c, g or t
  modified_base (6635)..(6635): a, c, g or t
attgccgcttatgctactttgctggcaatacatgaaaataatnngtgnngtaaagcgcttgtcaaactgattactgccacgccagagttagtatgcgaggtcattccctgggttaatgctaaggcggcaggcatcttatctgaatgtcgtccgctgccagtagctgaagaatgtgaatatgccactgtggatatgttgccggagctgcttgtcgctccaccgtgggtaataaataagaaaaagaatgtcatacccgtatttgatttaccggtacttcccattcctgccgtcacggatatcacaccaggaattacagagttaatcagtcatactgacatatccagattcagtgaaatcgcgcaatatcaggcatcacagcaaaccttatttaccgatctgccactaattgaaaaagaaagctgggagacatctttcattccttttacaccagaacaacaaatcctttggcaattaggttttaatgaatggctgcattgcgaaaatgacttacatgaaaanaaatatataccgcaaagcgctgttgatgccttgttacgctttgattttccagcactaaaagctgagtttgcgaaatatcacaacaatgccaacaaaagctggaatctatctgcgctttgttacttaccgggacaacaggcgatttcatttctcaaccaaataatcattgaggagcgatattcaggtgagaaagagattctggcggtttttggtagtacggccattcctgcgtttatgacctgcttgcaacgagatcatcaacgcctgtggatattcaccctttttattggagccagtgaactagccttaccaatggcgcagcggttacagaaaaaaatagcttacaaggatgccgttaattggctggcaaataacccgcgccatgccgccgccgggctactgcctttggcgctgggcaaaccgtgccaaaatcgggaatatgcccgccaggcactcctcctgctagtgaaattaaaccagcgagaaacgattgaggaaatcgcccaatgatataatcaacctgatgttttagctgcgctggcaacattatttgatagcgacccactggaagaatatcctgcaaaaatcgccccactgcccggcttttatcagttccccttatggcgcagacctcggcttaaaagtaacaacctgcctctgccagatgacgctatgcgccacctcggcacaatgttgagctttccacgcgacattacctcctacgctgggctggcgatcatcaaagagaccttcacccgcgaatcactggctgactttggctgggatctctacacggcatggacagaagcaggcgcacccgcaaaagagaactgggcatttacctcgctggggattctaggcaatgacaacaccgcgcgtaaactaaccccgctcatccgcgcctggccgggtgaatcccagcataaacgcncggtttacgggctggatgtgttagccagtatcggtagcgacattgcgcttatgttgcttaatggcattgcgcaaaagattaaattcgttgcattacaggaacatgccagcgacagaatcaatatggtcgccgaaaatcgcggactgacaatggccgaactggaagatcgcctggcgccggatttagggcttgatagcagtggctcgctgatactggatttcggcccccgcaaattcaccgttggttttgacgaaaccttaaaacctgtagtgtgcgatgcaaacggcaaagtcctgaaagatttacctaagccaaaccagagcgatgataaaacactggcaactgacgcagttaatctcttcaaacagttgaaaaaagatgttcgtgctatcgccagccagcaaattacccgtctggaacaggctatgtgccagcgcagacgctggacggcagagcagttccgcctgtttctggtggagcatccgctggtacgtcacttaacccgacggctgttatggggggtttataacgatgaaaacgcccttatcacctgttttcgcgtggcagaagacagcacttacagcgatgcgcaggatgagttattcacgctgccagcaggaaacatcggtataccgcatgtgctggaaatcccccctgaatccgccgctgcattcaggcaaatttacgttgattacgaactgcttccccctttccaacagctcgaacgtggtagttaccaccttgctgataacgaacgtaatgtccatgaattgtcacgctggaacggacgtctctgccaggccggacgcattgtcgggctggaacgcagaggctggcaacgtctggaagaaagcggcagcgtctatgtgatgcgcaaatctaccccttatggtgctctcgaacttgaaacagaacctttttcattaatttatggcgaaacggggtatagcgacctgctgcctgtcgaaagcgtaaaaatcaccgccccttatgatcgctatggtaaacaatcctcacccactttctccgtgctcgacgacatcaccgccagcgagctgattaacgacattgaatcactgtttgattaaaaggatttagcaatgaaaacctatatttatcaggacgaaaaatcacataaattctgggcggtggagcagcagagaaacgagatgcatatcaactggggcaaagtcggcactaacgggcaaagtcaggtaaaaagctttgctgatgctgcggcggcagaaaaagcggaactgaagctgattgcggagaaggtgaagaaggggtatgtggagcaagtagacgctaacgctcactcacatgatgtctcagcaaagaaagtcctggtcacagaggaaaaagcctcaataaatcaccaggcagcaactaatggtttaccctggctggcagacaacgatcacattattcttcccccgaatattgcccgccatgccctcagccaccgcctttggccgggagagccagtaaaaaaaccaaccaaacccgagaaacaaaatttaatttcccgattggcaaatcgtacttatcattattataaaaatctgactttcgattacagctcatgctctgatgaatgggctgatgcgattagccaggcaatcagcttaattaaggcccaaaagactgagatacccgcgcgtactntggcggtacttacttttctggaaatatgtttttgtcagggctggaatgatgaaacctcatccgagttgctggatgaaattgtaagcaccttcggtatcgaatacgcaactgaaactgtcatcttctggtggcaaattgatttcgattttgactataaagatgaacatttgactttctttattaattatgcagatagcagcaaggacagttatagaaggaataacgacaaatttagtttacgtctgcgtaaacatttatcactagcagaagaagaagtatggcaaaattgcattgcaaaattactcgttgcgttaccagatatatcactctatcgccaaccgttaattgccattttaatgccagaaatacccgaagtggcccatgagatcgtacatcgtttacaccaggtcgcagatgttccacaacttgaaatgttgaaactggtagcgacagatccattcacgctcgaaatactggagaactatcaatacattgatgtatttaacacctatggtgccagttggtcagctacggtattacgggaacaaggtatagcggcactggctcgcctggcttcctatgctgaagaagataattgcggtgacgtactgaaatgtattaatcatccgttggccattacggcactcatcgaagccgccgatactaataaacgctgttatgaacgactaataaaaaatgccgaaaattttccttctgccacgatagcggcattagccgaagcattggtaaaaaaagatgataaacgcaaacatacgttgctggtttcattacttaatgcaaatcctttattggtcgaaaaattagtcatcggattatcgtcgcaagcggcaaatttatngcaacaatgtcagcaattgctgaatagtcgcaatgaagattttgcaaactcagaaattctaccaatggtactagtctcgccgccctgggaaactcaaaataaaaataacgacaacagtcctgtgggtaaatacccggcgaaaatcccccctttaccgttgttttatcaacctccattatggactcgcccaaaactcaaaaatagcagcaaggtactgccagataacgccctcctccacctcggtgaaatgctccgcttccctcaggaagaggcgctgtatccgggattattgcaggtgaaagatgcctgtaccgccgactcactggctgaatttgcctgggatctgtttaccgcctggctgactacgggtgcaccatcgaaagaaagctgggcgttcactgcgttaggtgttctcggtaacgacgacaccgctcgcaaactgacgccattaatacgcgcctggcctggcgaatctcagcataaacgcgccaccgttgggttggatattctcgccgctatcggtagtgatatcgctctgatgcagcttaacggcattgctcagaaactgaaattcaaagctttacaggagcgggcgaaagagaaaattgccgacattgctgaaagtcgcgaactgacagtggaggagcttgaagatcggttagcaccggatctcagtctggatgataacggttcgttgctgctggatttcggcccacgccagttcaccgtcagctttgatgaaaccttaaaactgtttgtgcgtgacgcttccggcagccgtctgaaagacctgcccaaaccaaacaaaagcgatgatgaatcacaggcgaacgatgctgttaaccgctacaaactactgaaaaaagatgcgcgtaccgtcgccgcccagcaggtagcaaggttggaatccgccatgtgcctgcgtcgccgctggtcgccagaaaactttcagctcttcctggttgaacatccactggtacgccacttaacccgccgtctgatttggggcgtttatagcaccgaaaaccagctactgacgtgcttccgcgtggcggaagataacagctacagcaccgctgacgatgatcttttcaccctgccggaaggcgatatctctgttggcattcctcacgttctggaaatatcaccgacggatgctgccgcctttggtcagctttttgccgactatgaactgctaccaccgttccgtcagcttgaccgtaacagttacgccntgacagaagccgagcgcaacgccagcgaantgacccgctgggcaggcagaaaatgcccgagcggtcgggtcatggggctggcgaataaaggctggataaagggcaccccgcaggatggaggctggatcggctggatgatcaaacctctgggccgctggtcgttaatcatggaaatcgatgaaggttttgcggtaggcatgtcgccagccgaactgagtgccgagcaaatcttaagcaagctgtggctatgggaaggcancgcagaaagctatggctgggggagtaattcaacacaggaagcgcagttctccgtactcgatgccatcaccgccagcgagataattaacgatattgaagccctgtttgaataaggaaagagcatggacaaggaattaccgtggctggcggataacgcccaactggaactgaaatataaaaaaggcaaaacgccgctcagtcatcgtcgctggccgggcgaaccagtgtccgttatcactggaagtctcatccagacattgggagatgaattactacaacaagcaggccagaaggaaaatatcacctggaattatgataaatgctcactggagtggcagtccgccatccagcaggcaatcaatttgactggcgagcataaaccgtcaatcccagcccttaccatggcggctctgatctgtatcgcgcaaaatgacagccagcagttacttgatgaaatcgtgcaacaagaggggctggaatatgcgacggatgtagtgatatcgcgtcagtgcattgcgcggcgttatgagagtgactcactggtcgtcactttgcagtatcaggacgaggactatggctacggttatggctccgcgacctataacgatttcgatctccgtttgcgtaagcatctgtcgctggcagaggaaagttgctggcagcgttgtgccgataaactcattgccgcactgccaggaatacccaaaattcgccgtccttttattgcgctgatcctcccggaaaagcctgaaatagccaatgaactcgccagtcttgaaagctcccggtcaagtctccattcaaaggagtggttaaaggtcgttgctactgataatacggcggtaaaaaaactcgaacgatactggggcctggacgtatttagcgatcgcgaagccagctacatgtcacaaaaaaaccacttcggctacgcggcctgcgcngccnntttgcnnaaacaaggactggcagccattccgcgcctcgcgatgtatgcccataaagaagattgcggcagtcngttnntnnaaannnnccatccgcaggtcatccacaccttgctactggtggctgataaaaacaaacccagcctgcaacgtgtggctaaatacagtaaaaacttccnnnncgcgacgctcgcggcactggcagaactgctggcgtnaanaga

SEQ ID NO: 1115 - DNA, 198 bp, Escherichia coli
  Strain O55:H7
cctggttatccaatcatcgaagacaaaaagctgcctgcccagcaaaaagcacgcgatgaatactggcgtacgctgttacaaacgctgatggcatcgcagccacaactggcagaagaggtgatgcagtggttaagtactcaagcccgggcagtactgaatagttatttattggcaccgcccaaaccggttattgatggc

SEQ ID NO: 1116 - DNA, 63 bp, Escherichia coli
  Strain O55:H7
  modified_base (2)..(3): a, c, g or t
  modified_base (57)..(58): a, c, g or t
cnntaaagaagattgcggcagtctgttggtacaaattaaccatccgcaggtcatccnnacctt

SEQ ID NO: 1117 - DNA, 23 bp, Escherichia coli
  Strain O55:H7
  modified_base (11)..(12): a, c, g or t
  modified_base (15)..(16): a, c, g or t
caaacccagcnngcnncgtgtgg

SEQ ID NO: 1118 - DNA, 93 bp, Escherichia coli
  Strain O55:H7
  modified_base (2)..(3): a, c, g or t
  modified_base (7)..(8): a, c, g or t
  modified_base (23)..(24): a, c, g or t
  modified_base (30)..(31): a, c, g or t
  modified_base (44)..(46): a, c, g or t
cnncgcnncgctcgcggcactgnnagaacnnctggcgttaaaannnccaccagcccgccctggttatccaatcatcgaagacaaaaagctgcc

SEQ ID NO: 1119 - DNA, 23 bp, Escherichia coli
  Strain O55:H7
  modified_base (7)..(7): a, c, g or t
acgctgntggcatcgcagccaca

SEQ ID NO: 1120 - DNA, 2133 bp, Escherichia coli
  Strain O55:H7
  modified_base (752)..(752): a, c, g or t
  modified_base (1924)..(1927): a, c, g or t
ccggttattgatggcaccgataacagcaatctgcctgaaatcctcgtttcaccaccgtggcgtagtaagaaaaaaatgacagctccacgtcttgatttggcaccgctcgaattaaccccgcaagtttactggcaaccaggcgaacaagagaggcttgcctccactgagtctgcccgttatttcagcacggaatctcttgcgcaacgcatggaacaaaaaagtggacgagttgtattacaggaactgggttttggggatgatgtatggctgtttctgaattatatactccccggaaaactggatgctgcacgcaattcactcattgttcagtggcattactaccaggggcgggttgaagagatcctgaatggctggaactccccggaagcacaattagcagaacaggcgctccgcagcggtcacatagaagcgttaattaacatatgggaaaatgacaactactcacgttatcgtccggaaaagagtgtctggaacctgtatttattggcacagttgccgcgtgagatggctttgaccttctggctgcgtatcaatgagaaaaaacatctgttcgcgggtgaggactattttctcagtatcctcgggttggatgcgctaccaggtctgatgttggctttttcacatcgtccaaaagaaacatttccgttaattttaaattttggcgcaacagaactggccctgcccgttgcccgcgtctggcgacgtttcgcggtgcagcgtgatctggctcnccagtggattttacaatggccggaacatacggctactgcacttatccctcttgtctttaccaaacccagcgataatagcgaagccgcattacttgccctgcgtttactgtacgaacagggacatggcgagttgctgcaaaccgtggcaaaccgctggcaacgcgctgatgtatggcctgccctggagcagttgcttaaacagggtccaatggacatttacccggcacgcattccaaaagcccctgatttctggcatccggcaatgtggcccaggccgcgacttatcactaataatcagcctgttaccgatgacgctctggaaattatcggcgaaatgctgcgctttacccaggggggacgtttttatagcgggctggaacaactgaaaacgttctgccagccacaaacgctggccgcttttgcctgggatctcttcactgcgtggcaacaagctggtgcccccgcaaaagacaactgggcatttctggcgttaagtctctttggtgacgaaagcacggctcgggatctgacgacacagatcctcgcctggccacaagaaggcaaatctgcccgtgctgtcattggtctgaatatacttaccttgatgaataatgatatggcgctgatacagctgcatcatgtatcacaacgggcgaaatcctcttcattacgtgaaaacgcagcggaatttcttcaggtggtcgcagaaaatcgcgggctaagccaggaagagctagcggacagattagtcccaaccctggaccttgatgatccgcaggcgttaagttttgattttggtccccggcattttaccgttcgcttcgatgaaaaccttaacccggttatctttgatcagcaaaacgttcgccagaaaagcgttccccggttgcgcgccgatgacgatcaactgaaagcgcccgaggcactggcccgactaaaagggctaaaaaaagatgctactcaggtgagcaaaaacctgctcccgcgtcttgaagctgccctacgtaccacccgacgctggtcgctggcagattttcattctctgtttgttaatcatccccttacccgcctggttacccagcgattaatatggggggtttatccggcaaatgaaccgcgtcgtttactcaacgcctttcgtgtggccgcagagggggagttctgcaatgcgnnnnatgagcccattgaccttcctgcggatgctctgattggcattgcccacccgttagaaatggcagcagaaatgcgcagtgaatttgcacagctttttgccgattacgaaattatgccgccttttcgccagttgtcgcgccgcacggtgctgctcacacctgacgagtcaaccagtaacagcctgactcgctgggaaggtaaatccgct

SEQ ID NO: 1121 - DNA, 1875 bp, Escherichia coli
  Strain O55:H7
  modified_base (182)..(185): a, c, g or t
  modified_base (252)..(252): a, c, g or t
  modified_base (846)..(847): a, c, g or t
  modified_base (1418)..(1418): a, c, g or t
tgggcaacttatgggaatgcgatacaaaggctgggagtcaggctatgaggacgcatttgtctatgacctgggtgagtaccggctggtccttaagttttcacccggttttaaccactacaatgttgatagcaaagcgctaatgagcttccgttctcttcgagtgtaccgtgacaataaatccnnnncttttgccgaacttgatgtgtttgatttgagtgaggcgttaagcgcacctgacgtcattttccattnaaaacacagcgggcagtgatgcaactgcccgttattaacacgacttaccagcggggaaagcgatgatcgtgcaaaaagagctggttgctatttacgattatgaggtccctgtacctgaagatccgttttccttcagacttgagatccataaatgctctgaattatttacaggttccgtctatcgactggagcgattccggctacatccaacatttcatcaacgtgatcgagaagatgctgacccgctaataaatgatgcgttgatttatataagagatgagtgtattgatgagcggaaattacgaggtgaatcacctgaaactgtaatagcaatttttaatcgtgaactacagaatatattcaaccaagaaatagaataatatactctagataattcaagtcgcagcacatgcaacttgaaatatgacgagtatagctttattaaagggggaagcggttttcccccttagatgcgtttcaatttgcccgttacttcaacaaatcaatcaaccgtaacagagctactaatagctccagtacagcaatgagcacggttaacttttgtgtcagcgtgtccatccgctctccttattnnggagcgcaacaccagcaccttacccttacactgcctgtcgatactggtttacgtatgttggaccacgatgttgcactccggatcagggcaccacctgcagcacccccgtccggtagccaggacttgaaataggttcgatccggcgcaacgtcccaacagtcaggattataaatctcattatcttaattgcaacggggtccagccgtggttataattcgttcgttggaacacgatgttgcacaggctgtggtgttaggcctgaaaatagtaaataaaagaacctgcctcaccagcagttttttttatttactgtgatctgcttcccagatatttttcgctcaaacaactaatgcgccaaacatttattgcgcgtaaaatatcgtttatttcattaatacatttcagggatgaatatatgtcaccgcagaataatcatctgcagcgtccgcctgctgctgtgttatacgccgatgaactggcaaaattaaaacaaaatgataacgcaccttgcccgcccggttggcagttaagtttgcctgcggcccgtgcttttatccttggcgatagcgcncaaaatattagccgtaaagtggtgattagtccctccgctgtcgaacgtatgttagtcactcttgccaccggacgcggtttgatgttggtgggggaacctggcaccgcaaaatctctcctgtctgaattactggcaacctctattagcggcgatgccgggttaaccatccagggcggcgcatctactaccgaagatcaaatcaagtacggctggaactacgccctgcttatcaatcatggtccatcaacggaagcgctggtccctgccccgctttaccagggaatgcgcgacggcaaaatcgtccgttttgaagagataacgcgtacaccgctggaagtgcaagactgtctgttaggtatgctttctgacagggtgatgacggtgccggaactcactggtgaagccagtcagctctatgcgcgagaaggctttaatattattgccactgccaataccc

SEQ ID NO: 1122 - DNA, 8871 bp, Escherichia coli
  Strain O55:H7
  modified_base (695)..(698): a, c, g or t
  modified_base (1581)..(1581): a, c, g or t
  modified_base (1644)..(1644): a, c, g or t
  modified_base (4637)..(4640): a, c, g or t
  modified_base (5154)..(5157): a, c, g or t
  modified_base (5756)..(5756): a, c, g or t
  modified_base (5829)..(5830): a, c, g or t
  modified_base (8077)..(8080): a, c, g or t
  modified_base (8115)..(8118): a, c, g or t
  modified_base (8476)..(8477): a, c, g or t
  modified_base (8824)..(8824): a, c, g or t
  modified_base (8850)..(8850): a, c, g or t
cgcggcgtcaatgaaatgagtgctgcgctaaagcgtcgcttcgattttgaaactgtctttccgattatggatttcgcccaggagctggagcttgtcgccagtgcttcggcgcgtttgctggcccatagcggtattccgcataaagtgcctgacgcggtactggagttactggtccgcaccttccgcgatctgcgtgccaacggcgaaaagaaaacgtcaatggatacactaacagcgattatgtccaccgctgaagccgtgaacgtggcccacgctgtgggcgtccgcgcctggtttttagcgaatcgcgcgggggagcctgccgacctagtggactgtattgccggaaccatcgtcaaagataacgaagaagatcgcgctcgtctgcgccgttacttcgaacagcgtgtcgccacacataaagaagctcactggcaggcttattatcaagcccgccaccgcctgccgtgaggaaagatgcatgagcgagccgttaattgtcggcatccggcatcatagtccggcctgcgcccgactggtgaaatcgttaatcgaaagccagcgaccacgatacgtgttgattgaaggcccggctgattttaatgaccgggtagatgaactgtttttagcccaccagcttccggtggctatttacagttattgccagtatcaggacggtgctgctcctgggcgcnnnncctggacgccatttgccgaattttcgccggagtggcaggcgctacaagccgcacgtcatattcaggcacaaacttactttatcgatttgccttgctgggcgcagagtgaagaagaggacgattcgcctgatacgcaagaggaaagccaggccttgctgctgcgtgccacccgcatggataacagcgataccctgtgggatcacttgttcgaagatgaaagccagcaaactgcattaccctctgcactggcgcactattttgcccaactgcggggcgatttccccggcgatgcactcaatcgtcagcgcgaagcctttatggctcgctggattgcatgggcggtgcagcaaaataatggcgacgtgttagtcgtctgcggtggctggcacgctccggcactggcaaaaatgtggcgcgaatgcccgcaggacattaacaagccagaattgccctcgctggcagatgccgttacaggttgttatctcacaccctacagtgaaaagcgccttgatgtgctggcaggatacctttcaggaatgcctgccccggtctggcaaagctggtgctggcagtggggcttacagcaggcgggagaacaactgctaaaaacggttcttacccgtttgcgccaacaccacttgcctgcttcgaccgcggatatggctgccgctcatctgcatgcgatggcgctggcacagttgcgcggatataaactaccgttacgcactgactggctggatgccatagcaggctcgctgattaaagaagccctgaacgcgccgttgccgtggagctatcgcggcgttattcatcccgataccgatccgattctgctaacgttgatagacacattagcgggtgacggattcggtaaacttgcccnttctacgccacaaccgcctctgccaaaagatgtcacctgcgaactggaacgtaccgcaatctntctttcggcggagcttaccttaaatcgctttaaccccaatggactagcgcaaagtcaggtgttacatcggctggcaatactggagatcccagggattgtacgccagcagggaagcacactgacacttgcaggcaacggtgaagaacgctggaaattaacccgcccgcttagccagcatgcggcattgattgaggccgcctgctttggtgccacactccaggaagccgcacgccataaattagaagccgatatgctggacgcgggtggaatcggcagtatcaccacatgtcttagccaggcggcgttagcgggtctggcgtccttcagtcaacaattactggagcaactcacattattaatcgcccaggaaaatcaatttgccgaaatgggcccggcgctggaagtgctatatgccttatggcggctggatgaaattagcggtatgcaaggtgcgcagatatcacaaacgacgttatgcgcggctatcgatcgcacgctgtggctgtgtgaatctaacggcagaccggatgaaaaggagtttcacgctcacctgcatagctggcaagcgctttgccatattctgcgcgatctacatagcggcgttaatttacccggcgtttctctttctgcggcggtagccttactggagcgacgcagtcaggcaatccatgccccggcgctggatcgcggcgcggctcttggcgcactgatgcgtctggaacatcccaacgctagtgccgaagcggcgctgacgatgctggcgcagttatccccggcacaatccggcgaagcgctgcacggtttgctggcgctggcccgccatcaactggcctgtcagccggcatttatcgccggtttcagcagtcatttaaatcaactaagtgatgccgattttatcaatgccctgcccgatttacgcgcggcgatggcctggctaccgccacgagaacgcgggacgctggcgcatcaggtgcttgaacattatcaactggcgcaacttcccgtttcggcgctgcaaatgccgttgcattgcccaccacaagccattgcacatcatcaacaactcgaacagcaggcactggcatcgctgcaaaactggggagttttccatgtctgaactgaacgatcttctgaccacccgtgagctacaacgctggcgattaattcttggcgaagcggcagaaacgacgctttgtgggctggatgacaacgcccggcagatagaccacgcgctggagtggctgtatgggcgcgatcctgaacggctccagcgtggtgaacgctccagtggattaggtggctcaaatctcaccacccctgagtggatcaacagtattcacacgctgtttccgcaacaggtgattgagcggctggaaagcgatgccgtactgcgctacggcattgaagatgtggtgacgaatctcgacgtgctggaacgtatgcagccttctgaaagcctgctacgcgccgttttgcacaccaaacatctgatgaaccccgaagtactggctgccgcccgccggatagtgcgccaggttgttgaagaaattatggctcgactggcaaaggaagttcgtcaggctttttctggtgtccgcgatcgccgtcgccgctcatctattccactggcgcgagactttgatttcaaaagtactcttcgcgccaatctgcaacactggcacccgcaacacggcaagttgtatatcgaatccccccgctttaacagccgaattaagcgccacagtgaacaatggcaactggtcttactggttgatctaagcggatcgatggtcgattcggtgatccactctgcggtaatggcggcctgtttgtggcagttacccggcattcgtacccatctggtggcgtttgacaccagtgtcgttgatctcacggcagacgttgccgatccggtagagttattaatgaaagtacagttgggcggcgggaccaatatcgccagtgccgtggagtatgggcggcaacttattgaacaaccagcaaaaagcgtcattatcctcgtgagtgatttttatgaagggggttcatcatcattgctgacgcatcaggtgaaaaagtgtgtccagagcggcatcaaagtgctggggctggcagcgctcgacagcaccgcaacgccttgctatgaccgcgatatggcccaggcgctggttaatgttggcgcacaaatagccgcaatgacaccgggtgaactggctacctggcttgcggagaatttgcagtcatgaattcactacgtccggaattattagaactcacgccgcaggccctgacggcgttaagcaatgccggttttgttaagcgcagccttaaggaactggaaaatggcaacgtcccggaaatcagccatgagaacggcgctttaatcgccaccttcagtgacggtgtccgtacccagctggcgaacggccaggcactgaaagaggctcagtgcacctgcggggctagcggcatgtgccgtcatcgcgtgatgctggtgttaagttatcagcgactttgtgccaccacccggcccacggaaaaagaagaagagtggcagcctgcaatctggctggaagaactggctaccctgcccgatgccacccgcaaacgtgcacaggtgctggtcgctaaaggcatcaccattgagttgttctgtgcgcctggcgaaattccctcagcccgcttaccgatgagtgatgtgcgtttttattcccgcagcagcattcgcttcgcccgctgtgattgtattgaaggcacactttgcgaacatgtcgtactggctgtgcaggccttcgtcgaggccaaaactcagcaagcggaatttactcatttaatctggcagatgcgcagcgaacacgtcacatcatctgacgacccgtttgccagcgaagaaggcaacgcgtgtcgtcaatatgttcagcaattaagccaggcattatggcttggcggcatcagccagccgcttattcactacgaggccgctttcagccgcnnnnagcaagcggcggaacgctgcaactggcgctgggtgagtgaatcgctacggcaactgcgcgccagcgttgatgccttccacgcccgcgccagccactatcatgcaggagaatgcttacgtcagcttgcggcattaaacagtcgattaaattgcgcacaagagatggcccggcgcgacagtgttggtgaagttcctcctgtgccgtggcgcacggtcgttggctctggcattgccggagaagcaaagcttgatcatctgcggctggtgtctttaggtatgcgttgctggcaggatattgagcattatggtttacgcatctggtttaccgatcccgacaccggcagtattttgcacctttcgcgcagttggccgcgaagtgaacaggaaaactcaccggcagctacgcgtcggctgtttagttttcaggctggcgcactggcgggtgggcaaattgtttcacaagcagcaaaacgcagtgccgatggcgagctgctgttagctacccgcaaccgctnnnncagcgttgtgccgctgtcgcctgatgcctggcgaatgttgagcgcgccgttacgccagccgggcattgtggctttgcgggaatatttacgccagcgtcccccctcctgcatacggcctcttaatcaggtcgataacttatttattctgccggtcgctgagtgtatttcgctcggttgggatagcagccgccagacgctggatgcgcaggtaatcagcggcgaaggtgaagataatctgctgacgttatcactgccagcctcagccagcgcgccttatgccgttgaacgcatggcggcgcttttgcaacaaacagacgaccccgtgtgtctggtttctggctttgtcagttttgttgatgggcaattgacactggaaccacaggtaatgatgacaaagactcgtgcctgggcgctggacgcagaaactgcgcctgtggtggcatcactaccttctgccagcgttctgcctgtgccgtctactgctcatcagttgctgatgcgctgccaggcattacttattcaactgctccataacggctggcgctatcaggaacagagtgctattggtcaggcagagttgctggcgaatgacctcaccncggtgggtttttatcggctggcacatgtattgggacaatttcgtaatacagaaagcgaggcacgggtagaagnngtagaagcaatgaataacggtgttttgctgtgcgaacaattattccccctgcttcagcaacaaggatgaaatagtgctttttactaagagttctactccagttccggactgctcacgccacggtattaggcatatcctatatagcccctggtgagagtcaccagttccttgattaaataaaatggagttttacatgaaggctttcaataagctgttttcccttgttgttgcatctgttctggttttttctcttgctggctgcggtgacaaagaagaatcgaagaaattcagcgccaatctgaacggcactgaaattgccattacctatgtctacaaaggtgacaaggtgcttaagcaatcttctgaaaccaaaattcaatttgcctccattggtgctaccaccaaagaagatgctgccaagacacttgagccgttaagcgccaaatacaaaaacatcgcgggtgttgaagaaaaattaacctataccgatacctacgcgcaggaaaacgtgactatcgatatggaaaaagtggattttaaagccctgcagggtatttcaggaatcaacatttctgctgaagatgccaaaaaaggtatcactatggcgcaaatggaactggtgatgaaagccgctggttttaaagaagtgaaataatctgtcggcggccatgtttgcgcatggccgccatacccgtcttagcttttcttcacatgctggcgcgctgccagtccacgcagaaaataacgtaaaaattgatcgccgcattcgcggaagtttttatgatccggtgcacgcatcatcgccgtaatttccggcatcgaaacgcggaactgctgttcggtgaggatcgccagaatgtcatcggttttcagcgaaaacgcgatgcgtaattttttcagcacgatgttgttattaatgcgacgttccggctccagtgccggagcagactcatccttgccgcgtttttcataaatcaggccattgaggaatgacgacaaaacaatgtccggacaacgctgaaaaccctcttcgtcttctttacgtagccagacggcgatctgttccgcggtggcttcgacattacccagcgccagtatacgcaccaggtcattattattggctttcaaaatgtagcgcacgctgcgcagaatatcgttacttagcatgaggccttcaggtgttgatgaggcaaaaagccattttagcagtcttttacaggccaatcgcctcttttaagcttttcagataacggcggctgaccggcacggttaagccattacgcaaaatcaactcggcctgaccgttatcttccagacgaatctcctgtaaatgcgcgaggttaaccagatactgacgatggcagcgcagtagtggtgtacgactttccagggtacgtaatgtcaattcggtaaagccctctttcccttcgtggctggtaacgtagacaccgctcatccgactgctgacaaatgccacatctttcatttgcagcaaataaatccgactatgccccgtacaagggataaatttcagcgcctgttgattttccggtaacagcgaaacatcctgcttgctgcgctcctgacgcaatcgcgccagcgttttctccagtcgcgcttcatcaattggcttcagcagatagtcaaaggcatgttcttcaaaggctttaatagcgtattcgtcaaacgcggtgagaaaaacaatatacggacgatgttccgggtcgagcatccccaccatttccagaccactgatgcgcggcatctggatatcgagaaacagcacatccgggcgcagtttatgcaccgcgccgatcccttccacggcgtttgaacactcaccaacgatttcaatatcgctctgctcctgcaaaaatacgcgcaggttctcccgtgctaacggttcatcatcgacaattaagactttaatcatgcctcgtccctccatggtagtcgtaacgttattcgtgtgtaactatcaggctcacaggcgacgcttatcccatagtcatcgccaaaccgttcacgtaaacgcttatccaccagattcatccccagcccactggcattggttaccggttgatacaaaccggcattgtcttcgatctccagcatcaaatgttgcccctcacgtcgggcgctgattgccactcgccctgtatccagcagttgtgatgtcccatgtttaatggcgttttccactatcggttgcagggtaaacgcgggcaattgctgctgggataattnnnncggaatagcaatgttgacctgcaaccgcgactggnnnngcgccttttcaatttgcagataagcattcacatgttcaatttcgtcggcgagagtaacaaactccgaaggccgctttaagtttttgcggaaaaaagtggaaagatactgcaccagctggctggcctgttcgctgtcgcgacggatcaccgctttaatggtgttaagcgcattaaacaaaaaatgggggttcacctgggcgtgaagcagtttgatctctgactgggtgagcatcgctttttgccgctcatattgcccggcgaggatctgcgccgaaagcagttgcgcaatcccctcgcccagcgtgcggttgattgaactaaataaacggtttttggcttcatacaatttgatggtgcnnatcacccgctgattttcaccacgcaacggaattaccagcgtcgaccccagtttgcattgcggatgcaaagagcaacgataaggtacttcgttgccatcagcgtagaccacttcaccggtttcaatcgcttttaaagtataagttgaagaaatcggtttgccgggtaaatggtggtcgtcaccaattccggtaaaggccagcaatttctctcgatcggtaatcgcgactgcaccaatatccagctccagatacagcacctgagccactttcatgctgttcacttcgttaaacccctggcgcaaaatgccttccgtcgaggctgccactttcagcgcagtggcagaaanagccgaagtgtatttttcaaacatcncgcgtttatcgagcaatatac

SEQ ID NO: 1123 - DNA, 837 bp, Escherichia coli
  Strain O55:H7
  modified_base (469)..(472): a, c, g or t
  modified_base (677)..(677): a, c, g or t
acggtattggtgaccatcattggcgcagcaatattactcaccagacgcaccgcatcttcataaggtcgggcgatcgccaggatgatcagcatttgcaccatttcagcgacgaacgtgacggcaccagcggtaatggggttaaagactttatcagtgcgcccgcgacggatcaggatgctgtgtaccaggccgccgagcaatccttcaacgatggtcgagatcatgcaacttagcgcggtcatgccccccatcgaatatcgatgtaacccgccggtcaggccaaccagcccaccgacgaccggaccgccgagtaagccgcccattaccgcgcctatcgcacgggtattggcaatagaatcgtcaatgtgcaacccaaaccaggtgcccatgatgcagaagatggaaaagacgatgtagcagagaaatttatgcggcagacgaaccgtgacctgcattaacggtatgaatnnnngcgttttactcattaaccacgcaatgactaaaaaaacgcacatctgctgaagcagcagcaacaccagattaaaatcgtacatacccgcaaaccacacttccctttaaaacgcgtaacatacattgcctgcgtttaactttctttgaactcttgcagaaaaatgagaattcgtgagtacgatcactcaaaatcgcctggcaaaaanaaaatcaccctataaatgcacaaaaaacgggcaaaactacctggttcgcaaaactgcgtctaaagttaaaccgggacctcgcgagcaagggtgagacgatggcgctttacacaattggtgaagtggcgttgctttgtgatattaaccctgtcacgttacg

SEQ ID NO: 1124 - DNA, 98 bp, Escherichia coli
  Strain O55:H7
acgaagagcgtccaggagcgccgtttttcaagggttggatagatgattcgtttaccatgtcgacgaacttcgacgaatttcgccgataaaaagtgtcc

SEQ ID NO: 1125 - DNA, 1 bp, Escherichia coli
  Strain O55:H7
t

SEQ ID NO: 1126 - DNA, 457 bp, Escherichia coli
  Strain O55:H7
  modified_base (52)..(52): a, c, g or t
  modified_base (94)..(94): a, c, g or t
  modified_base (124)..(124): a, c, g or t
  modified_base (173)..(173): a, c, g or t
  modified_base (200)..(200): a, c, g or t
  modified_base (231)..(231): a, c, g or t
  modified_base (299)..(299): a, c, g or t
  modified_base (326)..(326): a, c, g or t
  modified_base (355)..(355): a, c, g or t
aatattttcccacgtcccgtcagcacgcaggatttgcagcggtcttaccacncactgtatctgctttttatcygcatccagtatcaccacctgngtgattaccctgtcctgctccggaataatnccattctcatctgactccaggatgtctgccggccccagtcgcagttgtnctgtaagcgactgcccgtgttcacggncatcatgctttccgcaaccacacagacgctncataagtttttttagtatattcatgtcattctcctgttctgcctgtatcactgcccacttcatccagncccttaacatcctgccacggcccgtcnccaaacctgacctgcaaatgctgaaacancccctgaacctgtgtggcatctttggggtcaagaaaggtcagtccggtgatgagtgcgccatctgtatccgggaaccagccattgctgtttgtctcaataat

SEQ ID NO: 1127 - DNA, 254 bp, Escherichia coli
  Strain O55:H7
  modified_base (75)..(76): a, c, g or t
  modified_base (253)..(253): a, c, g or t
ccccagacgaaaacggatttgtgtctcccccgggtcgcccttcggtccctgaggtccggttgcccccaccgggcnngccgcacctgtttctcctttcggtccctgtgggcctgccgggcctgccgcaccggtatctccctttggaccctgtggacctgcatttcccgtcagaccggtctctccccgctctcccctgtcacctttcggcccctgcgggcctgccggaccagcatcacctgccggtccccgttcnc

SEQ ID NO: 1128 - DNA, 34 bp, Escherichia coli
  Strain O55:H7
  modified_base (31)..(32): a, c, g or t
tgtcaccgcgctctcccttatcacccttcgnncc

SEQ ID NO: 1129 - DNA, 124 bp, Escherichia coli
  Strain O55:H7
  modified_base (79)..(82): a, c, g or t
  modified_base (84)..(87): a, c, g or t
  modified_base (89)..(89): a, c, g or t
cgggaggtcccaccacggtggggattcggtttacggcctcttccgccgctatcctgctttgttccgctgactgtgcgcnnnntnnnnantcccgggctttttctgttgcggtcgttgcatccct

SEQ ID NO: 1130 - DNA, 238 bp, Escherichia coli
  Strain O55:H7
  modified_base (50)..(52): a, c, g or t
  modified_base (95)..(98): a, c, g or t
  modified_base (123)..(124): a, c, g or t
  modified_base (137)..(137): a, c, g or t
  modified_base (164)..(164): a, c, g or t
  modified_base (209)..(209): a, c, g or t
acaattcagcttctgctgcactttgtgatgactcactggctttttgagcnnncgcagaagccgaggacgaggacgcatcctctgactgctttgcnnnngctgcactttctgccgcctgccggnntgactccgatgcntcccctgctgaagtgtcagcatttgcngcgctctcttctgcctgactggctgatatgccggcattcctcgcngacgtctccgcctctccggcattcttctt

SEQ ID NO: 1131 - DNA, 33 bp, Escherichia coli
  Strain O55:H7
ttccaccatcagttcaaaacgacgcagtgcctc

SEQ ID NO: 1132 - DNA, 65 bp, Escherichia coli
  Strain O55:H7
  modified_base (2)..(4): a, c, g or t
  modified_base (28)..(29): a, c, g or t
  modified_base (31)..(33): a, c, g or t
cnnnatggcaccgagaaaatcattcagnntnnncggttgagaatcttcatacacggtgatggtcc

SEQ ID NO: 1133 - DNA, 81 bp, Escherichia coli
  Strain O55:H7
  modified_base (46)..(47): a, c, g or t
  modified_base (50)..(52): a, c, g or t
tgtactgaccgtactcaacgtccatgctgtaacgaccggcttcatnnggnnnttcagaggccaccgtgttcaccaccaccg

SEQ ID NO: 1134 - DNA, 86 bp, Escherichia coli
  Strain O55:H7
  modified_base (6)..(8): a, c, g or t
  modified_base (27)..(28): a, c, g or t
  modified_base (81)..(82): a, c, g or t
tacgtnnngctttcagttgaatggtgnngttctctaccggttttcctgtgccgtctttcagtacacctgaaatctttactnncata

SEQ ID NO: 1135 - DNA, 27 bp, Escherichia coli
  Strain O55:H7
  modified_base (2)..(3): a, c, g or t
gnnggctgtcataacactgtgttacct

SEQ ID NO: 1136 - DNA, 41 bp, Escherichia coli
  Strain O55:H7
  modified_base (16)..(16): a, c, g or t
agcaatatcaatggcnacggattcggtcgggttaaactgca

SEQ ID NO: 1137 - DNA, 128 bp, Escherichia coli
  Strain O55:H7
  modified_base (24)..(24): a, c, g or t
  modified_base (27)..(28): a, c, g or t
  modified_base (46)..(47): a, c, g or t
  modified_base (100)..(101): a, c, g or t
  modified_base (103)..(104): a, c, g or t
  modified_base (107)..(110): a, c, g or t
ccagagacgtgttgctgtggcgancgnnatcacttccggtcagcanntcgtgcgttttccccttgttgtcagttacgcggagataatccccggagaaagnngnnacnnnnctgtaagccactcccgcc

SEQ ID NO: 1138 - DNA, 24 bp, Escherichia coli
  Strain O55:H7
cattcacgcgcacagacggccccg

SEQ ID NO: 1139 - DNA, 20 bp, Escherichia coli
  Strain O55:H7
  modified_base (3)..(4): a, c, g or t
gcnnaaccagcggttacgca

SEQ ID NO: 1140 - DNA, 266 bp, Escherichia coli
  Strain O55:H7
  modified_base (124)..(124): a, c, g or t
  modified_base (153)..(153): a, c, g or t
  modified_base (207)..(207): a, c, g or t
  modified_base (220)..(220): a, c, g or t
  modified_base (254)..(255): a, c, g or t
  modified_base (259)..(260): a, c, g or t
  modified_base (264)..(265): a, c, g or t
catgccagcgggtatcgctgtaacgggtaatctggcgattcctgtctcctgcatagctgaatgacgtcaccagccccagcgtgtccgtgaattcataacggtatttcacgttaatcccgttaanattatcgctaccgggagcgttcgtcgagncatgaagataccccgcgctcagcgtggcctgctgctcagacgcccatgcaggcncaccggatacggncagacaaatggctgcggacaaaatggcggcatanngttnncgcnna

SEQ ID NO: 1141 - DNA, 734 bp, Escherichia coli
  Strain O55:H7
  modified_base (39)..(39): a, c, g or t
  modified_base (43)..(43): a, c, g or t
  modified_base (65)..(67): a, c, g or t
  modified_base (103)..(103): a, c, g or t
  modified_base (121)..(121): a, c, g or t
  modified_base (143)..(143): a, c, g or t
  modified_base (210)..(210): a, c, g or t
  modified_base (303)..(303): a, c, g or t
  modified_base (348)..(348): a, c, g or t
  modified_base (369)..(369): a, c, g or t
  modified_base (597)..(597): a, c, g or t
  modified_base (602)..(604): a, c, g or t
gggttataaatatttcaacgaatactgatgccggaagcngctnttttggtcacaatcaccgtacnnncggtgatattgcctgccccctgattgcctttctggnaaatcttaaactccagantgacgctaccaccaccactagncatatcaataactgcactgtaactaccgggaatggcccctttagtttctctggatgcgattaatacnccgtttttgcgaacttcaaaaccataacccgtgtatcgcgtgcctcctgggttatttccgctccccggatcgtcatacgctataccgttaaanataatgggcggaataataatctggcggtcaaagttatgatcatcnctgatggtgactgtaaccgtnccgtttggtgtttccgtgttaccccacgtaccgacttttttcgggaaggcttttgatacagctttaacgaaatcccctctgacctgggtcgcctccagcatgcccttaatcgtacagttctggttaatcgtgacattgttgagcgctcctgagttcgcattcacactgccactgatatccgcatttttcgccgtcagtcgcccgtctggtgtcagggaaaatgccggnggatnnncgccgctggtaatggtgggagccgtcagatatttcaggaacacttcattcatgaatatctgatcgccctgaccaacaaacatcggctttgtgttgccattcgcaggattaatcatcgcaatcctgtctgc

SEQ ID NO: 1142 - DNA, 3 bp, Escherichia coli
  Strain O55:H7
cag

SEQ ID NO: 1143 - DNA, 155 bp, Escherichia coli
  Strain O55:H7
  modified_base (41)..(44): a, c, g or t
  modified_base (47)..(47): a, c, g or t
taccggcaccgatacccgcaatataaaggcgtccgtccttnnnntgntgcagcttcacagcccacatgctgttcagattattatttgtatcaacctgaaccttctgtatctgctggatcgctgcactctggtcttccagtttcttattgacggtc

SEQ ID NO: 1144 - DNA, 59 bp, Escherichia coli
  Strain O55:H7
  modified_base (24)..(24): a, c, g or t
  modified_base (49)..(49): a, c, g or t
agccagatgggttttccctatctngcctttgaaaaaatccagatagccngatgcatcat

SEQ ID NO: 1145 - DNA, 72 bp, Escherichia coli
  Strain O55:H7
atgccgatttgccaacggtgttcacactgcggatataaaagtaataatcatggcccggtttgatattgatac

SEQ ID NO: 1146 - DNA, 52 bp, Escherichia coli
  Strain O55:H7
  modified_base (7)..(8): a, c, g or t
ccagtanngccccgtgccaaggtagcgggctgtggtttcaacctgcctgata

SEQ ID NO: 1147 - DNA, 82 bp, Escherichia coli
  Strain O55:H7
  modified_base (50)..(50): a, c, g or t
  modified_base (70)..(73): a, c, g or t
agaactcaaactgtaccgtcggatcataaaccgcaagatgcggcgtggcngttatctgaaaatagcccgnnnncagctcaat

SEQ ID NO: 1148 - DNA, 137 bp, Escherichia coli
  Strain O55:H7
  modified_base (85)..(85): a, c, g or t
  modified_base (90)..(91): a, c, g or t
  modified_base (130)..(133): a, c, g or t
acggcgctgccggtgcggcaatccggaacgataccgatgccggatcgccctgctgtccccacgcatttaccgcccggactgtcancctgnngttccccggcgccagttgcgtgaagcggtatgtggtttnnnncgtc

SEQ ID NO: 1149 - DNA, 173 bp, Escherichia coli
  Strain O55:H7
  modified_base (77)..(79): a, c, g or t
  modified_base (167)..(167): a, c, g or t
cgctcactgccgtcatccgctgccacggtcaggcgaagcaggaagctcacgcccttcaccaccttcggcgtgtcccnnngcgccagcacctgatattccccgctgtctgcggtgacttctgcggtcaggtgctgcaccgctggcggcgtgacaccattcaccgtgcngctctg

SEQ ID NO: 1150 - DNA, 57 bp, Escherichia coli
  Strain O55:H7
cgttatccacgatggcttctttctccggcacatgctgcactgccgtgatggcaaagg

SEQ ID NO: 1151 - DNA, 93 bp, Escherichia coli
  Strain O55:H7
aggcgacgacgcagtgacggcagggagagtccccatacaccgtatgtctccacaccatcaggcagggtgctgacctgtatccggtccggcgcg

SEQ ID NO: 1152 - DNA, 342 bp, Escherichia coli
  Strain O55:H7
  modified_base (4)..(5): a, c, g or t
  modified_base (92)..(92): a, c, g or t
  modified_base (97)..(99): a, c, g or t
  modified_base (286)..(287): a, c, g or t
  modified_base (299)..(299): a, c, g or t
  modified_base (335)..(336): a, c, g or t
cagnnatggccacgctcaccggcttaccgctgccgttaatcaggttcaccgtggcggcacctgtctccggcagggtcacctcacggtccagngtcannntgcggctggcggcatcgatggacaggatacgtccgccggtcatggtcccggcatagtcgttatcacagatttcaataatgtcaccgggtgtgtgacgcagcccctgtgacccgagcgtgaaatccaccgtctgcgtttccagcagtccggtctttatcacccacagcccggcacggtgggcctgacnncgactggtgcanccgaacgcatccatcttcagcaggttgcgcccgtanngcagta

SEQ ID NO: 1153 - DNA, 23 bp, Escherichia coli
  Strain O55:H7
  modified_base (12)..(13): a, c, g or t
cgtggaggtctnncagccgttct

SEQ ID NO: 1154 - DNA, 288 bp, Escherichia coli
  Strain O55:H7
  modified_base (16)..(17): a, c, g or t
  modified_base (46)..(48): a, c, g or t
  modified_base (50)..(50): a, c, g or t
  modified_base (62)..(62): a, c, g or t
  modified_base (145)..(145): a, c, g or t
  modified_base (232)..(232): a, c, g or t
attcacctccaccgcnntgtggcggtccttcagggcgctgaagctnnngngaaaccccacgncgttatcatccaccaccacatcgcagttggtgtacggccacaccacatccgacgggcggtcctgaacgaacgtcagcgtctgnccgttccataccggcatacagcgcatcgccgagcagaaatcactgagaacgtcccacgccttacgctgttgtgacaggtacgcattnaargtcatccgcggctctgtgcccccgaaaccatccgggaccgtctggtcgcagta

SEQ ID NO: 1155 - DNA, 372 bp, Escherichia coli
  Strain O55:H7
  modified_base (26)..(26): a, c, g or t
  modified_base (29)..(29): a, c, g or t
  modified_base (137)..(137): a, c, g or t
  modified_base (146)..(146): a, c, g or t
  modified_base (363)..(366): a, c, g or t
tggcatacagcgcccatttgtccacntcngccgcccccagacgttttcccatgccgtagcgcgggtgagtcagcatgtcccacaggcaccaggccgggttgttgctgtatgccggtttcaggctgccgtcccagatnccgctgtangtgcgtttttccgggtcatagtttgacggtacctgratgatgcgaccgcggatatggtagttcaccgtcatctgctgrccrccaaactgctccgcatccacctgcagccccacaatcgccgtgttcgggtagcactgtttcacatcgatgatttcggtgtatgacgaccagagcgtcttattctgcagctggtccgrggtgctgtccgctgtctccnnnnccatcc

SEQ ID NO: 1156 - DNA, 82 bp, Escherichia coli
  Strain O55:H7
agggccggggaggcagattatccagaatcaccgacgccaggaactgygaggtggtcttgccgttaatggtgacatccttttc

SEQ ID NO: 1157 - DNA, 206 bp, Escherichia coli
  Strain O55:H7
  modified_base (26)..(26): a, c, g or t
  modified_base (49)..(49): a, c, g or t
  modified_base (58)..(58): a, c, g or t
  modified_base (65)..(65): a, c, g or t
  modified_base (182)..(182): a, c, g or t
  modified_base (185)..(185): a, c, g or t
tcagcaggcggacggatgtcgggttncggtcaccctttgacgtggtctncaccagtgnctgcacnccgaaggtgacccgcaggcggtcaatgttcgcggatgtaatggtgcgcgtcaccggctttgccttcgtcacttccacgcccagtgcggtttcagctccggakgactcaaagccttcnggnggtgtctgctcctgctccccg

SEQ ID NO: 1158 - DNA, 50 bp, Escherichia coli
  Strain O55:H7
  modified_base (2)..(2): a, c, g or t
  modified_base (32)..(32): a, c, g or t
cngtgtccgtcagcggggttttgttcaccagnatactctgcagccccttc

SEQ ID NO: 1159 - DNA, 246 bp, Escherichia coli
  Strain O55:H7
  modified_base (86)..(88): a, c, g or t
gccgccacctttacccataatgttcctctcaattggtattattaatcgcagtgataggatattgcacagctattgcgcgatatcannngaacgctgtttgttaccctgtaaccagcaagctcagtctgttaacggaattaatgagggttttatgaaatgtaaaatcattgctgccattgccatgctgacagcagcatcatgcggatacgcagcagaacaggaagtcccaatgaaccttgtcagtgc

SEQ ID NO: 1160 - DNA, 108 bp, Escherichia coli
  Strain O55:H7
  modified_base (106)..(106): a, c, g or t
aaagaagtcagcattggaaaaataaccattcaggagaccccctacggtctgctgttcacaccagcccttcactctctgtctgaaggcattcatggttttcatgtgnac

SEQ ID NO: 1161 - DNA, 418 bp, Escherichia coli
  Strain O55:H7
  modified_base (132)..(134): a, c, g or t
  modified_base (329)..(329): a, c, g or t
  modified_base (384)..(384): a, c, g or t
  modified_base (394)..(394): a, c, g or t
aaacaccggcaaacatcttggcccctggtctccggatggacacctgggcgacctccctgcgctgttcgtgacgcatgacggaaaagcgaactacccggtcctggccccgagactgaactcattaaaagagannnaagggcgttctctcatgcttcatgctggcggtgataaccatcatgaccatccggagcccctgggcggtggtggtgcgagaatggcctgcggcatcattcaataatcagtcaggtaaggggcgggccccttacctttattcctcaggacgataaatcctttctccctgaaaagaacggcacatcctccctctctgngttaatgtttttgtcgtgacataagaataattccttacactcaatcttcgtaacnctcccgcagntcctgtccgtgagcactgcgggat

SEQ ID NO: 1162 - DNA, 26 bp, Escherichia coli
  Strain O55:H7
ttcatcacgggtgctgatgtcctggg

SEQ ID NO: 1163 - DNA, 55 bp, Escherichia coli
  Strain O55:H7
  modified_base (6)..(6): a, c, g or t
  modified_base (16)..(17): a, c, g or t
  modified_base (28)..(29): a, c, g or t
  modified_base (36)..(36): a, c, g or t
  modified_base (45)..(45): a, c, g or t
  modified_base (48)..(49): a, c, g or t
atttcnccgtaaggcnncggcatcgggnnaccctgngcaatcatnttnnccagtg

SEQ ID NO: 1164 - DNA, 28 bp, Escherichia coli
  Strain O55:H7
acgtgttctgtyyaccgttatccgttgc

SEQ ID NO: 1165 - DNA, 65 bp, Escherichia coli
  Strain O55:H7
gggcaagcatctgagccacaccacccagtatcatgctggcccccagtgaaaacagcatcgtggtg

SEQ ID NO: 1166 - DNA, 111 bp, Escherichia coli
  Strain O55:H7
  modified_base (3)..(4): a, c, g or t
  modified_base (85)..(85): a, c, g or t
  modified_base (98)..(99): a, c, g or t
  modified_base (103)..(104): a, c, g or t
ggnnagtcgcggcacaatgtggatgaccgttccctcacccagctgttcgtgaagacgggcgtacaccgcctccggtgccgtgtcntcaccggcaatanntatnnggtacca

SEQ ID NO: 1167 - DNA, 170 bp, Escherichia coli
  Strain O55:H7
  modified_base (77)..(78): a, c, g or t
ggcttccgctgccgtgttcacatacaggctgaggcggcggccaaatcgttgtaaatccccgtgaaggcagatgcgtnncagtggcggtgacgccaggctgaatgcgttcgtcgttgccatttttcggaatacctctcccgtttactcagttgttcaggcagatggtgaag

SEQ ID NO: 1168 - DNA, 29 bp, Escherichia coli
  Strain O55:H7
  modified_base (14)..(14): a, c, g or t
ggttctgaccgttncgccaccagtcatcc

SEQ ID NO: 1169 - DNA, 54 bp, Escherichia coli
  Strain O55:H7
tcaattcccgccagatggtaggcatcccggaacagcgtgtaacagtccgtcacc

SEQ ID NO: 1170 - DNA, 206 bp, Escherichia coli
  Strain O55:H7
  modified_base (3)..(3): a, c, g or t
  modified_base (25)..(26): a, c, g or t
  modified_base (72)..(72): a, c, g or t
  modified_base (87)..(87): a, c, g or t
  modified_base (105)..(106): a, c, g or t
  modified_base (161)..(161): a, c, g or t
canagcgccgtcctgtcagatgtgnnacacagcggaatttatgaatttccccccggcagaccagccaccagnacagtgcactttttntctgcagccgccggtcgnnctcgctcagccagggcagaccaccgggatgactgtggaccagtgccacaatctcnccctgcatctctgcccgcagccagtcttccggtgcaatacgaaaa

SEQ ID NO: 1171 - DNA, 35 bp, Escherichia coli
  Strain O55:H7
  modified_base (28)..(28): a, c, g or t
agagatattcacacaagggatataccgntccccct

SEQ ID NO: 1172 - DNA, 52 bp, Escherichia coli
  Strain O55:H7
cgaagccgcacgactccgctggcgcacaccgccgggcatgcgccagaatcgc

SEQ ID NO: 1173 - DNA, 141 bp, Escherichia coli
  Strain O55:H7
  modified_base (12)..(12): a, c, g or t
  modified_base (86)..(88): a, c, g or t
  modified_base (90)..(90): a, c, g or t
  modified_base (105)..(105): a, c, g or t
aacaggatttantgcgaaagtttattgatggaaaggaaaccgccaaaattgaccgccatgccgcgcatctcacacccgcgcatgcnnntnctgcatctgtccttncggatatccgtggtggggttgtcgaactcatccgcc

SEQ ID NO: 1174 - DNA, 81 bp, Escherichia coli
  Strain O55:H7
  modified_base (28)..(28): a, c, g or t
acaggtgttcgccagcatgatgcgaccnggaaacagcgccccgtccgtctcsgtcggtgtcgccagcacaaacgaggccgt

SEQ ID NO: 1175 - DNA, 52 bp, Escherichia coli
  Strain O55:H7
  modified_base (44)..(45): a, c, g or t
  modified_base (49)..(51): a, c, g or t
ccgcatccagaaaacgggcatacacccggcggcggaccaccgtnncccnnnc

SEQ ID NO: 1176 - DNA, 20 bp, Escherichia coli
  Strain O55:H7
  modified_base (2)..(3): a, c, g or t
  modified_base (14)..(14): a, c, g or t
tnnacaccgtcagngacggg

SEQ ID NO: 1177 - DNA, 45 bp, Escherichia coli
  Strain O55:H7
agccactgccgtcaatcgggtatgcctgatattgccgcccctgcc

SEQ ID NO: 1178 - DNA, 109 bp, Escherichia coli
  Strain O55:H7
  modified_base (101)..(101): a, c, g or t
gctcattrcagaaaaaataccgctcaccrccctgyaccgtcaggtcratttcccagagyaccacccgcggtgactgctctgatttaaccgactcgttcagnctttcttc

SEQ ID NO: 1179 - DNA, 26 bp, Escherichia coli
  Strain O55:H7
  modified_base (25)..(25): a, c, g or t
gttcaccacctgctcaatcgtacanc

SEQ ID NO: 1180 - DNA, 47 bp, Escherichia coli
  Strain O55:H7
tccgtgacgctccactcccggcacaccaccctcaccgtccggttatg

SEQ ID NO: 1181 - DNA, 246 bp, Escherichia coli
  Strain O55:H7
  modified_base (50)..(50): a, c, g or t
  modified_base (92)..(95): a, c, g or t
gtcacccggaacaccgcctgaaacgtcttcagttgaggattcagccctgnggggcggcgctgttcataaccgtcaccaaaccgcaccctcannnncgacggcttctcactcacctgcatcccttcacgcgggaccagatgcagcgtttttatctcagccactcagcattcctccgtcacgtcgcatggacagcatcaccgcctgcacccgctggtcaatcagctgcacaagactgcctgccgcctc

SEQ ID NO: 1182 - DNA, 2 bp, Escherichia coli
  Strain O55:H7
ct

SEQ ID NO: 1183 - DNA, 49 bp, Escherichia coli
  Strain O55:H7
  modified_base (2)..(2): a, c, g or t
  modified_base (29)..(29): a, c, g or t
tntggtagaccggggaatacaccagaccngcactgccgttcatactgcc

SEQ ID NO: 1184 - DNA, 34 bp, Escherichia coli
  Strain O55:H7
  modified_base (26)..(29): a, c, g or t
caggggcataatggcttcaggtccgnnnnccccc

SEQ ID NO: 1185 - DNA, 35 bp, Escherichia coli
  Strain O55:H7
  modified_base (30)..(32): a, c, g or t
cgcgctcaggtttgccgaggtatacacgcnnnctt

SEQ ID NO: 1186 - DNA, 56 bp, Escherichia coli
  Strain O55:H7
gccagtcaccaatgctgccaagaaatcctcctgcaccggacataccgtttgccgcc

SEQ ID NO: 1187 - DNA, 20 bp, Escherichia coli
  Strain O55:H7
gaacttttgatatttcctgc

SEQ ID NO: 1188 - DNA, 147 bp, Escherichia coli
  Strain O55:H7
  modified_base (48)..(48): a, c, g or t
  modified_base (139)..(139): a, c, g or t
agcatctccgtgatgttattcaccatccctgagataccctccgtcgcnagctgtgctgcctgtgaggcgtaatcggacgcattatccacccagttactgaatccctcctgcagccctttctgccagtccgcacgctgcncatccgat

SEQ ID NO: 1189 - DNA, 228 bp, Escherichia coli
  Strain O55:H7
  modified_base (223)..(224): a, c, g or t
  modified_base (226)..(227): a, c, g or t
gtctgtaaaaatcctcactgttatccccggtctgatactgagactgaaggtccgcatccttctggcggaagctgtcgcggatctgctgcaactcccgcatgcgttctctggctcgttccccctgcccgtaccccagcagttcagcatcattcgacgcacgcgcagccgcattctcattcttcagtgtctcttcccgggatcgcaactgttcccggattttttnntnnt

SEQ ID NO: 1190 - DNA, 22 bp, Escherichia coli
  Strain O55:H7
atctccgtcagggttttcagtt

SEQ ID NO: 1191 - DNA, 30 bp, Escherichia coli
  Strain O55:H7
  modified_base (3)..(3): a, c, g or t
tanttcagcttcgccagctctgtatactga

SEQ ID NO: 1192 - DNA, 58 bp, Escherichia coli
  Strain O55:H7
ttcagcagccgggaaaaactgtcttccgctttttccgtctctgattttccaccccggg

SEQ ID NO: 1193 - DNA, 136 bp, Escherichia coli
  Strain O55:H7
ccgcatatcccagccggacacgctctttttcttcccctttcagtctggacagggccagctcacgctctgtttttgtcagggcactctgctgtttatcatccagggtggcctgtggcagccgtaacggcacattcac

SEQ ID NO: 1194 - DNA, 1530 bp, Escherichia coli
  Strain O55:H7
  modified_base (937)..(938): a, c, g or t
  modified_base (1330)..(1333): a, c, g or t
  modified_base (1335)..(1336): a, c, g or t
  modified_base (1345)..(1346): a, c, g or t
  modified_base (1350)..(1351): a, c, g or t
  modified_base (1526)..(1526): a, c, g or t
tgccgctgctgaagcagttcattccccagccccagcagacggttaaattccgtatgctgaacattcatctgcagcaatgcctggtatgctctgttctgctctgctgcctcctcgcgtatcctcgccacacggttgtattccagtgacgccagagcttcctgtacagacttcgccttttcctgcatctgtgtcagtcgtgactgttcaaccgccagtttgccagttgcctccgcaaggccatgggttataatctccacacctgaaccaccctgtggattttcctgcagccagcgctgatagtcagcaatctgtgttttcagtccccggactttactttcctgctcagcaatcagacgattctgctcttccagtgcctcgcgagttttaccctcattatcagccagttccggaagggtcattcccggtacctttgcccggatttcatcaatcgtcgatgcatactgacgggcggactccctggcctgttcctgattctggtacaccgtgtaccaggcaccggctcccagcatcagtaaaccggatatcccgccgacaagcgaaagcagggatgccgcgccacttttcagcattcccgtaaccgacgtggcattctccagcgccttcctcgaggccgccaccgcctgattcgactgtaccagtgcggcattggccacaatcatggcccggcgttttgcgacggcattctgtgtggccagcgcctccgcactgctatttctggccagtgcaagttcagcctgtgccagttgccaggcacgttctgccgccagcgcgtcagctgccgccttacgctgcacctgaacagccgcatctgcctgtgcggctgcaagggcaaccgtcccggacttcgccgcgatcagctctgtggtgacctttcccacgcctgcggccatattgccaaagtaccgggccaccccgnnggcaaccagcgcccccgcggctgttgccacattatcaatctgtccggcaacaccgttcagcacgccggagagcgttttcgtcgctccgctggcttcattcgcgccacccacccaggccataaaggcgttttccacctttgtgatcccgtcagagaccgtttccggcatggcggcatattcatcacgcaatacccccagctggctgattaacgcaggaacgactttatccgccgtcagtttgccgtcgtccgccatcgccttaaggtctttacgggccacgcccatacccgcagccagtgcacgtatgatccggtctccgctttcattgaccgaattaaattcctcaccccgtaacacaccctgtgccagcgcctggctgaactgggtgatcnnnnannccgcctctnncgtnntggcaccggatattttcagccctgtcgaaatggcctccgtcaccttcagtacatcaccggcactgtaaccatattcacgcatcgaggcagccgaacgggcaaacagggccgcattatccgaaaatgccgtgcctgtccgctggctgatatccatcagcactttctgtgatgacgnaaat

SEQ ID NO: 1195 - DNA, 763 bp, Escherichia coli
  Strain O55:H7
  modified_base (644)..(645): a, c, g or t
gcctgtttcagacgggcattcacggaactccactcatcagccagtgaaatcaggtgtccggtggcaaaggcaccggcaaatgcgccagccattccgacagcagaaccgcgaatttccgtcaactggctgttcagttctgccagggcacgtcgctgctcccgggctgccgcagcggcctgacgcccgccattctgcagggtccggtaatattcactgcccatacgggacgcccgctggatctccgactggaatgactgtgaatttgccgaaattttgataatcagttcacgtaacgtcgccattcacctttctccgggcaaaaaaaacctgccacagcaggttttcatcattatttatgacattgctgcaaggctcagcgcgtcttccagcgccgcaaacggatccacctccggcttatcctcatcctcgccccagcagagcatggcgtccttcagtgcaacattcatcccctgtgccccgaaaaccgctttcacgatctgtgcattacggatatccccgcgctcatcacccagcggggataccctgtcgaactccatccacatcatcgcctcgctcgcactcaggctgtgccgcagttcggataaggtgcgccccagacggagcgcaagtcgcatcagaaagcnntccgggcgggctacttttttctggccgactctgcatcagcgatcagttccagtgcctgacgcagcaaccgggcatgtaccggaccatagacggccagcacctgctcacggtcgtccgg

SEQ ID NO: 1196 - DNA, 168 bp, Escherichia coli
  Strain O55:H7
caggacatcgcagaacagcgtcacatccgcttccaggttacggcgggttttcgccaccaccgacagggtatcgtcatcctctccatcaccattgagcacttcctgccacagataccaggcctctgccgaaggctcccgcagcaccacgctgacatttctccattccgg

SEQ ID NO: 1197 - DNA, 74 bp, Escherichia coli
  Strain O55:H7
cccgacagtctggccagcgccagtgttttcagatcttttgccataagccttatccgcccgcaccattaaccgtt

SEQ ID NO: 1198 - DNA, 35 bp, Escherichia coli
  Strain O55:H7
acacgcatcagaggtaatgctctgcggctgttctg

SEQ ID NO: 1199 - DNA, 19 bp, Escherichia coli
  Strain O55:H7
tactgaaagtgtcagtagt

SEQ ID NO: 1200 - DNA, 52 bp, Escherichia coli
  Strain O55:H7
  modified_base (46)..(46): a, c, g or t
ccccgttgacactgactgacattgtcagcagcgcaccggtattcanggtaag

SEQ ID NO: 1201 - DNA, 28 bp, Escherichia coli
  Strain O55:H7
  modified_base (4)..(4): a, c, g or t
acanaggacaccggtttacccttcaggc

SEQ ID NO: 1202 - DNA, 30 bp, Escherichia coli
  Strain O55:H7
cacgccgttggtaccggatgaccaggtgtg

SEQ ID NO: 1203 - DNA, 240 bp, Escherichia coli
  Strain O55:H7
  modified_base (117)..(120): a, c, g or t
gcccttaccggacggaaactgcaccttaaacgcatacaccgtgtcattgtcataggcatcacgcagggcgttctgggcctgattcagataaaaattacccgacatggaaatctcggnnnncgcccccagaccgttgatgttctcctgctctgtggagcagagcgtggtcacatcaatatcctgtttctgaccggcggtgaactggacttccttgatggtgcagtccaggcgcagatattc

SEQ ID NO: 1204 - DNA, 67 bp, Escherichia coli
  Strain O55:H7
  modified_base (3)..(6): a, c, g or t
  modified_base (57)..(60): a, c, g or t
cannnnttcagcagtcgccggggcagatgaaatcatcacctgcgtcagctgtgagcnnnnatacaaa

SEQ ID NO: 1205 - DNA, 123 bp, Escherichia coli
  Strain O55:H7
gacctgaaactccagggttgcacggtaacagcggttttccggaatatagtcctgcatttcactgacggatcccggggccagcagcattatggcttcacgggcgtcctgacgtatctgacgcgc

SEQ ID NO: 1206 - DNA, 21 bp, Escherichia coli
  Strain O55:H7
ctgcaccgacactgaggactc

SEQ ID NO: 1207 - DNA, 73 bp, Escherichia coli
  Strain O55:H7
  modified_base (30)..(33): a, c, g or t
  modified_base (69)..(70): a, c, g or t
gcgccaccgacggcctgccatccagcaggnnnnccacatacgggtacacctgcccgccggcaagatgcnncag

SEQ ID NO: 1208 - DNA, 44 bp, Escherichia coli
  Strain O55:H7
aaatccacctccgtcatcgtctcagtatctcatcaatggcccgg

SEQ ID NO: 1209 - DNA, 32 bp, Escherichia coli
  Strain O55:H7
gtggcatattcacggtccccatttccacaaac

SEQ ID NO: 1210 - DNA, 45 bp, Escherichia coli
  Strain O55:H7
atccgccttcatggtgttatcgctgttaccggtgtccggattaac

SEQ ID NO: 1211 - DNA, 125 bp, Escherichia coli
  Strain O55:H7
  modified_base (6)..(8): a, c, g or t
  modified_base (24)..(25): a, c, g or t
agcgcnnngaaaggaccaccacanngcggcgcagttttcccctgcgtaccggtgcccgtgacaccacttcttctttcagcacattcgcacccgcacgggttgcctcacgcagcacccggttattt

SEQ ID NO: 1212 - DNA, 66 bp, Escherichia coli
  Strain O55:H7
tgtcctccagccccgaaaaatccagcagggtttcgatcatttttcccctcccagccgacagagaat

SEQ ID NO: 1213 - DNA, 21 bp, Escherichia coli
  Strain O55:H7
  modified_base (2)..(3): a, c, g or t
cnntcagcacatgaagtcgtg

SEQ ID NO: 1214 - DNA, 126 bp, Escherichia coli
  Strain O55:H7
  modified_base (42)..(43): a, c, g or t
  modified_base (76)..(76): a, c, g or t
  modified_base (104)..(106): a, c, g or t
  modified_base (109)..(110): a, c, g or t
gccatttccgcaccggactgcatccgctcccggctgctcctnncccggatatccgcatgaattttcccgcatgacncccattcttctgtcatttctccggcagnnntannggttaacaccggcttc

SEQ ID NO: 1215 - DNA, 26 bp, Escherichia coli
  Strain O55:H7
tcatctgtgtcagacgacctgcagat

SEQ ID NO: 1216 - DNA, 37 bp, Escherichia coli
  Strain O55:H7
ataacaccgtcggacaacgcaaatcgtaaatcagcac

SEQ ID NO: 1217 - DNA, 44 bp, Escherichia coli
  Strain O55:H7
  modified_base (36)..(37): a, c, g or t
cggtacagcatcccggtcagtcgcatggcagccccnntcatccg

SEQ ID NO: 1218 - DNA, 36 bp, Escherichia coli
  Strain O55:H7
  modified_base (28)..(28): a, c, g or t
agcctgacgaaccttgtccatcagcatntcatcatc

SEQ ID NO: 1219 - DNA, 42 bp, Escherichia coli
  Strain O55:H7
catggtcaacacgcagatgtgccttgatctcttccagtgtca

SEQ ID NO: 1220 - DNA, 50 bp, Escherichia coli
  Strain O55:H7
cagccagggtccagcctgatgaatgagcttctccgggtttatcaccggtc

SEQ ID NO: 1221 - DNA, 68 bp, Escherichia coli
  Strain O55:H7
  modified_base (3)..(3): a, c, g or t
canaacaacaacccgcaacatccgatttccaaaccagatgattgaacaaattaacatcgctcttgacc

SEQ ID NO: 1222 - DNA, 39 bp, Escherichia coli
  Strain O55:H7
  modified_base (11)..(12): a, c, g or t
aatttttctgnntgggtcattgaatcttgccgccgggag

SEQ ID NO: 1223 - DNA, 46 bp, Escherichia coli
  Strain O55:H7
  modified_base (44)..(45): a, c, g or t
aaagaatgatacacagtatgctctgcgatggctgttcatataanna

SEQ ID NO: 1224 - DNA, 67 bp, Escherichia coli
  Strain O55:H7
  modified_base (23)..(24): a, c, g or t
tagaataaaaataaagcataacnntaataatcttctacccaatcagtacattactgctgtgactcca

SEQ ID NO: 1225 - DNA, 23 bp, Escherichia coli
  Strain O55:H7
attccagtttcttccaccatcgc

SEQ ID NO: 1226 - DNA, 27 bp, Escherichia coli
  Strain O55:H7
  modified_base (10)..(10): a, c, g or t
tttgattatncccgcacactctcgcag

SEQ ID NO: 1227 - DNA, 48 bp, Escherichia coli
  Strain O55:H7
  modified_base (14)..(15): a, c, g or t
ctgcggtctctgtnnatgcaggaatacggcgacgatacggcgcatcag

SEQ ID NO: 1228 - DNA, 71 bp, Escherichia coli
  Strain O55:H7
  modified_base (39)..(41): a, c, g or t
  modified_base (46)..(46): a, c, g or t
ctgagtgcggatatagtcctgtgccccttccagctgctnnngcatngtcatcaaccgttctctgaggatga

SEQ ID NO: 1229 - DNA, 23 bp, Escherichia coli
  Strain O55:H7
ccacgccggaggtgccggtggct

SEQ ID NO: 1230 - DNA, 32 bp, Escherichia coli
  Strain O55:H7
  modified_base (2)..(2): a, c, g or t
antttcagctttcgcatcggctaattccctcg

SEQ ID NO: 1231 - DNA, 450 bp, Escherichia coli
  Strain O55:H7
  modified_base (79)..(81): a, c, g or t
  modified_base (170)..(170): a, c, g or t
  modified_base (184)..(184): a, c, g or t
  modified_base (186)..(187): a, c, g or t
  modified_base (218)..(218): a, c, g or t
  modified_base (249)..(249): a, c, g or t
  modified_base (259)..(259): a, c, g or t
  modified_base (264)..(264): a, c, g or t
  modified_base (271)..(271): a, c, g or t
  modified_base (367)..(367): a, c, g or t
  modified_base (400)..(403): a, c, g or t
caggacaataatcaccacacacagaacacggttcatctctctttcaccccaccagtcccgataacgtcaggactcgccnnncggtggaaaagaaaatggcaaccagcatgactaaaaatgaaatgccgacaagtacacagaggctcttcaccagcgttatgagtttatcngatatcattagccncnncatcaatccgcctttgttattttccctttgnctgtatcagccaggacaaaatcaatcagcanattcgcttcntttancagcgtncggatttttgatacatgcgcggatttaacctgtttccactcattcagcccggtagcaaacacactggcaatgtttttatcccgtttcatgtcagcncaagcctgattgagttcttccatcacactcatnnnncggggattaacgacaaaacccttcgtccagtattcatagagaacatc

SEQ ID NO: 1232 - DNA, 33 bp, Escherichia coli
  Strain O55:H7
actcttcctgatacyggatkaccttatcgcgga

SEQ ID NO: 1233 - DNA, 19 bp, Escherichia coli
  Strain O55:H7
  modified_base (6)..(6): a, c, g or t
cagccngcaagttttcgaa

SEQ ID NO: 1234 - DNA, 144 bp, Escherichia coli
  Strain O55:H7
  modified_base (14)..(14): a, c, g or t
caccatattgcgtngtttcccatcctcagcaaccataacgatttccgttatagttgacgcaaaacgctgtcttaacttagccaactgtgattgccaggccagccccatccccgcaacgacaggtttcatgggaacgtatggttc

SEQ ID NO: 1235 - DNA, 63 bp, Escherichia coli
  Strain O55:H7
  modified_base (48)..(48): a, c, g or t
  modified_base (51)..(52): a, c, g or t
cggcacggtcatcatattcatcggttatttccttttagtgatgaaccntgnntcacaggaatc

SEQ ID NO: 1236 - DNA, 43 bp, Escherichia coli
  Strain O55:H7
ccggtatcctcaagggtcatcctgaaaggttctgtgttgtgag

SEQ ID NO: 1237 - DNA, 78 bp, Escherichia coli
  Strain O55:H7
  modified_base (52)..(52): a, c, g or t
ggttgactttattcacttacattttgccagttcgcaggatttcgtgttatcngtccatgtaagcaaacctcatttttc

SEQ ID NO: 1238 - DNA, 108 bp, Escherichia coli
  Strain O55:H7
  modified_base (8)..(8): a, c, g or t
  modified_base (59)..(59): a, c, g or t
  modified_base (74)..(74): a, c, g or t
  modified_base (83)..(83): a, c, g or t
tgtcgatnccccagcacgccagcgcactctcctggtcacgacgggatacctgaccgtancagttgtttgaacgnatacggcantctctgccaccgtccttaatccacc

SEQ ID NO: 1239 - DNA, 20 bp, Escherichia coli
  Strain O55:H7
  modified_base (9)..(9): a, c, g or t
tttcgatcncctgcattaat

SEQ ID NO: 1240 - DNA, 44 bp, Escherichia coli
  Strain O55:H7
cgacgggaaacacttaccgggaccaatgttgtacggacagaatg

SEQ ID NO: 1241 - DNA, 123 bp, Escherichia coli
  Strain O55:H7
  modified_base (50)..(50): a, c, g or t
  modified_base (69)..(69): a, c, g or t
cggtcagcggcactttgatgtttttctccacccatgccagcgccttatcncgctcaatggcgttaaccnggtcgcatttttccttcgacagcttcatgccaggaatcacaggcttaccatcca

SEQ ID NO: 1242 - DNA, 174 bp, Escherichia coli
  Strain O55:H7
  modified_base (28)..(28): a, c, g or t
  modified_base (79)..(80): a, c, g or t
ccagatacccgcaccatcacggtatgcngtggtgtggttgccttccttttcatccagaaactggtcgaggatttcaggnncagaagcacctgcggcaatcagcgccagaacggcagccgataaaccatagcggagtttcctgctcatcagcttactctccccgtgccgccttac

SEQ ID NO: 1243 - DNA, 180 bp, Escherichia coli
  Strain O55:H7
  modified_base (50)..(53): a, c, g or t
agaccaaacagcagactccccagcacgcctattgccgcccactgagacgnnnnaaccctgtccagcaactgcaggaaccagtagcccgytcccaccgctgacgtggtgtatgacacaccygttgtgattttttccatctggtacataccccgtctcccgcaatccggaagctcacaacaa

SEQ ID NO: 1244 - DNA, 66 bp, Escherichia coli
  Strain O55:H7
agcagctcatccagaatggcatcaacctctgcatcaagacgcgcttccaggttatggcgaagtttt

SEQ ID NO: 1245 - DNA, 197 bp, Escherichia coli
  Strain O55:H7
  modified_base (106)..(106): a, c, g or t
gagcgcaggacttccttcactgcctcagcagtgaccagggatgtaatttctgacatgggattttctcgtygaaaggtgtgattaagaaagttgccgctaaatgagnggctcttcgggtttgcttccggctgactgactggcgctgattttctcagcggaccttttgtcaatctgtctgcgccagacgtcacgcatgg

SEQ ID NO: 1246 - DNA, 76 bp, Escherichia coli
  Strain O55:H7
ggagatacagcacacagaccaccgtacagaagtacagcattaactggttcagaaatgtcataatttctttccgtta

SEQ ID NO: 1247 - DNA, 138 bp, Escherichia coli
  Strain O55:H7
  modified_base (103)..(106): a, c, g or t
  modified_base (112)..(115): a, c, g or t
aaaaaaccagagcacgaaagtatcgttcctttattttttctccataggtattaccaccgccagcgtccattcctgtcgctggcggttttttttatcatgccgnnnngtctgnnnngttcacttccaccgcaatgctgt

SEQ ID NO: 1248 - DNA, 169 bp, Escherichia coli
  Strain O55:H7
  modified_base (29)..(29): a, c, g or t
ctgtcacatgcagtttatccgccgcaaangcactgaccggtgactgcgtcagcgtgaacggtgtgccatcctgaccatcaataaccggcgtcacctgaaggctgttattcccggcaaarcggaagcccagcgtatgccattcgttatcaaatgcgccaaaggttcccag

SEQ ID NO: 1249 - DNA, 1 bp, Escherichia coli
  Strain O55:H7
a

SEQ ID NO: 1250 - DNA, 75 bp, Escherichia coli
  Strain O55:H7
  modified_base (8)..(9): a, c, g or t
gtggtacnncacattcaggtcttttgcatctgtctggatgtagaacgctgccagcaggttattccccccgtctcc

SEQ ID NO: 1251 - DNA, 51 bp, Escherichia coli
  Strain O55:H7
gccagtaaaacgccataacatactggttcgcagccagcactcccgaaacct

SEQ ID NO: 1252 - DNA, 31 bp, Escherichia coli
  Strain O55:H7
  modified_base (28)..(28): a, c, g or t
atctgcccccctttctgtaacagagccncac

SEQ ID NO: 1253 - DNA, 300 bp, Escherichia coli
  Strain O55:H7
gtactccagcacccagctgcttttaccggcttccttggtcagcttcactgccttacctccggttccctccgcatcgctgaccacttctgccctgccgccactggctgaccatccctgtactttcaggcttccctctgactcgctggcaaggtaagagagcagtgttgtgacgcctgtggcttctgcaccggaaggcgatgacgggcgcacctctgatactgtcgatgatgcccccgcgtttagcgccactcttcccgcatggcgcaaaatcgccgttgccagacggtcggaaataatccc

SEQ ID NO: 1254 - DNA, 115 bp, Escherichia coli
  Strain O55:H7
  modified_base (83)..(83): a, c, g or t
tgaaatggctcgccctgtcctgtgacgtccaggtggctgagctgtcacgccatttcgaaccgtaatatccgatacccggaatntccgggtcttcttccggtttgttcgtcgggac

SEQ ID NO: 1255 - DNA, 389 bp, Escherichia coli
  Strain O55:H7
  modified_base (6)..(7): a, c, g or t
  modified_base (17)..(17): a, c, g or t
  modified_base (23)..(25): a, c, g or t
  modified_base (36)..(36): a, c, g or t
  modified_base (99)..(99): a, c, g or t
  modified_base (126)..(126): a, c, g or t
  modified_base (257)..(257): a, c, g or t
  modified_base (315)..(316): a, c, g or t
  modified_base (387)..(387): a, c, g or t
acgaannggatattctnttccgnnntgtttttgtanctgccgtacaccgtctggtacgaggattcgttcttctgcttccagaaatacgtcgtgtccccncatatccagggaacaccgtcagcaganccaccgacgcactgacctgccatatccgccaggtctgcacggaatttatcaaccagcgcaccaaactgtgctgcgtgatttgccggcgtaccgccaaaatcaaattccccctgcatccacaccacggcaancagcacatttttcgggttcttcttcagtgctgcttttgttcgaccgataaggtccttnnacagcggcttgtccacaccccagcgggttgaattctccgaggcaccactcgcgtcactgtatgtgccatcngc

SEQ ID NO: 1256 - DNA, 23 bp, Escherichia coli
  Strain O55:H7
  modified_base (11)..(14): a, c, g or t
cgacagcacgnnnncagcagaat

SEQ ID NO: 1257 - DNA, 114 bp, Escherichia coli
  Strain O55:H7
  modified_base (12)..(12): a, c, g or t
tgccccacggtnccgtactgcccctttgacaggtccgctttcggatggttaaggcgactcatgtcctgcacatcatgcagacaatggtccgccggaatgatgtcgttatattta

SEQ ID NO: 1258 - DNA, 63 bp, Escherichia coli
  Strain O55:H7
ccgtactgcgacgcgccagctgcttaatgcgcgggtccggacggtcatatgtctccggcagcg

SEQ ID NO: 1259 - DNA, 27 bp, Escherichia coli
  Strain O55:H7
ccccgccagaaccacaacaaagtaata

SEQ ID NO: 1260 - DNA, 22 bp, Escherichia coli
  Strain O55:H7
  modified_base (19)..(20): a, c, g or t
ggtctctggtggcgctgannac

SEQ ID NO: 1261 - DNA, 1 bp, Escherichia coli
  Strain O55:H7
c

SEQ ID NO: 1262 - DNA, 71 bp, Escherichia coli
  Strain O55:H7
  modified_base (12)..(13): a, c, g or t
acaacaggtgtnntcacatcaccttctgcgacaatcgcctgaataagtgctgcgccatcatccgtatacga

SEQ ID NO: 1263 - DNA, 30 bp, Escherichia coli
  Strain O55:H7
tgagcaagtgcatcagcaaggtctgacggc

SEQ ID NO: 1264 - DNA, 43 bp, Escherichia coli
  Strain O55:H7
cgccctgaccacatcgtagtgtttaaatgccatgaatcctccc

SEQ ID NO: 1265 - DNA, 57 bp, Escherichia coli
  Strain O55:H7
aagttacaggacaatgacagaagagagacaacagcccgcaatacgaaaaaggccgcg

SEQ ID NO: 1266 - DNA, 23 bp, Escherichia coli
  Strain O55:H7
gaaatattacttcacgttttgtt

SEQ ID NO: 1267 - DNA, 25 bp, Escherichia coli
  Strain O55:H7
aatacacaatatttacaaaactaat

SEQ ID NO: 1268 - DNA, 20 bp, Escherichia coli
  Strain O55:H7
gccttgatggccctgcactc

SEQ ID NO: 1269 - DNA, 209 bp, Escherichia coli
  Strain O55:H7
  modified_base (40)..(40): a, c, g or t
  modified_base (76)..(76): a, c, g or t
  modified_base (97)..(100): a, c, g or t
  modified_base (147)..(150): a, c, g or t
  modified_base (178)..(178): a, c, g or t
gcacaccacgcattgcttgtgaatattgcgttcatcaaancggagttgaggtgccgcagcagttgtccggtaatgnccggcatcccactgagcagannnnagcgttccgcacgagatacatggtaagtcgcggtctctttctctgannnnggcgtttacggcttgttgggcttgtttnatccagtaactgcggggctttaaggcgagtt

SEQ ID NO: 1270 - DNA, 31 bp, Escherichia coli
  Strain O55:H7
tgctcctctcgtcgtcgtttcttctctgctg

SEQ ID NO: 1271 - DNA, 174 bp, Escherichia coli
  Strain O55:H7
  modified_base (145)..(145): a, c, g or t
gcaccaccactgatttgagaatgccgggtgaaaccattccttgcatattttgcatttccttcgcgctggtttagccatcrtcttcttcctcgtgcatcgagctattcgratcgctcatcagctctgcacagcagtgctcacacangtgaacttccagcacatgcagcttctgac

SEQ ID NO: 1272 - DNA, 188 bp, Escherichia coli
  Strain O55:H7
  modified_base (5)..(5): a, c, g or t
  modified_base (162)..(162): a, c, g or t
  modified_base (187)..(187): a, c, g or t
gcacnatgtcttagccaccggatatcccacaggtgagccgtgtagttgaaggtttttacgtcagattcttttgggattggcttgsgtttatttctggagcgtttcgttggaaggtatttgcagttttcgcagatgatgtcggtgawacttcgtcgytgtcgnctcatgccgccctcctgacgcccanc

SEQ ID NO: 1273 - DNA, 49 bp, Escherichia coli
  Strain O55:H7
aatgccgctttggatacggtagtaaacatccgtcgaggactgatgaacg

SEQ ID NO: 1274 - DNA, 23 bp, Escherichia coli
  Strain O55:H7
cctttgctgtttcccttcttctc

SEQ ID NO: 1275 - DNA, 187 bp, Escherichia coli
  Strain O55:H7
  modified_base (90)..(90): a, c, g or t
atccgtccatcagtgataatgcgaacttcgtcgacactctccagagccttgctgaaccatccgactgacatatcctctggcacaagcatnactaccgtctgtcgctgttgtatgcactgctcagcggctttttccacccacggcctgatattgctgtacggtgggttattccagattgcaccgtggc

SEQ ID NO: 1276 - DNA, 19 bp, Escherichia coli
  Strain O55:H7
aactcaatatccagtgcat

SEQ ID NO: 1277 - DNA, 55 bp, Escherichia coli
  Strain O55:H7
  modified_base (29)..(29): a, c, g or t
tttgccagcagtccttgtcgtgtgctggngtatttgatttgatagtcatgcagcc

SEQ ID NO: 1278 - DNA, 91 bp, Escherichia coli
  Strain O55:H7
aaaaggcctgcgattaccagcaggcctgttattagctcagtgatgtagatggtcatcttttaactccatataccgccaatacccgtttcat

SEQ ID NO: 1279 - DNA, 20 bp, Escherichia coli
  Strain O55:H7
ccttaaaaatcaggttcgtg

SEQ ID NO: 1280 - DNA, 74 bp, Escherichia coli
  Strain O55:H7
cgttcttccctggtagcaaaccggtaatacaccgttcgccagaccttaccttcgataaccagaagacctgcccg

SEQ ID NO: 1281 - DNA, 54 bp, Escherichia coli
  Strain O55:H7
  modified_base (51)..(51): a, c, g or t
ttatgctggttactgttgcgcctgttagcgcggcaacgtccggcgcacagnagc

SEQ ID NO: 1282 - DNA, 98 bp, Escherichia coli
  Strain O55:H7
ataattgcttctttgcccgtcatagacttgctcctttcagtccgaacttagctttaatttctgcgatcttcgccagcgcctgaacacgatttagaggt

SEQ ID NO: 1283 - DNA, 23 bp, Escherichia coli
  Strain O55:H7
gaagttgttttactggttcaggt

SEQ ID NO: 1284 - DNA, 136 bp, Escherichia coli
  Strain O55:H7
  modified_base (38)..(38): a, c, g or t
gcgcggtcatacaggtcagttcatcggcagccttgcgncgtaattccgcgtcagtcagcgcattggctcgcatgttctggtacaggttggtaaccagccagtagtgcgcgttcgatttccatggataagactccgc

SEQ ID NO: 1285 - DNA, 152 bp, Escherichia coli
  Strain O55:H7
  modified_base (105)..(108): a, c, g or t
ccggcaatactcgtaaaccatatcaaccagctcgctgacgtttggcagtccggcgataacggatgcttcttcccggcaccatgcaacaaactgcccgggtgatgnnnnaaatggtcgattctgccgacgggctacgcgcattcctgcgttaa

SEQ ID NO: 1286 - DNA, 323 bp, Escherichia coli
  Strain O55:H7
  modified_base (45)..(45): a, c, g or t
gttttcccggaaagccagaacccactggcggcggatttcgttcanttcgttctggtcacggttagccaggctcgccgggaaagttgccagtaactggctgaacacaccgttgatgatctgcgctacctgctgtacctgcggcttttcgtcgtactgttccggcatgttgttggcgatccgacgcatctgctcacggtcaaagttaaccatctgtgcggcgatgtttttcatagatccaccccgtaaatccagtctgtgtttgtcaggtcgagttttggtttgctggctgtcacgactgcctgttgcttgttacggttgatttc

SEQ ID NO: 1287 - DNA, 89 bp, Escherichia coli
  Strain O55:H7
agaagttgtcctggcatgcccagcggaacagtacacacatgtcgcgatggttacgtccgtcacgttcacgcatcaggcggatatcgtta

SEQ ID NO: 1288 - DNA, 659 bp, Escherichia coli
  Strain O55:H7
caggtcttctgctgtcccccacttgctgccgctctgaattgcagcatccggtttcaccacagaaaggtcgttttctggctggtcagaggattcgccagaattctctgacgaataatcttttcttttttcttttgtaatagtgtcttttgtgtccccctgttttgagggatagcaatcccccaatttgagggatgttttatccctcgttttaggggattttccctcgttttgagggatacaccattctgagatgtttttatttggtccaaacatgccgccttgctgcttgataatattcattctgacgagttctaacttggcttcattgcaccgtttgacgggtaactttgtaatctcgctaagttgagaatcggtgattctgtccattggtttattccacccataggttttacgcagaatggcaagcagcactttaaactgtcgcttggtcagatctgcgcccgaataagcctcaagcagcatatttgatagtctggcgtaaccatcatcgagatctgccacattacgctcctgtttggcaaagttacctctgcagaagttgagtatttttgctgtatttgtcataatgactcctgtagatttatccagtaatgacctcagaactccatctggatttgttcagaacgctcggttgccgc

SEQ ID NO: 1289 - DNA, 2009 bp, Escherichia coli
  Strain O55:H7
  modified_base (323)..(324): a, c, g or t
  modified_base (334)..(335): a, c, g or t
  modified_base (1890)..(1891): a, c, g or t
  modified_base (1893)..(1895): a, c, g or t
  modified_base (1961)..(1962): a, c, g or t
  modified_base (1964)..(1966): a, c, g or t
  modified_base (1968)..(1971): a, c, g or t
  modified_base (2003)..(2004): a, c, g or t
tttttattggtgagaatcgcagcaacttgtcgtgccaatcgagccatgtcgtcgtcaacgacaccccattcaagaacagcaagcagcattgagaactttggaatccagtccctcttccacctgctgatctgcgacttatcaactcccacagcttccgctgtcttctcagttccaagcattgcgattttgttaagcaacgcactctcgattcgtagagcctcgttgcgtttgtttgcacgaaccatatgtaagtatttccttagataacaattgattgaatgtatgcaaataaatgcatacaccataggtgtggtttaattggnngccctttttnngggcggggatgtgtaagagcgggaatgtcttaagcggctttaccgcgtttagttccgtactgtaaccaaaccggatcacagttaagcgccatagctatctcaaacaagaagcgcggtcgcttggttactccagcttcaatcagttgaattgattgctgtttaacaccggctttggttgccagttcggtttgcgtcatttttaacgcaattcgcctcttcttgaggcgttcagaaagagtttgcatatcgcctccattaacaaactttcttgtattttcatacaatgtatgttgtttgtcaaatacagtttttcttgtgaagattggagataaataacagaggtggcttatgagtatttcttccagggtaaaaagcaaaagaattcagcttggacttaaccaggctgaacttgctcaaaaggtggggactacccagcagtctatagagcagctcgaaaacggtaaaactaagcgaccacgctttttaccagaacttgcgtcagctcttggcgtaagtgttgactggctgctcaatggcacctctgattcgaatgttagatttgttgggcatgttgagcccaaagggaaatatccattgattagcatggttagagctggttcgtggtgtgaagcttgtgagccctacgatatcaaggacattgatgaatggtatgacagtgacgtgaacttattaggcgatggattttggctgaaggttgaaggtgattccatgacctcacctgtaggtcaaagcatccctgaaggtcatatggtgttagtagatactggacgtgagccagtgaatggaagccttgttgtagccaaactgactgacgcgaacgaagcaacattcaaaaaactggttattgatggcggtcagaagtacctgaaaggcctgaatccttcatggcctatgactcccatcaacgggaactgcaagattatcggtgttgtcgtagaagcgagggtaaaattcgtatgatcaggattgcagcgctactcacaatactcttaactaccagcgccaattctgaatgctggattgtcacaaacctgcacgggtacggggcaatgaatggcgatcgttacggatttacaaaagacagcacggaagattccgttttccacgtaacaattaatggcgataaatcatcggtttatgaatcagtctctggcgtctatccagagatgaaatacactgctttgtcatcgaacactatggtaggggaataccagtcaggaggaggaataactgttgaaacttggtcaatcactacagacaaaaaagctctttactccaaagtaatgaatatcccaggcatgcaacaacttacatcaaccaaatcctttgttggtgatgtagtcggaacctgcaaccagtaatccccacctcaatctcaataaccaaaaaacaaactattttccgtttaaaaacaatggagtttgttttgtatacctctttttacaatatttcttgtttacagcatacaatctttcttgtaattttaaaccatcagcaggacgcactgaccaccatgaaggtgatgctcttaaanntnnngccctgaagaagggcagcattcaaagcagaaggctttggggtgtgtgatacgaaacgaagcattgnncnnnannnngattccggattagctgccaatgtgccaatcgnnggggg

SEQ ID NO: 1290 - DNA, 66 bp, Escherichia coli
  Strain O55:H7
aggactacaactgccacacaccaccaaagctaactgacaggagaatccagatggatgcacaaacac

SEQ ID NO: 1291 - DNA, 23 bp, Escherichia coli
  Strain O55:H7
  modified_base (2)..(5): a, c, g or t
gnnnnaggctcaatggaaagcag

SEQ ID NO: 1292 - DNA, 136 bp, Escherichia coli
  Strain O55:H7
  modified_base (30)..(33): a, c, g or t
  modified_base (97)..(98): a, c, g or t
  modified_base (102)..(103): a, c, g or t
  modified_base (105)..(106): a, c, g or t
ctcgctgaatcgcaaaccgaaatcacgagnnnnaagcgcactaaatccgatagaccttacagtgctggctgaataccacaaacagattgaaagcaanntgcnncnnattgagcgcaagaatcagcgcacatggtac

SEQ ID NO: 1293 - DNA, 41 bp, Escherichia coli
  Strain O55:H7
ggcataacatgcagtggacgccagaaaattaagggaaaatc

SEQ ID NO: 1294 - DNA, 22 bp, Escherichia coli
  Strain O55:H7
agttacttagatattggccttg

SEQ ID NO: 1295 - DNA, 50 bp, Escherichia coli
  Strain O55:H7
  modified_base (21)..(22): a, c, g or t
  modified_base (24)..(27): a, c, g or t
  modified_base (30)..(30): a, c, g or t
  modified_base (46)..(47): a, c, g or t
aactaattcagtccagtaaanntnnnnaanagggaataatatatgnntcc

SEQ ID NO: 1296 - DNA, 23 bp, Escherichia coli
  Strain O55:H7
  modified_base (5)..(7): a, c, g or t
  modified_base (16)..(17): a, c, g or t
caggnnncgacttgtnntgatta

SEQ ID NO: 1297 - DNA, 23 bp, Escherichia coli
  Strain O55:H7
  modified_base (2)..(3): a, c, g or t
annaataacgattcactcgaggc

SEQ ID NO: 1298 - DNA, 23 bp, Escherichia coli
  Strain O55:H7
  modified_base (9)..(10): a, c, g or t
  modified_base (12)..(13): a, c, g or t
gagttcagnnannaacgcttatt

SEQ ID NO: 1299 - DNA, 23 bp, Escherichia coli
  Strain O55:H7
  modified_base (21)..(22): a, c, g or t
tcgctatgcatcggtcatttnna

SEQ ID NO: 1300 - DNA, 23 bp, Escherichia coli
  Strain O55:H7
ggccagcaaaaaagccattaccc

SEQ ID NO: 1301 - DNA, 23 bp, Escherichia coli
  Strain O55:H7
  modified_base (2)..(3): a, c, g or t
  modified_base (18)..(19): a, c, g or t
gnnagaacacatccggtnnatgg

SEQ ID NO: 1302 - DNA, 53 bp, Escherichia coli
  Strain O55:H7
tcagaggtataaaacggatgagtacagcactcgcaacgctggctgggaagctg

SEQ ID NO: 1303 - DNA, 48 bp, Escherichia coli
  Strain O55:H7
  modified_base (4)..(5): a, c, g or t
  modified_base (7)..(8): a, c, g or t
  modified_base (13)..(14): a, c, g or t
  modified_base (22)..(25): a, c, g or t
gganncnntcganncacaggannnnatcaccactcttcgccagacggc

SEQ ID NO: 1304 - DNA, 23 bp, Escherichia coli
  Strain O55:H7
  modified_base (14)..(15): a, c, g or t
cgcaaggaccgtanncatccgat

SEQ ID NO: 1305 - DNA, 23 bp, Escherichia coli
  Strain O55:H7
gcccgtctggccttcggatttgc

SEQ ID NO: 1306 - DNA, 22 bp, Escherichia coli
  Strain O55:H7
  modified_base (2)..(3): a, c, g or t
cnnaacgcgacatcactccggt

SEQ ID NO: 1307 - DNA, 23 bp, Escherichia coli
  Strain O55:H7
tgcctggtactttgccaactatg

SEQ ID NO: 1308 - DNA, 23 bp, Escherichia coli
  Strain O55:H7
  modified_base (2)..(3): a, c, g or t
gnnaataccagtagaaacagacg

SEQ ID NO: 1309 - DNA, 23 bp, Escherichia coli
  Strain O55:H7
  modified_base (2)..(3): a, c, g or t
  modified_base (5)..(5): a, c, g or t
gnngnattgcccgtcaggctaat

SEQ ID NO: 1310 - DNA, 23 bp, Escherichia coli
  Strain O55:H7
cgatgacatttgccgtagcgtac

SEQ ID NO: 1311 - DNA, 23 bp, Escherichia coli
  Strain O55:H7
  modified_base (9)..(12): a, c, g or t
tcgcattcnnnntcaagcgtatt

SEQ ID NO: 1312 - DNA, 23 bp, Escherichia coli
  Strain O55:H7
  modified_base (5)..(5): a, c, g or t
agacntcattgattcagcatcag

SEQ ID NO: 1313 - DNA, 28 bp, Escherichia coli
  Strain O55:H7
gtatccgcaactcattgttgtgagtgtg

SEQ ID NO: 1314 - DNA, 38 bp, Escherichia coli
  Strain O55:H7
  modified_base (5)..(6): a, c, g or t
  modified_base (27)..(27): a, c, g or t
  modified_base (29)..(30): a, c, g or t
  modified_base (34)..(37): a, c, g or t
ccganngatgaactaagacgcctggcngnncagnnnng

SEQ ID NO: 1315 - DNA, 32 bp, Escherichia coli
  Strain O55:H7
gttgccaggaggatctggaacttatcagtaaa

SEQ ID NO: 1316 - DNA, 33 bp, Escherichia coli
  Strain O55:H7
  modified_base (2)..(3): a, c, g or t
  modified_base (6)..(7): a, c, g or t
gnncgnngtgagcgaaattaattaccaggcact

SEQ ID NO: 1317 - DNA, 104 bp, Escherichia coli
  Strain O55:H7
  modified_base (58)..(58): a, c, g or t
ggatgaacgggaaagaaacctgcaatacatcaaaagccgcgatcaggagaacgagganattgcgctaacggtagggaagctgcgcgttgagcttgaagcagaaa

SEQ ID NO: 1318 - DNA, 171 bp, Escherichia coli
  Strain O55:H7
  modified_base (107)..(110): a, c, g or t
tcgcatcaaaggagagtgatatggcgttaacacaccacgaactctgtcagattgcgtacaagttccttaagcgcaacgggttcaaggtttgctttcatgaccgcttnnnngctgtaaccagtaccggagaacagccagatgctatgggattcagaaattcagcatcatgcc

SEQ ID NO: 1319 - DNA, 82 bp, Escherichia coli
  Strain O55:H7
  modified_base (45)..(45): a, c, g or t
  modified_base (54)..(54): a, c, g or t
  modified_base (80)..(81): a, c, g or t
gctgacttgttggcagatagaaaaaagcgtttccgtaaaaatccntcacttggnatgggcgactggcgattctttattanng

SEQ ID NO: 1320 - DNA, 648 bp, Escherichia coli
  Strain O55:H7
ctggggattacttcacgttgttaacggaagagtacggaaagtacatggatggcccaggggtaattgctgttggggtaatcctgacgataagccatttactgggaataagcaggttgaatgcgattacatgttatctgcattaaggcgcatggagttgagagggcaccttaatgaaatatatgacggtgtgattgttaataagaaagaaggaaacgcggcatgatcactattaccaaagggcgactgctgacaatcaagcagtggcgcgaaacatacggaccgggtagcaacgttgtactgccagcagaagaagcggaagaactggcacgaattgcactggtatcgctggaagcagagccggtggcaaagattatagctcattacccattaggagttgacgtaggcaaacaaaagttcgtacaggccattggagagcttcctgactttggcggatatctatttgccgccccgccagcgccggtagtgccggaagaagcaactccggaaaacgtagaaatgctctctggctatgtttccacgtacaaattaaccgatagcgagcgcgatattgctgccgaaatatggaacgcctgccgcaccgccatgcttcagtccggaaactttcgggaaagcaagaattcgtcaacc

SEQ ID NO: 1321 - DNA, 2025 bp, Escherichia coli
  Strain O55:H7
  modified_base (885)..(885): a, c, g or t
  modified_base (1437)..(1437): a, c, g or t
  modified_base (1664)..(1666): a, c, g or t
cgggaaatcccggaagcgtcaaccagctctccggtaactccggctcttctgcctggtggtttcaccattgaggaggcgaaggaattacatgaagacctggtacgcagccacataagcaaggccttaagtggcgaaaagatgaaaaagaaagatcgcgatgctgatttgcgctggattcatggcgttatagttcaggcagcgtggtttgtaaaagcatcactggagcagaatgcactatcgggcaactctccggtaactccggatggttggataagctgtagtgagcgaatgccggacgacaggcaggaggtgaatcaatgagctggcctgatgcaatcgtaactctgggggtggtattcgcagcagcgtttgttgtgttctcgatttgtcgatggggataaccacatgttcgctttgattcaacgcggtcagatatacacggacagagctggataccccgtggtgattactcgcatcactgagcactcagtgttctttcgacggatggacggacgatccgggcgggtacgcattggtgagttaaactgcctgttcgaacatattgaccaccaggagtaccgcaaaattctcgcggacactgagcaggaaaagcacctgaaaaaattacgagccataaaaaggaagtaaagaatgaataaagcatttgaacgatgggtccaccagcgttacggcaatcgctatgacctgacgcgagatgttgacggcttctactgtcgtgaagttgtgaagcgaatgtttgaagtgtggtgccactgccgtggatgaaaattttatgaggttggcatgcagacaatcatctatcagataacccccagcaaatggtgtacggagagagtcctcattgcatcaacagggctaaagccnggcaccattgagcgggcaagaagaaagtcatggatgcagggaaaagaataccgccattacgctgtagaaggtgatccggggcactacagtgaatgcctgtacaacatcgaagaaattatgcgatggatcgaaaaccagaaacaaccaggtgccaaaaatgcaagttccggttaacctgttaatgctcctggacgtctgggaggtttaatgagtaacgcatcatacccgacaggcgttgaaaaccatggaggatcactccgtatatggtttcactataatggcaaacgtgtcagagaaaacctcggtgttcctgacacagccaaaaaccggaagatcgctggtgaacttcgcacttccgtttgttttgcaatcagaatggggagtttcgactacgccgcgcagttccctaattcccctaacctgaaacactttggtctgggaaaaagagagataaccgttaaggcactttcggaaaaatggttggaccttaagaaaattgagatttgtgcgaatgcacttaatcgttaccagtcagtaattaaaaacatgttncctatgttgggtgagaaaaaactggtttcatccataacaaaagaggatttacttttcgcaaggagagatttgttgaccggttaccaaaagctttctaatggaaagatttcttccataaaagggcgctcagtggtcacagtaaactactatatgacaaccatagctggaatgtttcaatttgcaacagataatggttatacctcaggaaacccatttaacggtctggnnnccttaaaaaagtccaaggtaaaaccagatcctctcacccgtgacgaatttattcgttttattgaagcttgccgtcatcaacaaacaaaaaacctgtggattctcgctgtatacacgggtattcgtcacggggagctggtatcgctggcatgggaagatatagatcttaaagcaaggactataaccatccgtaggaattatacaaaacttggcgaattcactccaccaaaaaccgatgctggcaccggaaggacaattcatctggttcaaccagctattgatgctcttaaaagtcaggcggaaatgaccatgcttggaaagcaacattctgtagaggtaaagcagagggaatatgggaga

SEQ ID NO: 1322 - DNA, 24401 bp, Escherichia coli
  Strain O55:H7
  modified_base (404)..(404): a, c, g or t
  modified_base (3603)..(3603): a, c, g or t
  modified_base (4025)..(4025): a, c, g or t
  modified_base (4271)..(4274): a, c, g or t
  modified_base (5824)..(5824): a, c, g or t
  modified_base (8435)..(8438): a, c, g or t
  modified_base (8836)..(8836): a, c, g or t
  modified_base (9482)..(9485): a, c, g or t
  modified_base (10788)..(10788): a, c, g or t
  modified_base (11922)..(11922): a, c, g or t
  modified_base (12684)..(12684): a, c, g or t
  modified_base (12759)..(12759): a, c, g or t
  modified_base (12873)..(12873): a, c, g or t
  modified_base (13536)..(13536): a, c, g or t
  modified_base (13789)..(13789): a, c, g or t
  modified_base (14818)..(14818): a, c, g or t
  modified_base (15676)..(15676): a, c, g or t
  modified_base (15683)..(15683): a, c, g or t
  modified_base (16025)..(16025): a, c, g or t
  modified_base (16373)..(16376): a, c, g or t
  modified_base (20850)..(20850): a, c, g or t
  modified_base (23431)..(23431): a, c, g or t
  modified_base (24012)..(24012): a, c, g or t
  modified_base (24316)..(24316): a, c, g or t
tgtgcataaatgcacttttgtttttagtcctcaggtaataaaacagcggcagttttccggaccgcactataaggttgactccatcagggagtcatggacaagtatcttaaaacgcgcaggtctgagacacagaaaatcgtaccaatccaggcatacttatgcatgctggtcacttgccgctggagctaatcctagttttatcgcaagccagatgggccacacaaacgcacaaatggtattcaatgtttacggagcatggatgaaagacaacaatcacgaacagatagaactccttaacaaaagactatctgaaagtgtcccatgtatgccccataagaaagctgggtaaaataaaaacttgcaaaatcaattagtttacccttaatccctgtcacgttacgcgngtggcagaggcgttacggattgctgaaaccgcaacggacagacggcggtcatcggctgttcaacgatgccgatattgaccggatccgcgagatcaaacgctggatcgacaacggcgtgcaggtcagcaaagttaaaatgctgctcagtaatgaaaatgttgatgtgcagaacggctggcgcgatcagcaagaaacattactgacctacctgcaaagcggcaatctgcatagcctgcgaacgtggatcaaagagcgcggtcaggattaccccgcccagacgctcaccacacatctgtttattcctctgcgccgacggcttcagtgccaacaaccgactctccaggcgctgctggcgatcctcgacggcgtactgatcaactacatcgccatttgtctggcttcggcacgtaaaaaacagggtaaagatgcgctggtggttggctggaatattcaggataccacccgtctgtggctggagggctggattgccagtcaacaaggatggcgcattgatgtcctcgcccactcgctcaatcaactacgccctgaactattcgaaggccgtacattgctggtgtggtgcggtgaaaatcgaacctccgcccaacagcagcaactcaccagttggcaagaacaaggccatgatattttcccactcggcatttaatgattcgttaacaaatgcgctttactgtacaatcctttcgttaacataaggagtgcattatgcgcatagctaaaattggggtcatcgccctgttcctgtttatggcgttaggcggaattggtggcgtcatgctcgcaggttatacctttattttgcgtgctggctaagcgcctgcaccagcctttcaaacaggcggtctgcgatgatcgccgccagtgccaccagtaacgccccctggatcacatacgcggtattaaatccgctaagcccgatgatgatgggcgtacccagcgtgctggcccctaccgttgaggcgatcgtcgccgtaccaatgttgataatcaccgaggttcgcacgcccgccagaatcaccggagccgccagcggtagctcgaccttacgcagtcgctgacctcgactcattcccatacctttcgcaacttctgtcacgctggcatcaatcgctcccagcccggcaagtgtcgcctgcaggacgggcagcacaccataaaggatcaaggcgataatcgctggttgcagaccaaagcctatcaccggaacagcaatcgccagcactgcgacaggcggaaaagtctgcccaacggcggcaatagtttccaccagtgggcgaaattccgcgccccacgggcgagtgactgcaattccggcaccagtgccaatgatcaccgcaaacaaactcgaaattcccaccagccagaaatgagccagtgccagagctgcaaaactttcttgctgataaacgggtcgtggcagttgtgggaacaaggcagcaaacagcggctggctgtaaggcagccagaaaatcagtgccacaaacaaagcaatgagccagaacagcggatcgcgcaacatcttcatacgcttacgcctccaccagcagatcctgaaaatgcagcgtgccgctaggctggccctgcgtgttcaccaccggcagcacctcgcatccccgcgcgacaaacagggagagcgcatcgcgcagcgtcatctcttctgccagtgcctcaccttctgcccgttcttcgcgacgcacgtaatccgccacactacgtaacgaaagcaggcgcacacccagttcactacgtccaaaaaactggcggacaaaatcattcgccggacgagtcagcatcgtcagcggattcccctgctgcaccacttcaccgtgatccatcaataccagatgttctgccagccgtagcgcctcatcaatatcatgcgtgaccagcacaatggtacgccccagcaaacggtgaatgcgcgtcatctcttgttgcaacgcgccgcgcgttaccgggtccagtgcgccaaaaggttcatccatcagtaagacttgcggatcggcagccagtgcgcgcgctactcccacacgttgctgctgaccaccggaaagctgatgtggataacgctcacgtaaatttgactccagccccagtagcgccattaattcgtcgatacgatcgtcaatcctcgcccgcgaccatttttgtaattgcggcacggtggcaatgttttgtgccacgctccagtggggaaacaggccaatagattgaatggcatagcccatacggcggcgcaactccagtactggcagcgagcgaatttcttctccggcaaagcggagctctccgctgtcatgttccaccaggcggttaatcattttcagggtggtggatttgccggagccagatgtgccaatcagcaccgaaaaactcccttcctgaaaattgagattgagatcgttaacggctttttgtgcgccgaacagtttgctgacatggctaaattcaatcattacgtttcaccttcaacagtgcgattagtaaatcgaacagcgcatcgatcagcaccgccagaacaattaccgggatcacccccagcaacactaaatcaatggcgctgcttagcagcccctggaaaaccagcgcaccaaaaccgcctgcgccgattaacgccgcaatcaccgccatgcctacagtttgcaccatcaccacccgcaggctgcgcagaaataccggtaacgccagcggtaactgaacatgcaggaatcgctgcgccccgctcatgcccatcgctctggcgctctccagcacatcgcgcgggatctggttcaagccgactaccacgccgcgcaccagcggtagcaaggcatagagcaccagcgcaatcagtgcgggtgtcattccggttcctgctatgccaagcttccccagccacggaaaggccgtaaccagtccggcaagcggcgcaatcagcaggccaaagagcgccacggaaggcacggtctgaatgacattgagcagagaaaaaatcgccccctgccgcgcggtggaaaagtagcaccagatgcccaacggcacaccaatcactaacgcaggcagcaccgcaccaaacagcaacgtcagatgttgtgccagcgcgtcgtcaaacacatcctgacggttggcgtattctttcattagtgagagatcgttaagcgtgccggagtacagcaaccacagcggaataatggcaatntgcatatgcaacaaccagcgccacagcggatgcgtggagattcggcggatggcatcgctacaggccagcaatgccagcgccgaagccagccagaaaccactgccgaggctggtacgcgccagcgcactgccattttgcgccagttgggtcgccgcctttccagctccccacaccagcaatacgaagacgaattgcgccagaatgagtgcaaaaatgctgccttttttagcgggaataaaacaggctgtcagccaggcgcaaccaacgcccaccagcatccagatcgtttgcggccacagttgccagagatgacgcccttcacccgagactaaacgattaggcgcgtagctgataaacggcagcgctgctgcgattgccgtcagcaacagcagcagcgccagaacaggattaatacgtagatnagtcacgggaaattacttcgtccaccctttttgtttcaagtagtcggcagccacttttttggcatccagtccttccactgcaatgctggcattcagttgctgcaatgtttttgcatcgaggctggcgaagactggctgtagccactgtgccatttgcggatactctttcagcaccgactcacgcaccactggtgcaggcgcgtagataggttgcacgccttgcggatcgcttaaggtttgcagccnnnncgccgcgaccggaccgtcagtgccgtaagccattgcggcattaacgccagaagtttgctgggcagcggctttaatcgttaccgccgtgtcgccgccagccagtgacagtaactgatcctgatcgagtttaaagtcgtaggctttttcaaacgcgggtaacgcatcggcgcgttcgataaactcagccgaggctgccagtttgaaggtgccgccctctttcagataacgcctcaggtcagcaagcgaagtgagtttgtttttctctgccacatcctgacgcacggcgatggtccaggtgttatttgcaggtgcgggcgtcagccagattaacttgttttgctctgcatcgagttttttgactttctcgtaaccttgctgcgcgtttttccacgctgcatcgttttcatctttaaagaaaaacgcgccattgccggtatattccggatagatatccagttcaccggaagtaatcgccccgcgcaccacaggagtcgttccaagttgcactttattgaccgttggtactccgtggctttcgagtacttgcaaaatgatattgccgagcagcgcgccttcggtatcgatttttgaaccgactttaacgggggaagccgcgtgcagcggcaggctcacggctgccaacaaaaccagtgaacctgcccagacctttgagagtggcatgatgctttcctcattcttttactgttgttttcagcgaattaagagaaaagcatagttgataatggcgggattagcctgagcggacggattcagttgcagaatcagataaatacttaagaggcatattcggtccggcgtttcctgccggatgcggcgcgagcgccttaaccggcctacaaagggcgaaaattcagcaagttaagatatgaacatcaggcaaagggcgcaaacgtcgcgcccttgctaaagcattacagcaactcaaactcgcctttcttaacgcgtgcggaatcagtgccgataaagacattgaacttgccaggctcggcgtcatatttcatctgttgattccagaacttcagcgcctcgatatcaatcgggaagctgacggtctgggtttcgcccggcttcagggtgattttctcaaagcctttcagctgcttcactggacggctcatggaagccgtcacatcctgcaagtacatctgcactaccgtggccccttcgcgtttaccggtgttcgtcacctgcacgctggccgtcactttgccgtcacgcttcatggtcggcgcagaaagtttcacatcagagacggtgaaagtggtatagctcagaccatagccgaacggataaagcgccccgttagcttcatcaaaataacgcgaagtgtatttgttcggcttgtcggcattatacggacgaccggtgttcagatggctgtagtacaccgggatctgcccgacagaacgcgggaaggacatcggcagcttaccggacgggttgtaatcgccaaacaacacatcggcaattgcattaccgccttcagtcccggcaaaccaggtttccagaatcgcatcagcctgctgatnttctttcaccagcgccagcggacgcccgttcatcagcaccagcaccagcggtttgccggtggctttcagggcggcaatcaaatcacgctggctttgcggaatagtaatatcggtacggctggaggcctcgtgcgccatcccctgtgcttcaccgactacagccaccaccacatcagattgtttcgccgtctgcaccgcttcatcaatcatctcttgcggcgaacgcggatcgactttgaccgcttcttcatactgattcaggaaatcgataatgcctttgtcactggtaacgttcgcccctttggcatacagcactttaccgttttcaccgacggcatttttaatcccggtcagcacggtcacggattgatcggcaacacctgccgccgaccagctgcccatcacgtcacgtttactgtccgccagtggcccaaccaccgcaatggtggctgattttttcagcggtaacgtttcgagacggtttttcagcaacaccaggctttcacgcgccacttcacgcgcttctttgcggtgcaggcggctttcggcattggtatccaccgggtcagactctttcggaccgagatggctgtatgggtcgttaaacaaccccatatcatatttaacgttcagtacatggcgggcagcatcgtccagctctgccatcgtcactttaccggatttgatcaacccaggcagatacttcgagtagtactcgtcgctcatgctcatgttgattccggatttcagcgccacgcgcactgcatcttccggatctgccgccgtgccatgtttaatcagctctttgattgcaccgtgatcggaaacggtgatgcctttaaagccccactggtcgcgcagaacatctttcagcagccaggagtcggaggtggctggcgtgccgttcagcgagttcagcgccaccatcaccgcgccgctgcctgcgtccagccccgctttgtacggcggcatataatcattaaacaggcgctgcggactcatatcgacggtgttgtactctttaccgccttctaccgcgccgtatgcggcaaagtgtttgacgctggtcatcaccgagtaacgatctgccgggcttttaccctgcatcgcttccaccatggttttacccattattgaggtgagatacgtatcttcgccaaaaccttcggaagcacgtccccagcgcggatcgcgcgagacatcgaccatcggtgcccaggtcatattcaggccatcatctgccgcttcataagcagagacacgtccgaccgtttttactgcatcgaggttaaaagacgaggccagaccgaggctaatcgggaacaccgtgcgctgaccgtgcagcacgtcgtaagcaaagaaaagaggaattttcaggcggcttaattccatcacctgatcctgcatggcgcggatatcctgacgggttacggtgttgaaaatagccccaacctgaccgtctttgatcatctcgcggatcgcctctttcgggttatccgggccgacgctgattaagcgcagctgaccaattttctcatcaactgtcattttcttaagcagttcggtgacgaacgcatcccgcgcttcaggcgttaatggatggttaccgaataaatcatccgccagtgctggctgcagggccagactcaccgcgattcctactgaacatagccatttcatatggatttttcttcctttgttgcccgacgtggcagcgaaaatggtgcaaaaaccgtagtttgccataagcatgatggagagagaaaaagaatgctcagtttattgtctgaattttcaaaatattcactcgctgaattgtcatacaaggcgctattctagtttgtgatgttttttcgccaccacaaggagtggaaaatgtcttccatgacaacaactgataataaagcctttttgaatgaacttgcccgtctggtcggtcattcacacctgctcaccgatcccgcaaaaacggcccgctatcgcaagggcttccgttctggtcagggcgacgcgctggctgtcgttttccctggctcactactggaattgtggcgggtgctgaaagcctgcgtcaccgccgacaaaattattctgatgcaggctgccaatacaggcctgaccgaaggatcgacgccaaacggtaacgactatgatcgcgatatcgtgatcatcagcaccctacgtctcgacaagctgcacgttctcggcaagggcgaacaggtgctggcctatccgggcaccacgctttattccctggaaaaagccctcaaaccgctgggacgcgaaccgcactcggtgattggttcatcgtgcattggcgcatcggttatcggcggtatctgtaataactctggtggttcgctggtgcagcgtggcccggcgtataccgaaatgtcgttattcgcgcgtataaatgaagatggcaaactgacgctggtgaaccatctggggattgatctgggcgaaacgccggagcagatccttagcaagctggatgacgatcgcatcaaagatgacgatgtgcgtcacgatggtcgtcacgcccacgattatgactatgtccaccgcgttcgtgatattgaagccgacacgcccgcacgttataacgccnnnncggatcggttatttgaatcttctggttgcgccgggaagctggccgtctttgcagtacgtcttgataccttcgaagcggaaaaaaatcagcaggtgttttatatcggcaccaaccagccggaagtgctgaccgaaatccgccgtcatattctggctaacttcgaaaatctgccggttgccggggaatatatgcaccgggatatctacgatattgcggaaaaatacggcaaagacaccttcctgatgattgataagttaggcaccgacaagatgccgttcttctttaatctcaagggacgcaccgatgcgatgctggagaaagtgaaattcttccgtccgcattttactgaccgtgcgatgcaaaaattcggtcacctgttccccagccatttaccgccncgcatgaaaaactggcgcgataaatacgagcatcatctgctgttaaaaatggcgggcgatggcgtgggcgaagccaaatcgtggctggtggattatttcaaacaggccgaaggcgatttctttgtctgtacgccggaggaaggcagcaaagcgtttttacaccgtttcgccgctgcgggcgcagcaattcgttatcaggcggtgcattccgatgaagtcgaagacattctggcgctggatatcgctctgcggcgtaacgacaccgagtggtatgagcatttaccgccggagatcgacagccagctggtgcacaagctctattacggccattttatgtgctatgtcttccatcaggattacatcgttaaaaaaggcgtggatgtgcatgcgttgaaagaacagatgctggagctgctacagcagcgcggcgcgcaataccctgccgaacataacgtcggtcatttgtataaagcaccggagacattgcagaagttttatcgcgagaacgatccgaccaacagtatgaatccggggatcggtaaaaccagtaagcggaaaaactggcaggaagtggagtaaaaattacggatggcagagtatcgccatccgaattcacttaatcgttctgtgccgtctgccccgccgnnnncatttgggcggctttttgttttttatagcttaacgctgctgccggaacaggcatcactttaccggtttcaatccaggtacgcaggcggctggcatcggcaaaatgggtgtatttgccaaacgcatccatcactaccagcgccaccggtttattattgataaccgtacgcatcaccagacaatggcccgccgcattggtaaagccggttttggttagctggatattccagttatcgcgatacaccagatgattagtattgcggaacggcagcgtatacgtcgggttagagaaggttgccatatcttcccgggtagtacttaactgcccgatcaacggatattgtttgctggcaatgagcagtttggttaagtcacgggcggttgaaacgttatgcaccgacaatccggtaggttcaacaaagcgcgtgttgttcattccgagcgatttcgctttcgcattcattgccttaataaaggctttgtaaccaccgggataatggtgcgcaaggcttgccgccgcgcggttttctgaagacatcagcgccagcaacagcatatctttacggctgatttcgctattcagtcgtacgcgcgaatagacccctttcatctccggcgtctggctgatatccacttttagtttttcatccagcggcagtcgtgcatccagcacgaccatcgcagtcattaatttgctgatagacgcaatcggacgcaccagatccgggtggttcgaatagatcactttgttggtattcagatcaacaatcatcgcgctaccggaggcaatttccggttgtgaagcggtggtagcggctgccgttttcgcaacggcctgcggtgccaaaggcacagccagcatcagggccaggctaaataaagaaactcgaaatttcggcatgatgagcattcagatagtggttcacgcgcacgggttgcgcaccgccggagtaaggatttactgaggctagcgacgccatcataacgagcaaaaagtgcgatcgtcaaaggagaatcgtgaggaaatgctgcattgctgacatttacgccagcaatgcaacgtcaaagaactttctagaacaaacgataaccgtagccccatagtataacggtaagggcgagcagcacttccagtaccagcacgccaatcgccagcgtcgaactggagaagctaaggccttcctctttgttgatattcaggaagctcggaataccaaggtaaagtaggtaaccggtgtaaaacagtgccaccgtgccgaccagcgcacacaaccagaccagcggataaagcgccaccagaccanttaaaaacagcggagttgcaacgtagcccgcgaagaccatgcagtgcgcaagtgacggacgctgcggataattacgcgccatccaccagatgacccgccccatcaccgcgaccccagcgagcataacgccataaaacaggacagccagcgccagtccggtaaaccaggataacttcaggatagtgccatcgccaaaattccagccaatctgtgtagtgccaatgaaggcgcaaatcaccggaatcgccgccatcagcaaaacgtggtgggtgtaatggtgagaaatcgtttcgttttcgcgattaatcacctgcatttcacgatcgggatgggaaaacagtccccagacatggctcataccgcccccttgttgtgagttcatgaacctgacagttcaagtataagtcagcttgtgattattttttgttcgcccatgtaatttgcaccgtctgatgtacgtcctttttcagcgtgaatgattcacagggtgtatgcttacaggcaaccaaagggagacagactggcctatggatctcaatacactcatctcacaatatggttatgccgcgctggttatcggtagcctggcggaaggtgaaaccgtgactttgctgggaggcgttgcggcacatcaggggctattaaagttcccgctggtggtactttctgtagcgcttggcggcatgattggcgaccaggtgctctatctgtgcgggcggcggtttggcggtaagctgttacgccgtttctctaaacatcaggataaaattgagcgggcgcagaaactgatccaacgccatccgtatctgtttgtcattggtacgcgctttatgtatggctttcgggtgattggcccgacgctgattggtgccagccagctgccgccgaaaatctttctgccgcttaatattctcggcgcatttgcctgggcgttgatttttaccactatcggttacgctggtggtcaggtgattgcgccgtggttgcacaatctcgaccagcatttgaagcactgggtctggttgattctggtcgtggttctggtggtaggcgtgcgctggtggctgaaacgacgcgggaagaaaaagccggataatcaggcgtaaaaccattgccctggataaggcgtgcgcnccgcatccgacatccggttcaccatgcctgatgcggcgcttgtgcgtcttatcatgcctaccaaaattttacccattgaaatatccacacacctcactgcgctattctgggttgaactgcggattcgccaacataaagccgccatccactatcaacgactgcccggtggtgtaatttgcgccctccgaacaaagccacgccaccaggctggcaatctcatgcgttgcgccaaaacgccgcagaggaatcgaaggctccgcgtcgggcttcacgtcgctatcatccatgccgttcattggcgtagcgatcgccccaggtgcgactgcgttcaccaaaatcttatgcctgaccaactccagcgccattgctttggttaacccgccgagcgcatgtttagcggctgtgtaggcgctggcatccggcagcggcgtatgttcatgtaccgacgtaatgttgatgatgcgaccaccctgtccttgtttcaccatctggcgggcagcaatttgcgagcataaaaatgcaccatcgacatcaacggtaaaaatcttgcgccactcatcgaaagccatatcaagaaacggcactttggtcattgcgcccgcattattcaccagcacatcaatacgccccagccgttgaataagtttctccagcgcctgcgcaccttctggcagattgccgagatccagttgcacgatctccgcacgtacgccgtggctaactacctcacgcgcggtatcttttgccccttcttcatctgantgccaggtaatgccaatatcaaacccttgctgcgccagtaataacgcgcactctttgccgatccccgaatcggangcggtaataatcgctacctgtgccatcgagttctccacttaacgctgaataaacgttaagtatagaagtcacatatcatcagcgtttgtaacccccgcccaacgcaccagtganttgaatggaggcatccagccactgcccttgcaataacaggccattggcccgctcacgcagcgcggggattctggcttcgctgacgcgggaaccagcaatgatgcccgcgttaaagcgggcctgcgcaagacctaccacacgcaaggcatcgcgctcaatttgcgcctgatgctggtttttctccgccagtgtctgaacctgactggctgcccgcgccacgtcattcaccgcttcaaccaccgctttgttgtagctggcgatagacaagttgctttcggcttttgcgatatcgagattggcgttaagacgaccactatcgaaaatgggtagcgtcaggcctgccgtaacgcccatttgctgcgcggaatgacggaacagatcgcttaagtgcaacgcatcctgttgcaggaaggccatcaggttgatgtcaggataaaatgccgcttttgccgcatcaatggtgcttagcgatgactcaacgtaccagtgcgccgcctgcaaatctgcccgccgggccagtaaggagtaccccagttcatcaggaagctggcttgccactttcggcaacgcgaccggtttaagcgtcaatgacttagtctggtgatttgtgagtgcaattaaccgtgcctcaataattttcattttccccgcgacatcgttganctgctgccgggttttgctggcattaatatcggtttccacaccttcaactgaagaagtaatcccgttctgatatagctggcgatcggtcgcgataatggtgttctgctctttttcgatttgctgcaagaccgtgtttaacgccgcctgggtttgccactcccagtacaggcgggctacgctgccagccagcaattggcgggtttgctcgcgttccgccgcccgtgctttaaccgtacccaggcgggcagtaacntccgcccgattctttccccagatatcgagatgccagcccgccgttaagccaaaagttccgttggtgtaccacggaccggtcgtacctgcggccggatcgttcagagcaaacggccccattagcccttctgccgacattttttgccgctccatatccgcagaaaagtcgatctgcggaccatcctgagtagcaactgccttcgcctgggcttcagctaactgaatgcgctgttcagccacctgcatatccggtgcgttctgtagtgcattgttaattaaggaagtgagttgattatcgtgatactccagccaccattggctgtctggccaaccatttttcagcgccgtgggtaatgcggtgtcaacttgtgcagcgggcgtttgctggcttaacgcctggcgggtttcatgcataggcgcacacccggccagcatcagtaacagcggaaaacaggcgatggctggataaaaggaatcacgattcatgggggaataatcaggtaagaaaaggtgcgcggagattaccgtgtgttgcgatatattttttagtttcgcgtggcaatacatcagtagcaataaaacgacatatccagaaaaatatacactaagtgaatgatatcttccgatttatcttaatcgtttatggataacggcaaagggcttcgttttttcctatacttattcagcactcacaaataaaggaacgccaatgaaaattatactctgggctgtattgattattttcctgattgggctactggtggtgactggcgtatttaagatgatattttaaaaatcagatatgacatataagttgtcaagtcaggaactagatattttgtgtacttgatttgcaaacagctccggtgttggtggcgtcaaaatcgctgaagcgttccccgaaggccggggcagcccacatggatgtgggctgagggcgcgtcttacaaggacgtttcctcgcgcccgacccggtagccgaaggggataagctgaaggtaccgcgcagcggcgattttgttcgccagancccgggggtgcagggggaggaggcgattgtcctccccctgcgcgctccttgcgccagtggcaatatgtggcttagctcatgaaaggagcgcaacaagatgatgaagctgaataagcgattcattgtttctgataaactgcgattccactattatcgcagcttaccgatatcaattgcctgaatagcccttgcaatatcaggggaattattcaacacacgaacatgctgaaataattctgttgcttcatcgtattctttacgcaaataactcaaccactgtttaatccgcgctacgtgatataacccggtatcgccctgcttttccagacgggtatatttttgcagcaaagcaaccacctccggccacggcattcgcggttcgttatattttactacccggctcaggttgggaatattgagcgccccgcgaccaatcatcactgagtcgcagccgctgatcgccatgcattcttgcgtgctctgccagtcccagatttcgccgttggcaatcaccggaatattcagccgctggcgaatctcgccaatcgcctgccagtcaatatgctccgcgcggtaaccctgctcttttgtccgtccatgcaccaccagctccgtagcaccagcctgttgaaccgcatcggcgatttcaaatttcttctcaccgctgtcccagcccagacgcactttcacgctgacgggcaaatgcgccggtacagcttcacgcatcgcttttgcaccctggtagatgagttcaggatctttgagtaacgtcgccccaccaccgctaccgttaaccgttttcgacgggcagccgcaattgagatccacgccccaggaacctaattccaccgcacgggnggcgttntctgccagccattgtgggaactgacccaacaactgcacgcgcaccagcgtaccggatggtgtccggctggcgttttgtagctcagggcaaatgcgatgaaagactttcaccggcagcagttgatccaccacgcggacgaactcggtgatgcacagatcgtagtcgttaacttcggtcagcaattcacgcaccagagagtcaagcactccctccatcggagccagtaacacacgcatatcatcacccgcaaaaaaatgaggcgctatgttagcgcctcctgtgtttgcagacaaactgacttactgattaattcgggcaagatttttaccctcaccctaaccntctcccgaaggggcgaggggaccgcccgtgcgcctgattgggtgaagaagtgcttagcgtggttgcaaacagttatcttctttccagccgtacaaccactccatgccgcgataaaattctgcctgcgatttccctttccacagcagattacgtacctggcgttctacccctgcggcgtggtaaacccgccccatttcacgggtcgaccagacgatgcgcgcggtgcgcggaattcgtaccgactcatacagcgcaaaggcttgcgccgcatcaccctcacactgcgccagcgccttacccagcgttactgcatcttccagcgccatacaggctccctgcgccatatannnngccaccggatgggccgaatcgcccacaagcgttatgcgcttcgttccccacttcgccaccggttcacggtcagcggttgaccagcgtcgccatgaagtcggtttatccaacatctggcgcggacgggggtgaatcccttcaaagtaagagagcacttcctctttactaccatccttcacgccccactcttcctgctggcggctgtggaatgttaccaccaggttatactgcttgccgccgcgcaaagggtaatgcaccaagtgacaatgcggccccgcccacagtaccggtgcgttaatgcgcaaatcttccggcatatcggcacgatcgataaccgcacggtagacaacatgtccggtgacacgcggcgcatcgcccaataagctctggcgcaccactgacttcacgccgtcacagccaatcagaatatcgccggtccagctattgccgcgatcgtcaaacacggtgacatcgtcttccgtctcgcgaatatccacgacgttggtggaggtgtgatattccacgtccggatgcgtcagtaccgcttcccacaccgaggcgtgaatatcaacccggtggatcaccgcgtaagggccgccgaaatggtcacgaaaggcctgcccggtttcaatgcacaccacttcttcggcgttcaccgcatccatcatggtaatgtgatcggtaaacaccgcgcgctggcgggcaacttcgccgacgccgaggctgtccagcgccgaaaacgcatttggccccaactggatgcccgcgccaatctcaccgatctcatgcgccttttccagcagcaccactttgatccccaggcgggccagtgacagcgcagttgccgcaccgccgatcccgcctcccacaattactgcgcgtgtcactttcgtcattatagttctcctggtcaggctgaaattttatcttgttgattttctggcgctgcggcaatgaacgctggcagctgtgtgcaggcgtcgtacaccgctttgcagcgtggatacccgctcaaatcgcagttcatgcgtagcgcgttcgcccactgcgggacaaggcagcaatctgccagcgtcggcgtctcgcccacacaaaattgccccgactggttctggcgcaacagttgttccaccgcgcttaacccttgctggatccagtgcgcataccaacgttttttttcttcttcactgacgttcagttcttcggtcaggtagcgcagcacgcgcaagttattcaatggatgaatatcacaagcgatggcatagacaatttccagcaccttgttgcgggccggctcttcctgcggcaccagcggaacttgcgggtagtgcctctccagccagtcaataatcgccagcgattgtccgagtgattcgccctcgtcagtcagcagcgtcggcaccagcccgaccggattcatccgccgataggccagttcattttgctgaccaatacggatattcaccccttcggtctggtaattaatgcctttcagcgccagcgcaatgcgtacccggtacgacgctgaactattaaaaaaactgtacagcttcatcatgcacctcagacaatcttcaccgcgataggcgttaagccctcgacgttgcctgtgatcacatcacctttcactaccgggccaaccccttccggcgtaccggtgaagatcagatcgcccggttgcagctcaaagaagcctgacagatagctgatggtttcattcaccgaccagatgagatggcgaatatcgctgcgctgatgatcttcgccgttaacctgtaaccagattggcgcattatcaataccgccgatatcgcgggctttgtgcagcggcgcgatgggcgctgagagatcaaacgctttaccgatttcccacgggcggcccatctggcgcatttccatttgacggtcacgccgagtcatatcaagacccgtggcataaccccagacatattcatgggcgtgttccagcgggatatcgctgccttttttaccaatcgccaccaccagttcaatttcgtaatggtagttatcggtctgtgccggatacggcagcgccagcgtttcaccagcggcaaccggaacaacggcatccgccggtttgcagaagaagaatggcggttcacgatccggatcaaagcccatttcgcgggcgtgagcggcatagttacgtccgacgcagtaaacgcggcgcacggggaattgttcatcactgccaacaaccggtacggtaacgggcgcttgcggttcgaatacgtattgagtcatttttctctcctaaattaataacgcgcttcgcggaacagccccagggcttcttgtaccggcctgtccgaaaaactaaataaaacggaatcttgcgtggtctggaacgacacgccatgccaggtcggcaccacgaagatatcttttgcactaaagctgaaggtttcattgccgatgatgacctgcccgctaccttccaccacatggtagatggtgctgtcagtggtacgcgcaacgcgtgaggcaaaccctttcggcagcagttgcaggaaagcgcccatcgacggcatcggatagccgccggtgaccgggttgacgtagcgcattttgtagccatcccactcgtcggcatcgcccagtcgggttaaatcgtgcagcacttcgcggctgcggtcataacgatagttaaagatcggcgaggagttccccgtctgatgccgcagcggcaacatattggcagcgtaacgcggcagataatctccctctttacgcgttaccggttgttgctcttccggataatcttcggcaaaaccgcagcccagaatattcactaatggcagatccagcccatcgagccagataaccggttcgtcgccagggttaccgtgatcgtgccagcgccactgcggggtcaggataaaatcgccttcattcattggcgtgcgttcgccatcaacggcggtaaatgcccctttgccttcaacaataaaacgcagcgccgactgattatgacgatgactcggtgccacttcgcccggcatgatcagttgcaaaccggcatataaagtcgcggtaatggaagactgcccgcgcagcgccgggttttccagcaccagcacgcggcgcacggcctctttcgcaccaatcaggccgccgctctccagtagcagcgggcggatctcctgataattccagtacgctggcgcacagttagcgttgggcgttttcggcaccagatggtgcagtgactcccacagcggggtcaggttttgcccggaaatatgctgataaaattgctcgcggctattttgattgttatcagtcattgagatgctccttattcgttcacaacgcctgcgcgaggcagtgagtcagggacagaggtcgactggcgaaccacggtaatcagcagggttaacatcaccgcactgatcgccgcaggcacagcgataatgaaaaacagggtgtcgaaagagaaattcatcgccatcatcacgccgccagacagcgaaccaacaatcgcgccgcagcggccgatagcatttgaccagctcacgcccgtggctcgactttgtgttggataaagtgttgcggtcagcgcattcagccccacctgcgatccgctaatgccaatgccagtgccgaaaatcgccagcgccatcaaccataatccatcctggcttaagccaatcatcacgatgcatatagcgcctatggcatagctcagcgccagcacgcggaaaggattgaacttatccatcagcacacccagcgccagcgcgcctaacgtaccaccaatctggaacgcggcggtgacccaggacgcgtgttgcaggtcgatgccgcgatggttcagtagcgtcggcatccagcttgagagcaggtaaataatcagcaggctcataaagaacactacccacagcatcaacgtgatgggtaactgacgtcccataaacagttgacgaatgctgccttttgtaacggaggctgattcaatgagataaaagtgggtatcgacataacgctcgcgggtgatggcgctgacggttttcgcaatcaccgcctgcggtagctggcggcgcacctgccagcgtggcgattccggcagaactaccagcagtgcgacaaacagcatcagcggtaacacgccccccaacaccagaatgccgtgccagccaatcaccggcaccagctgcgcactgacaatcccgccaaacgccgaacccagcgtaaagccgcaaaacatcagcgtcaccagcgcgccgcggcggcgggcaggcagatactccgaggtcatggtgatggtgttcggcatcgcgccgcccagacccaggccggtgagaaagcgcaggaagaccagcgtttgcagatccggtgagaaagccgaggcgaggcttaacgcgccaaacaaaaagacgcacagctcaatcacccgcttgcgaccaaagcgatcggacaacgggccacaaagcagtgcgcctgcggttaatcntagcagacccgcgccaaaaagcggggcgagatcgcctgcggtgagttgccagtgagtgcgaatatcaggggcgataaatccgatagccgcggtgtcaaaaccatcgagcattaccaccagaaaacagcagatgataacgcgccactgcatcttgccgaccggagcagcatcgataagtgcttgtaaatcacgtcgttgagtcatagtaaatgcctcagtgcaggtaaggtagatgtttcttttgttttgtatatgttgcgatattgtgattaaagagatgagatgtacaatggcatttcgggcagagagataacctggaggttatggcaaatggcgaactgggcgcaaaaattaaaactacatcaccttgaaatgctggtggcgctgggtgaacagggcaatctaacccatgtcgcacgaatgatgaatatcacccaacctgcgctttcgaaatggttgtcacaactcgaagatgagattggaatcacactttttgagcggcacagcaaaggattacgtccgactgaaggcggcaaattgttattgcaacatgcccaacggttaatcaatgacatggagcgatcgcaacatgaactggcccgttttaaacaaggtggactggtcggcagtctgaaaattggctgttctcccgtcgccactgactgcgtatcccaggcgattttgcatttgcttacgaagatgccaactctacacctgaatatcgaagagaaggtgatgaccccattgctgcaagatctattggcaggttctgtcgatgtggtcgttgggcgaattggcggtcgcgcattgcagctgccactgaattatcaggtgctgtacaccgagccagtatgctttgtcgcccgccctgagcacccactggcgaaatacgccaccctcagctggaatgatcttgccaactggcgctggatcgtctggccgacgggtacccccattcgcattagtattgataatgcgctggtagaccacggcgtaatgctgccagaaaacacgattgagtcggcgtcgatgaacgtcagtaccaacctgttacaaagcagcgatatgatctctattttgtcattacgcctggcgcaacgttatgccagccagggacaactggtgatactcaacctgccaaagatagaacagaaaggtagcgtcggtgtgttctggcgcaataacgaaacgccttcttatgctttaagtcagtttctgcactttttacagcagaattagtgtgctgaacggggcgctcgcccgaggttacctccctaaaattcaactatgctgagaattcttaatgtgatcggtagcacgttttacgaattaattgtatgatgaatccatctcatctggggtgttgattatgagtaagacactgaacattatctggcaatatttacgcgctttcgtcctgatttatgcctgcctgtatgcaggcattttcattgcttccctgctaccggtaaccattccgggcagcatcatcgggatgctgatcctgtttgtcctgctggccttgcaaattcttccggcgaaatgggtcaatccggggtgctacgtactgattcgctatatggcgctattgtttgtgccgattggcgtaggcgtcatgcaatattttgatttgctccgcgcacagtttggcccggtagtggtttcctgtgcaatcagtacgctggtggtttttctggtggtgagctggagttcgcaactggtacacggtgaacgtaaagtcgtaggtcagaaaggatcagaagaatgatggcgaatatctggtggtcattaccgctgacgttgattgtcttttttgccgcccgcaaactggcggcacggtataagtttcccctgcttaacccgttgctggtagcaatggtggtgatcattccttttttaatgctgaccggcatctcttacgacagttactttaaaggtagcgaagtgctaaacgatctgctgcaaccggcggtcgtcgcgctggcctatcctttatatgagcagctacaccagatccgcgcgcgctggaaatcgatcatcaccatctgttttatcggcagcgtggttgcgatggtgacggggacttccgtggcattgttgatgggcgcttcaccggaaatcgccgcgtcaatcctgccgaaatcagtcaccacgcctattgcaatggcggttggcggcagtattggcggtattccggcaatcagcgcagtttgcgtgattttcgtcggcatcctcggcgcggtatttggccatacattgcttaatgcgatgcgtattcgtaccaaagctgcgcgcggtctggcaatggggactgcctcgcacgccctcggtacggcgcgctgcgccgagctggattatcaggaaggtgcatttagttcgctagcgctggtgttatgcgggataattacttcgctgatcgcaccgatccttttcccgattattctggcagtaatgggctaaaatttgcgatgcgtcgcgcatttttgatgtaagtttcacgcgttgcataattaatgagattcagatcacatataaagccataacgggttcgtaaactgttatcccattacatgattatgangcaacgccatgcatccacgttttcaaaccgcttttgcccaacttgcggataacttgcaatctgcactggaacctattctggcagacaagtacttccccgctttgttgaccggggagcaagtctcatcgctgaagagcgcaacggggctggacgaagacgcgctggcattcgcactacttccgctggcggcggcctgtgcgcgtacgccattgtcgaattttaatgttggcgcaattgcgcgcggtgtgagcggaacctggtattttggtgccaatatggaatttattggtgcgacaatgcagcaaaccgttcatgccgaacaaagcgcgatcagccacgcctggttgagtggtgaaaaagcgcttgcagccatcaccgttaactacacgccttgtggtcactgccgtcagtttatgaatgaactgaacagcggtctggatctgcgtattcatctgccgggccgcgaggcacacgcgctgcgtgactatctggcggatgcctttgggccgaaagatctggagattaaaacgctgctgatggacgagcaggatcacggctatgcgctgactggtgatgcgctntctcaggcggcgattgcggcggcaaaccgttcgcacatgccttacagtaagtcgccaagcggtgtcgcgctggaatgtaaagacggtcgtattttcagcggcagctacgctgaaaacgccgcattcaacccgactctgccaccgttgcagggagcgttaattctattgaatctcaagggttatgattacccggatatccagcgcgcagttctggcagagaaagccgatgcgccgttgattcagtgggatgccacctccgcaacactgaaagctctcggctgtcacaatatcgaccgcgtgcttntcgcttaagcctggtgccggatgcggcgtgaacgccttgtccggcttgccagccctctcctggtgtcgaaaatcccggcaaacag

SEQ ID NO: 1323 - DNA, 7784 bp, Escherichia coli
  Strain O55:H7
  modified_base (666)..(666): a, c, g or t
  modified_base (2813)..(2813): a, c, g or t
  modified_base (3831)..(3831): a, c, g or t
  modified_base (3833)..(3834): a, c, g or t
  modified_base (3854)..(3855): a, c, g or t
  modified_base (4042)..(4042): a, c, g or t
  modified_base (4727)..(4727): a, c, g or t
  modified_base (5190)..(5190): a, c, g or t
  modified_base (6510)..(6513): a, c, g or t
  modified_base (7697)..(7700): a, c, g or t
ttcttgcgcaaaaccagcgggtaaagtagcctgatggaaattttccttagatcgagtctcctgcatgttaaagcgcgtgttcctcagcctgttagtcctgatcggcttgctgctgttgactgtgctcggcctcgatcgctggatgagctggaaaaccgcgccttatatctacgacgaattgcaggatctcccctaccgccaggtcggtgtggtgctcggaacagcaaaatattatcgtactggcgtaattaatcagtattatcgctaccgcattcaaggagcgattaatgcctataacagcggtaaggtaaattatctattactgagcggcgataacgcattgcaaagttataatgagccgatgaccatgcgcaaagatttaatcgctgctggtgtcgacccatcagatattgttctcgattacgcaggctttcgtacgctggattccatcgtgcgtacacgcaaagttttcgatactaatgatttcattattatcacccaacgtttccactgtgagcgggcattatttattgcgctgcatatggggattcaggctcagtgttatgccgtaccgtcaccgaaagatatgctgtcagtacgtattcgtgaatttgccgcccgtttcggtgcgctggctgacctttatatttttaaacgtgaaccgcnttttttagggccgctggtccctattccggctatgcaccaggtgccggaagatgcgcaggggtatcccgccgtcacacccgaacagttacttgaattacaaaagaaacaaggaaagtagttatggatgtacagcagttttttgtcgttgccgtttttttccttatcccgatattttgtttccgcgaagcatggaaaggctggcgcgcaggcgcgattgataaacgggttaaaaatgcaccggaaccggtgtatgtctggcgagcaaaaaatcccggactctttttcgcttatatggtggcatatatcggcttcggaattttatctatcggcatgattgtttatcttattttctatcgttaatattttctcttttctgttaattattgagaataattattacttcactcaataagctgcggatataacattctgaaccgcagctatttgtgaatcctttcacagtttaaatttccccacgcgcatagccttaatatcagcacgcaatatttatttagcgttcgccttaattactcatagcattaaggaagatcacatgccgcaacaaaattatctggatgaactcactccggcttttacgccgttactggcgattaaagaagcctctcgctgtttattatgtcacgacgctccctgtagtcaggcttgcccggcacagaccgatccggggaaatttattcgctcaatctactttcgtaattttaaaggcgctgccgagacaattcgcgaaaataatgccctcggtgccgtttgtgccagagtgtgcccgacggagaaattatgccaaagcggttgtacccgtgccggtgttgatgctcccattgatatcggccgcttacagcgttttgttactgattttgaacaacaaactgggatggaaatttatcagcccggtactaaaacgctcggcaaagtcgcgattattggcgcaggtcctgccggattgcaggccagtgtgacgctaacaaaccagggttatgacgtcacgatttatgagaaagaagcgcaccccggtggctggttgcgtaacggtattccgcaatttcggttaccgcaatcagtgctggatgcagaaatcgcccgtattgaaaaaatgggcgtgaccattaagtgcaataacgaaatcggtaaaacactcaccctggagcaactgaaagcggaaaaccgcgcggtactggtcaccgtggggttatcaagcggttccgggctaccgctgtttgagcatagcgacgttgagattgccgtcgacttcctgctacgtgcacgacaggcgcaaggcgatatcagcattccacaaagcgcattaattatcggcggcggtgatgtcgcaatggacgtagccagcacgctgaaagttctcggctgtcaggcggtaacttgcgtagcgcgtgaagagttagatgagtttccggcaagcgaaaaagagtttgccagcgcccgggagctgggcgtttcgatcatcgatggattcacgccagtagccgtggaaggcaataaagtcacgtttaagcatgtacggttatcgggcgaactgacgatggcggcagataaaattattctcgccgtcggtcagcatgccagactggatgactttgcgaagttagagccgcagcgtaacaccatcaaaacacaaaattatcagacccgcgatccgcaagtctttgctgctggcgatattgttgagggtgacaaaaccgtggtctatgccgtgaaaaccgggaaagaagccgccgaggcgattcatcactatttagagggagcttgctcatgttaacgaaagatctttcgattactttttgcggcgtgaagtttcccaacccgttctgcctctcttcttcgccggtaggcaactgctatgagatgtgtgccaaagcctacgacacaggttggggcggcgtggtgtttaaaacgatcggcttttttatcgccaacgaagtctcgccgcgttttgatcatctggtgaaagaagataccggttttatcggcttcaaaaatatggaacagattgctgaacatccgttggaagagaatctggccgccctgcgtcggctgaaggaagattacccggacaaagtattgatcgcttcgatcatgggggaaaatgagcagcaatgggaggagctggcgcncctggtgcaagaagctggcgcggatatgatcgagtgtaacttctcctgtccgcaaatgacttctcatgcgatgggtagcgatgtcgggcaaagcccggagctggtagaaaaatattgtcgggcagtgaaacggggttccacgctgccaatgctggcgaagatgacgccgaatatcggtgatatgtgcgaagtggcgctggcggcgaagcgcggcggcgcagatggcattgcggcgattaacaccgttaaatccatcaccaatatcgatcttaatcagaaaatcggtatgccgatcgttaacggaaaatcgagtatttccggatattccggtaaagcggtaaaaccgatcgccctgcgcttcattcagcaaatgcgcacccatccagaactgcgcgatttcccaatcagcggtatcggcggcattgaaacctgggaggatgcggcggagtttttattgctcggcgcagcaacgttacaggtcaccaccggcattatgcagtacggctatcgcatcgtagaagatatggcgagcgggttatcgcattatctcgccgatcagggatttgattcgttgcaggagatggtaggtctggcgaataacaatattgtcccggcggaagatttagaccgcagttatattgtctatccccgtatcaatcttgataaatgtgttggctgtggacgctgttatatttcctgttacgacggcggtcaccaggcgatggaatggagcgagaaaacccgcacaccgcattgtaataccgagaaatgtgtgggttgtctgctttgtggtcacgtctgcccggtgggttgtattgagctcggggaagtgaagtttaagaaaggcgagaaagaacacccggtaacgttgtaaaaccagagacgcatccggcatttggttcctgtcgccggatgcggcttgaacgccttatccggcctacaaaaccatacaaatcagtatgttgagctcattgtaggccggataaaacgcgccagcgttgcatccggcatttggctncnngtcgccggatgcggcgtganngccttatccggcctacaaaaccacacagatcatgatgttatgtgcgtttatgaccgaatgcggaccacaatcatttcacttcttacgcgcgtacttcagtgaatccagcgctacggcgaagataataatcgcccctttgatgatgtactgccagtatgggtttacgccgatgtacgtcaggccatanttgatgacggtaaaaataattaccccggtcaccacgccaatcaccgtccccacaccgccgctgaacgatacaccgcctaccacgcacgccgcgatagcatccagttcatacataaagccgaggttgttggtggcagagccgatacgtccggcttctaacatcccgccaaaggcatagaacacgccagacaacgcgtagatcatcagcaggttcaggccgacgttgacaccagatacttttgccgcttccgggttaccgccaatggcaaaaatgttcttaccgaagcgggttttgttccacaacacccagacgaacgccaccgcaatcaacgcgtagaaggtgatgtaagagagacggaaactccccagcgcgacaaagccctgagcaaaggtagagaagccactgtcaaaaccagaaattggcgacgccccgacaaagtcgtaataaagcgagttgatgccatagacgatgatcatcgtgccgagcgtggtaatgaacggcgtcacgttgagataagcgataatcagaccgttgatcaaaccgatcaccgcaccaatggcacagacaatcagaataaccagcgcaatcggcatcgtcgccatttccgggaacactttgttggcgttatccatggactgcaataatgtcgctgccaccactgccgccagccctacttgacgccccncagaaaggtcggtcccctgggtgacaattaaccctgccacaccgagcgcgataataatacgcaccgatgactgggtgagaatattacttaagttcaacagacttaaaaatgttggggcctggaaaataataatcgcaagcaaaactaaaagaacgacgtaaataccgccctctttcaggtaagtaagaaaacttttcttatttaacgcactcatgggaagcccctaatcttaaaggtgcaaagacgcaagacgtagaatttcgttttgcgttgttgtttttgtatcgacaattccggaaacgaggccattgctcataaccagaatacggtctgttatccctaacaactctggcatttcagaggagataataataatccccttgcctttcttcgccagttcggcaattaactgataaatctcaaacttcgccccaacatcaataccgcgcgtcggttcatcgancattaatatttctggttgcgttaacagccagcgcccaataatcaccttttgctgattaccacctgagagcgaaccaatttgcgtccgatgccccggtgtttttacccgcatcgaatcaatcacccactgggtatcgcttttcatccgcgagttatccagtaaaccaactttatttttgtagttgcgaatattggaaattaacgagttaaaaccaatatccagataggcataaattcccgttgagcggcgctcctcagttaccagtgcaaatccgtggtttatggcttcgttggcattatggttattgatctttttgccgtgcaacgtaatggtgccagccgatttctcgcgaataccaaataacgtctcaacaatatcggtacgtttcgcccccaccagaccggcaataccgaggatctcccctttatgcagatcaaacgagacatcgcgaatcgacggctggcgcagtgacgtcaggttacgtacctcgaggatgacttcgcccggcttgttttctttgtcaggaaaacgctggttaagagaacgcccaaccatcatggcgataatcttgtccatcgtcagccctgccagcggttcggtggcgatccactgaccgtcgcgcaatacggtaacttcatcacataactggaagatttcctccattttatgcgagatataaacaataccgcagccgcgctcttttaatttacgaataatagtgaacagatgattgacctctttttcggttaacgaagaagtcggttcatccataatcacaattttcgcgttataggaaaacgctttggcgatttcgatcatctgcatttgcgaaacagataatgtgccgacgcgcgcacgcggatcgatatcaatatccagttcatcaaaaatcgctttggtttcgcggtacattttgtcctgatcgacaaacatgcctttggtggggtatcgcccaagccacatgttgtccatcaccgaacgttgtaataccaggtttaactcctggtgtaccatcgaaataccattttccagtgcttctttggccgaatggaaatcgatctctttaccctggaataaaatggtgccggagtcttttttataaataccaaacaggcattttaataatgttgattttcctgcgccgttttcccccattaatgcatggatagaatgtggccggacttttaaattaacgttatcaagtgccttaacaccaggaaaagacttgttgataccgctcatttccaacaagtattccccggaagacggagtcgttgagctgaccatataattttaccttgttggccatacaataagggnnnngtaatagactgcgcccaatcagtcttatttcttgctgaattcagccaggttgtctttatctacgccaacataaggtacgcggaccactttgttgtcgattttccagttggtgccatcagccgcacctttaccatcggccaggtttttcgccagatcaaaggtcgctttcgcctggttgttagcatcgttcagtacggtgcccgccagtgcaccggatttcaccagcgccagcgcttctggcagagcatcgacgccaaacaccggaatgctggacttgttgtgtgctttcagtgcttctaccgcgcccattgccatcgcatcgttgttggcgataaccacttcgattttgttggcgttcgggccagacagccaggcgtccatcttatctttcgcctgagcggtatcccacatagcggtatctaactgtaactgttcagttttaatgcctttgtcgttcagctctttaatcacgtaagtggtacgtgcttctgcatccggatggcccggttcacctttcagcagtacgaattgaatctgaccgtctttattcagatcccaaccctgattcgccgcccagtgtttagcaatcaaatcgccttgaataatgccggactctttggagtcagtgccaacgtagtaggctttgtcgtagctatccagcgccttacgagacggttctttgttaaagaataccaccggcacattttgcccacgcgctttctcaatcaccgtacccgcagctgccgggtcaaccaggttgattgccagtgccttcacccctttcgccagcaatacgtcgatctgatcgttctgcttggactggtcattctgtgaatcattcatcagcagctgaacatctggcgcggctttcgcatcttgctcaatagccttgcgcactacagacataaagttatcgtcgtacttatagattgttacaccaatgcgagtatcagcagcgtgtgcagtggcaccgaataacatgctggccatcacagcagacagggttaacaccttcttattcatggtatctccggtttttcttatgcagggtagtgcttgagataaatgctcggcggggcagtagagttaatgaagtgttactgaacgccgaagctcactttttaaaattcgttcttccatgcccggtaacgctccagaaaacggctttaattgttgttatgacnnnntacctcggtgaaagtgattattcactgttacatacgggttacaacgttaaaacggtgcaatcatagctatcacattgttaagat

SEQ ID NO: 1324 - DNA, 1858 bp, Escherichia coli
  Strain O55:H7
  modified_base (4)..(4): a, c, g or t
tganatcactcacagattgaaagcggttacatcgcctgatttgttgagttagtgatcgccgccgcattctggcgtgttgcgacagaatggcgacgcactaacgtcggcataaaacagtggctggcacgaggatcaatattgcctgctgccccctgcaaggccagttcggtggctaatttcgccattgaagcaatgggataacgcacggtcgttaattgcgggtcggtgtaacgggcgatgggaatatcatcgaaaccgatgattgagagatgtaacggaatcgcaatgccattatcttttaatgctgtcagtgcgccagcagccatattgtcgttataagcaaatacagcggtaagttgtagattgcgccccagcagttcaaccatcgccgcctcaccgcccggcatgtccggcgtaccagtgccaatccagctttccggcggaataatatcctgctctttcaacgcactcatccagcctgctttacgcatggcgtcatcttcaatgccgtggctggaagaaagataaccaatacgttgatgaccgttattcagcaacatgcgcgtcgccattcgggcaccgctgagattatccaggcaaacgcaacgatgggtgtaccccggcacaacgcggttgattaacaccataccgggaatgttatccataaattgcgccagttcatcgtcactcaatgcttttgagtgaacaatcaacgcattacaacgctggcgaattaacacctcaatggcgtgacgctctttttccgcttcatgatagctattgccgattagcacgtatttctgatgctgctgagcgaccagatccaccgcttttaccagcgcgccgaaaaacgcatcagaaacgtccatcaccaccacgccaatggtgtcgctaacctgagttgccagcgcctgggcattggcgtttggccgataatccagctcactcacggctttcattactgcttcacgcgtgtcggcactgaccagcgtgctgttattgagcacccgggaaaccgttgccacagagacgccagcctgacgcgctacatcacgaatggtgatcatattcactacctgttatgagattgcagtaaatgactgcttgctgccggctattttgtcagcactgaatacaggacttcgtgaatcgagtcacagcaatggaaacggttacagccgttttgttaacgaatgtgatccagatcgttatcttgatgttttagatattgccggtccggcagcacgcaaagttaactgacgccagagccattccacaggcccctggcggaagtaacgcagccagataacagagaagagaatattcgccagccataccggaataacaaacgccagcaattccagacggtcaaactgcataaacagaccgaggtggtaaaaaagcgtggtacaaatcagcgtttgcaatagatagttggtcagcgccatccgtccgacgcaggcgatcgccagcaccagcttaaagcggctcaattgcggccagaagccataaaacagcgacgcatagccaatcgcctgaaacggcgcactcagttcccgcggcatttgaagtaagaaggcacaccagcgatacgcccagtccagctgccattgcagggcgatggcaggaaggtttatgatcaccccaatcgccactagcacaaaaccagtacgacgatagtgacgtaagctgaactgccctttcagccagccactgcgcatcaatgcggcaccaatgagcatcatcccagccagttgccagccatactgtgcgcccagtgccaataaactgttcccaacaccatcggcacgattactgatcgcttcaacgccgccgtgaagcttccagtatttttcat

SEQ ID NO: 1325 - DNA, 8174 bp, Escherichia coli
  Strain O55:H7
  modified_base (1690)..(1690): a, c, g or t
  modified_base (3028)..(3028): a, c, g or t
  modified_base (5881)..(5881): a, c, g or t
ccgatgcatccggcgtccaggcgcggctagtctggctatcggaaatcaaccccaataacagcaaaacgccaagccccaccagataaagcatgacgccggtattaaaaaggctttttaccgatggcgcatcgcgcaccagccgccagcagattaagcccaccagcccgtaagccagcagaatatcgccgtcccagaacaataaaccgtgaataaagcccagcaagactaacagcgttaaccgcgactggatccagcgtctgccacggggcagcaacatttgcaggccagcaccaaacagcagcgcaaaaagcgtgaggaatttcacctggccgatgagatcgagaaatgcccaggtccatgcatcctgcggcgtaatagcgccgtaccaggcgggattaagataagccgcctttggtagcccaaaggcgctgatgtttaatagcaggatccccagaatggcgacgccgcgaacaaagtcgagcgtgacgttgcgctccatggttcctgcctttaaatcagttgtgatgacgcacagcgcgcagaaactcgtggcgcgtattctgactggatttgaacaatccaccaagagaggtcgttgtcgtggcactggttgcatcgcggatgccacgcgccttcacgcaataatgcaccgcgtcgatagagacagccacgttattggtgcccagcagcgtttgtagcgcaatgagaatttgctgcgtcagacgttcctgcacctgcggacgctgggcaaagaactgcacaatacggttaatttttgacagaccgatcaccgaatctttcgggatataagccaccgtcgctttgccatcgatggtaacaaaatggtgttcacaggtactggtcagagtgatatcgcgcacggtgaccatttcatcgaccttcattttgttttcaatgagggtgattttcgggaagttggcgtaatccagaccggagaaaatttcatcgacatacattttagcgatgcgatgcggcgtttccatcaaactgtcatcagccaggtcgagattcagcagctgcatgatttcggtcatatgaccagcaataaggcttttgcgcgtttcgttatccatttcatgcacgggcgggcgcagcggtgtttccagtcctcgcgcaactaacgcttcatgaaccagggccgcttctttactgagtgatggcatttatgatttctcctgcaggtgtgacgcctccgccctgcgtgggggcaaagttattaagctgatttacagcctgattattgtgcgtgaggcggcgcacataatccagtattcacagcgataattattgtaattgccgctgcctttcatcagcagatgttaaaacatcgttatgcaaatacggaagtgaaagttactcacagcacattgaataaacggtatgatgaagaaattgcaaacaacacaacaaggagccacgcatggaaatgctcgaagagcaccgctgttttgaaggctggcagcaacgctggcgacacgactccagtaccttaaactgcccgatgacgttcagtatctttctcccaccccctcgtgatcacaccccgccaccagtgctgtactggctttccggattaacctgcaatgacgagaacttcaccaccaaggcgggtgcccagcgcgtggcggcggaactggggattgtactggttatgccagacaccagcccncgcggcgaaaaggttgccaacgacgatggctacgatttaggccagggcgcaggcttttatcttaatgccacgcaaccgccgtgggcgacgcattaccggatgtatgattatctgcgtgatgaattaccggcgctggttcagtcgcaatttaatgtcagcgaccgctgcgctattagcggtcattcaatgggtggtcacggtgcgctgattatggcgctgaaaaacccgggcaaatacaccagcgtttcggcctttgcgccaattgtgaatccgtgcagcgtcccgtggggaatcaaagcgtttagccgctatttaggtgaggacaaaaatgcatggctggaatgggacagttgcgcgctgatgtatgccagtaacgcgcaggatgcgatcccgacgcttatcgatcagggtgataacgatcagtttcttgctgaccaactgcaacctgcagtacttgcagaagccgcgcgccagaaagcatggccgatgacgctgcgtattcagccgggatatgatcacagttactacttcatcgcctcttttatagaggatcacctgcgcttccatgcgcagtatttactgaagtgaaagtccgcccggttcgccgggcatcttctcatcagaagcgataatccactgccataaagtaacgacgtccgtcttcgttatagctgtagtcgtcacgactgagatccttgtcgccaaggttcagcacgcctgcgcgcagtttgacgtctttagtcacctgccaggccgcgccggtattccagatggtataaccgcccggtgttttagccgtcgcgctgtcggctcgtttctgcccggtatagtgaccagaaacatagaatgaccagtcttccagcgccagcggtttccagtccagcgtaccgttagcggtatggaacggcagatcggatagcggtttgttttcgccgttgctgacatcacgaccatcgttgtaggtgtagttgagtgacagtttccattcatcgttgaacggaattttcagctcggtttccacgccctgaatacgtgctttgttaacgttgtagtagctaaataccggcacaccgttcgctgtaaaaccaacaaagttttggtagcccggtgcagcattgacgtcagacgtacggctgatgctgatacgatctttcacatcgttacggaaaacggtaacgctggattcaaccccttccagccagccttcttcacccatgtagtaaagccccagctcccaactttcgctggtttctggtttcagatccgggctacccacaatcttacatgcgccacggcaggaattgctcgtccagtcagggctaagttgcaacagagaangtgctttaaatgccgtcgcccagccccctttcaccgttacggtgtcggtggcgttataaaccaggtaggcacgcggactccagtgttcaccgtaggtttcgtgatcgtccatacgcacgccggtcgtcagcgccagcggctcgaagatccgccattcatcttccacaaacagcgcgtactggctggcagacgttttggagctggttcccccggtcaggttcaccgcatcgctaagtttgtcgtgacgccattcaccgccaaccgtgagaaactgattaatcgccgtcagcggcaacgtgtatttgccgtcgaccgtattgctttcggaagttatcgggctgctgttgccagggtttttgttctcgactttctcaccgtagtatttcagttcgctggtgccgtaatcccaacgcccattatggctgacggagtagttctggcgttccaggcggtttttgtccagcgagtcggaatcacgatcctgacggtcgaaaccgtatccggcagtaaaatcgtgattttgattcggtgtccaggcaaattcgacattgccgtcgcggctggagaatccttcaatacgcggcgtttctccggtatcggtggtcgttgagttttgcgggtcatccttttcacgttttgccaggctgccgtaagctttcattcccagcacaccatcaattaatggtccactggtaaagaactgaccgttataggtatcaccgcgatcgcgatgttcctgaatggtggtatcgacggtaacggtacccgaccatttctgaccgatttttttggtgatgatattcactacaccgccgagcgcatcggaaccgtacagcgacgacatcgggccacggaccacttcaatacgttcgatggaatcgaccgggatccagttcagatcgaaatcattgtggcggaagacggcattgcgggagttaacgcgtttaccgtcgacaagaatcagggtgtagctgctgtccagaccacgaatactaacgcccttacggttatccccttcgttcgtcagttgtacgccaggcacttctttgaggacatccttcagattctgtaccggttttcgctgcaggtcttcctgggtaatgacgctgatactggcgggtgcatctttaaggttttgttcaacggaagatgcagtgacaaccatcgtttcgccatcgtcatcgaccgctaacacaggccatgcacaagaaatagcggacaaacacagcccgacccgtacgaaagggttcaacctaaacattccatatctccatgaggtaactacgaaaataaaatgggttatcgctcacatcttcttcacgtccccttgcgtacggcagcatcgcggtggacttatttgtatgcaggtgatcatcccagaaagccggaccagcctctgatttgtcagccttttttgattgcggcgtaacgataatgcaaacgataacaattatcaatccaaatgttaaattttatatccgcatgatttgtcagggaaatggaattgaaaaagccctctcggttgagagggcttagcaaggaagggagaaacttatttcttatcgttctgcgggaacttcatttcgctgtagcgtacgaagtgggttcctttaataagcttgtagccgaaccaaataatcaggaacagcgggataccaatatacgttgccgctacgccgccccagtcaatggtatctttcaggaacgcttcgtagttctggcccaaagtgataatcagacacagaatgaatgcgaagatcggccccaatgggaagaaacctgaacggtacggcagatcgttaatgtcgtgtccctgcaatacgtaaccgcgacggaagcgatagtggctaatggcaatccccagccaggcgataaaaccggtcatcccggaggtattcagcagccacaggtataccgtctggttgccaaacatggaggtcaggaagcacagaccggcaatcaccgtcgtcgcatacagcgcattacgcggcacgccaccacgcgacagtttagcgaaaatgcgcggcgctttaccgtcacacgccagggtgtacagcatacgagtagacgcatacataccggagttacccgctgacagcaccgccgtcagaataactgcgttcatcaccgccgcagcagagagcagacccgcgtgctggaacaccagggtgaacggactaacgctgatgtctttaacatcgttacgcagcaggctcggatcggtgtacggaataatcaggctgataatcaggatcgcgaacacatagaacaacaggattcgccagaacacctgacgtaccgcgcgtggaatgtttttccccggatcttcggactcgcctgcagcaataccgatcagctcggttccctggaaagagaagccgacaatcatagctacgccgatcatcgccgcaaaaccaccagcaaacggcgcttcgccgattgtccagttgctccagcccgcaggctgcgcgcctttgaagataccgataatcatcagcacgccaacgatgataaagacaataactgtcgtgactttgatcagtgagaaccagtattccgcttcaccaaagccgcgaacagagatgtagttcagcaggaagataacgccgaggaacaacgcactccagatccagcccggtgtatccgggaaccaccagctcatgaccagctgagctgcaaccaggtcaacggcaatagtcaccgcccagttgtaccagtagttccagcccagcgcgaagccaaagccctcttcaacatagttctgaccgtaagtggcaaacgaaccggaaaccggcatatatgcagccagttcaccgagactggtcatcaggaagtaaaccatcaggccaatcnacatatacgagagcaatgccccgcccggacctgcctgagaaatcgttgcgccagaggcaacaaaaagacctgtaccgatggaaccgccaatggcaatcatcgtcaggtgacgcgcctttaattcacggcgtaagcccggcgcttctgtggttttagtttcggaaaccatacaaaaatgctatccatctaaaaaatgaggcgcgattgtagcagacgattggcaatccttccggcagaaatacacggttataagacaccttcatgatcgcccagggattataagtaaagcagccaatctcttttctggcgaatgcatgctgaaggcgctgcgtcacgaaatcgacacagcaccagcatgttcttgtacagcaacttaacgcggcacatttgcgggatcgcaatagtccagaaagcgccgtagcgcgttggaaaggtgtttttgccgatgatgtatacgccacaacgtacgcatcaggcgcggcagagggaccgcaacttcacttaatgtgcctgcctgcaattgatcttcaatcacacgtcgcgacaggcaactaattcccaacccatgacgcaccgcatgtttgattgcctcggagttacctaattccatcgccatctcaaacttcggtaaatgtgacagcaacagataatcgacaatctcccgcgtgccggaaccgcgttcacgcaggatccacggcgcagcggccagctgttctaaggtgaccggaccacgggccaacggcgaagtcggcgcggcgaaaaccaccagctcgtcttccagccacggttcagaaatgatttcagtgctgtggcacggtccttcaataaagccaatatcaacgcggaaatccagcaccgcttgcatcacgtcctggctattcccaacgctaagttcaatcggcaactgcggataatcatggcgataacgggcgataactgcaggcagaatgtagttaccgatggtactactggcatagatacgaatcgcgccgttgtcttcgcgaaacagttgttcgatttcaaccgcctgttcaagcaatgccaacgcacgcggatagagcagccgcccgtgttcattaacaaccagtcttttccccacgcgatcaaacagttgcacgccaagctgcccttccaggtcggtcaaggctgcgctcactgctgattgcgacaacgccagcatcaccgacgcttgggtggttgatccacttttcaatacttctgcaaaaacttccaactgccggagggtgatgtgcatagtcgcttaccacttataaagattaattataaatatataatcaattttatttttaaaccagttagtcgtaaccttatgcccggttaaaggagagggttatgacgaatatcaccttacagaaacaacatcgtacactgtggcattttattccggggttagccctgagtgcagttatcaccggggtcgccctgtggggtggttccattcccgcggttgcgggtgccgggtttagtgccctcaccctcgcaatcttgttggggatggttttaggcaacaccatctatccgcacatctggaaaagctgtgacggtggtgtgctgtttgccaagcaatatttattacgtctgggtatcattctttatggcttccgtctgacgttctcgcaaattgccgatgtcggtatcagtgggatcatcattgacgtgctgacgctgtccagtaccttcctgctggcttgcttcctggggcagaaagtgtttggtctggataagcacaccagctggttgatcggtgccggtagcagtatctgtggtgctgccgcggtactggcgactgagccggtagtgaaagcggaagccagtaaagtaaccgtggctgttgcaaccgttgttatcttcgggaccgtcgcgattttcctctacccggcgatatatccgctgatgtctcaatggtttagtccggaaactttcggtatctacattggttctactgtgcacgaagtggcgcaggtggtggcggcaggtcatgccatcagcccggatgcggaaaacgcagcagttatttccaaaatgctgcgcgtgatgatgctggctccgttcctcatcctgctggcggcgcgtgttaaacagctgtctggggcgaacagcggcgagaaaagcaaaatcactattccgtggtttgccatcttgttcatcgtagttgccatctttaactcgttccacctgttaccgcagagcgtggtgaacatgctggtaacgctggataccttcctgctggcaatggcgatggcggcgctgggtctgaccactcacgtcagcg

SEQ ID NO: 1326 - DNA, 19986 bp, Escherichia coli
  Strain O55:H7
  modified_base (18)..(18): a, c, g or t
  modified_base (367)..(367): a, c, g or t
  modified_base (888)..(888): a, c, g or t
  modified_base (1480)..(1480): a, c, g or t
  modified_base (1577)..(1577): a, c, g or t
  modified_base (4710)..(4710): a, c, g or t
  modified_base (7330)..(7331): a, c, g or t
  modified_base (7334)..(7334): a, c, g or t
  modified_base (7585)..(7585): a, c, g or t
  modified_base (7592)..(7593): a, c, g or t
  modified_base (12130)..(12130): a, c, g or t
  modified_base (18988)..(18988): a, c, g or t
  modified_base (19304)..(19307): a, c, g or t
aaaagctggggcgaaacntctgctgatggcactggtactgtttgcctggctgattgttggtggtggtgcgattaactatgtgattcaaagcgtcatcgcataaaccactacatcttgctcctgttaacccgctatcattaccgttttcctccagcgggtttaacaggagtcctcgcatgaaatacattggagcgcacgttagtgctgctggcggtctggcaaatgccgcaattcgcgccgccgaaatcgacgcaaccgcgtttgccttgttcaccaaaaaccaacgtcagtggcgtgccgcaccgctcacgacgcaaaccatcgatgaattcaaagccgcctgtgaaaaatatcactacacatcggngcaaattcttccccacgacagttatctgattaacctcggacatccggtcactgaagctctggaaaaatcgcgcgatgcctttatagatgaaatgcagcgttgcgaacagctggggctttctttgctcaacttccaccctggcagccatctgatgcagatttcagaagaggattgccttgcgcgtattgccgaatccatcaacattgcgctggataaaactcaaggtgtgacagcggtgatagaaaacaccgccggtcagggcagtaacttagggtttaaattcgaacatctcgcggcgattatcgacggcgtggaagataaatcccgcgtcggcgtctgcattgatacctgccatgctttcgctgccgggtatgatttgcgtactccagccgaatgcgagaaaacattcgcggattttgcccgtactgtcggctttaagtatctgcgcgggatgcaccttaacgatgcgaaaagcacctttggcagccgcgttgaccgccatcatagcctcggtgaaggcnatatcggtcatgatgcgttccgctggatcatgcaggacgaccgtttcgacggcattccgctgatcctcgaaaccatcaacccggatatctgggcagaagagatcgcctggctgaaagcgcaacaaactgaaaaagcggtagcctgaagatgaataaccgggaaaaggagatccttgcaattttacggcgtaacccgctgattcagcagaacgaaattgcggacatgctgcaaatcagccgttcgcgcgttgcggcgcatattatggatttaatgcgcaaaggccggattaaaggcaaaggttacattctcaccgagcaggaatactgcgtagtggtggggacaatcaatatggatattcgcgggatggcggatatccgttacccgcaatcggcttctcatcccggtacaattcattgctcagcgggcggcgtgggacgcaacatcgcccacaatctggcgctgttaggccgtgacgtccatttgctttcagtgattggcgatgacttttatggcgaaatgctcctggaagaaacgcgccgcgccggcgtgaatgtctccggctgcgttcgtttacatggtcaaagcacatcnacgtatctggcaattgccaatcgagacgatgaaaccgtgctggcgattaacgatacccatctgctggaacagttatcgccgcaattattgaacgggncgcgcgatttacttcgtcatgcgggcgtggtactggctgattgcaacctgacagccgaggcgctggaatgggtctttaccctcgctggtgagatcccggtgtttgtcgataccgtttcagaattcaaagcgggcaaaatcaaacactggctggcgcatattcacaccctgaaacccactttaccggagctggaaattttatggggacaggcgatcaccagcgatgctgaccgtaatgctgcagtgaatgcgttgcatcagcaaggtgttcagcaactgtttgtttatttgcccgatgagtcagtttattgcagcgaaaaggatggagaacaatttttgctgaccgcaccagcgcatacgacagtagacagttttggtgctgacgatggttttatggcgggcctggtatatagctttctggaaggaaacaatttccgtgacagcgcccgttttgcgatggcctgcgcggcaatttcacgcgccagcggcagcttaaacaaccctaccctgtctgccgataacgcgctttcattagtgccaatggtgtaacaatgttgccggattcgacgcttgaccgcatcttatccggctcataaatcgcacactacgctaaaccaataaagaacccggcaatggtggcactcatcaggttagaaagtgtcgccgccgccagcgcgcgtaaaccaagctgggcgatttccggcgcacggtgtggcgcaaccgcagaaaacgcccccaccaccaccccgatagaaccaaagttagcgaaaccgcacaacgcgaaggaaataatcgccacggttttagcatccagagtgccagccgtttgcagatagggtgagaaattgagataagcgacaaattcatttattgccagtttctgtccaatcaaactcccggcaagattcgcatcactccagtcaacacccattacccacgccagtggggccagcagataacctacaatggactccagcgaggcatgttcaaaaccaaaccagccgccaacgccgccgataataccgttaattaacgcaatgatggcgacgaatgccatcactactgtcgccacacctgcggcgattttcagcccggtcattgcccctgtcgcggcggcttcaataatgctttttggcggtgtttcggtgaaagagaggttattaaaagaaacctgcgaagattccgtagccgggcttagcaggcgggcaaacaagatccccccggggatcgccattaacgatgccgccagcaaatattccacaggcacgcccagtgcggcataaccaatcattgtcgaaccagcaatcgaggccatgccgctacaaatcgctgtaaataattcattgcgattcagccgatcgataaagggcttcacaatcgccggaatttcgttttgcccgaggaaaatggtagtgaccgcgacgaatgactcaatcttgctgatatttaatgctttctggaatataccgccgagaatgcgaattaaaatccccatcacaccgatgtagtagagaatactcaccagtgcagtgacgaagataattgccggtaataccctgaaaccaaagataaatcctgcgccatcaaataaggtgtccattttcggtccgaccagagaaccgaagataaatgcgctacccgcgtcgctgtacgccatcactttatgcacgccaaaagcgactttttcagcgacccaacgccctggcggtaaccaaagcataatgccgccaatcacgacctgtaacactaacgccgcgccaacggtacgcaggctgatcttcttcttgtttactgacagtaaaaacgcaatcgtcagcaataccaccattcccagaacacttctcatgacatccatagtgattatctcttcatgtcatattgggcgacggctttctgcccatcagaaatagccaggcctgcatcttgcgataccggcccggcttgttatcaacacttaatgggttttgatgtagccgcgcacgcactcttcgactaagccccagaaccagtcggtatcaatagtgatgccgactttggtattagcgggcttgccaagaacgcccagctcgtcgcagacggtacgcccataacaagggccactgttgacgtccacttcgacgtacatctcctgggttttaatgccatcagggttaatcagataaccgatgcaggtggcgtcgtgcaccgggccgccagccaggccgtagttttcgaactgggttttgagagtgaagttcatgatgtcgctgaacagctctccggcagggccgcctgccctttccattcgtgcaatcacgtccggggtgcaaacggtctggttggtgagatcgaggcccatcatcactaatggaacgccagaggtgaacaccacgcgtgcggcttccgggtcagcaaagatgttgaactcggcagatggcgtgaagttgcctgtaccgtaagcgccgcccattagcacaatttcacggattttgggcaggatcgcgggttgcatacgcattgccaccgcgatatttgaaagcggaccaaccggcaccagagtgatatcgccatcgcttgccatcagggtatcaatgatgtatttcaccgcatgagtgctttctgcctggcgggtcagcggctcgaataccgggccatccagtccggtatcaccgtgaatattatcggcaacgatttgttgccgcataatgggttgtggcatccccgcataaaccggaacattaatctccagtttctggcaaacattcaggccattaattaatgttttatcaagcgtctgattacccgctacaatagtgatgcctaataaatctattgccggatgtttcgccgccatcattatagcaatagcatcatcatgacccggatcacaatccagaataatttttctcttttccattgtttatttcctctgtttccagttgcgttattttttctacagcaaagaaatttcgatcgggccgatgattgaatcttaacaacagcgtacgtatgctaaatatgagaaatctcatagcggataaacatcgtgaaagaaatccacaataatgatcttaagcagcaattgatgagtgaatccgcgtttaaggattgctttttaacggatgtttcagccgatacgcggctgtttcattttntagcgcgtgactacattgtgcaggaagggcaacagccgtcctggctgttttacctgacgcgaggccgcgccaggctttacgccacgctagctaatggtcgcgtgtcgctgatcgatttctttgccgccccctgttttattggtgagattgagttaatcgataaagaccatgaaccgcgtgcggtacaggctattgaagagtgttggtgccttgcgctccctatgaaacattaccgtccgctgttattaaacgacaccctatttttacgaaaactttgcgtcaccttaagtcataaaaattatcgtaatattgtttctttaactcagaatcaatcatttccgttagtgaatcgcctggcagcatttatattactctcacaagaaggtgatctttatcacgaaaagcatacgcaagcggcagagtatttaggcgtttcttatcgacatcttttatatgttctcgcgcaattcattcacgacggtttattaattaaaagcaagaaaggatatctaattaaaaacagaaagcagttgtcagggctggcactggagatggacccggagaataaattctccgggatgatgcagtaaaaattatttgcaatagcgcgattgccggatgcaacgcttgatgcgttttatccggtctacaaattgagcattacgccagaccaataaagaacccggcaatggtcgcgctcatcaggttggaaagcgttgctgctgccagcgcccgtaaaccaagctgagcgatttccggtgcgcgttttggcgaaatagccgaaaatgccccaacgacaacaccgatagaaccaaagttagcaaaaccacaaagcgcaaaggagataatcgcaatggttttcacttccagcgtgccgcccgtttgcaggtatggggagaaactcaggtaagcgacgaattcgttaatcgccagtttctgcccaatcaggctacccgcaaggttggcatcactccagtccacacccatgatccacgccagcggtgccagcacatagccaaaaatactttccagagaagcattggcgaagccaaaccagccgccaattccgccgataatgccgttgatcagcgcaataattgccacaaatgccattaccaccgtcgccacaccagcggcgattttcagcccggtcatcgcaccgctcgccgctgcttcgataaagctttttggcggcgtttcgctgaacgacagattttcaaacgtgacctgcgaaagctcggttgctggactaagaatacgtgcaaacaaaataccgccggggatcgccatcagcgatgccgccaacaggtagtcaattggtacgcccattccggcataaccaatcatcatcgaaccagcaatggacgccatcccgctacaaatagccgtaaacaactcgtttcgattcatgcgatcgataaacggtttaacgatcgccgggatctcattttgcccgaggaaaatagtggtgactgcgacaaaagattcgattttgctgatgttgagggctttctggaaaatgctgccaaggatgcgaatcagcagccccatcacgccaatgtagtacagcagactaatgagcgcagtgacgaagataatcgccggaagtacgcgaaaggcgaagataaaacccgcaccgtcaaagaggacatccattttcggcccgaccagcgaaccaaaaatgaaggcgctaccagcatcactgtaagacatcactttatgaacgcctaatgccgcctgttctacagcccactttcccggcggaaaatagagcatgatgccaccaagagcaatttgcagcagtagtgcggctgcaaccgtacgcaaactgatgctctttttattcactgacaacagaaatgctattgccagtaacaccaccatccccacaacacttctcattatgtccataatgattttcccttcatgccagtaaacccggcgtcagcgccaggtttcggtatgtttgatgagtacgggcgacggctttctgcccgtcagaaattaacccgcgagacgctgatattctttggcaatttcgctcgccagaatggcgttgttgaacacaagctggatgttggatttcaggctgtcaccgccggtcagctcagcaacgcgcgccagcaggaatggcgtactttctttaccaataacaccctgcgcttcagcttcagctaccgcctgatcgatcaccgcattgatagtgtgttctggcatcgcaaactgttccgggatcgggttcgctaccacgaggccaccgttcagcccgctttgccatttcaccgccattgcacgggcaatttcactggcgctgtcgagacgaatgctgacgtcaaacgggctggtacggcagaaaaacgcaggcagcgctttagtctgatagccaattaacggcacaccgaaggtttctaaatactcagtggttaatcctaaatcgagaatagatttcgccccggcacaaacaacggtgacattagtatttgccagttcttgcaaatcggcagaaatatcgaaggtatgttccgcccctcgatgaacaccaccaattccgccggtggcaaatactttaattccggcaagcgccgcaataatcatcgttgaagccacggtggttgcaccnnttnttccggcggcaacgacaaaaggtaaatcgcgacgactaactttagtcacgttatgcccttcacgacccagtaattcaatttcttctttgcttaaacccactttcatcacaccgccaataatggcgatagtggcaggtactgcgccctgtttacgaatagtttcttctacttcaattgcggtctgggcattttgtgggaacggcatcccgtgagaaataatggtcgattccagcgccacaaccggttttttnttttttnnagcgtcctgcacttccggggaaatttgtaataattcaggggaaatttttaattcagacattctgcgttctccactaacgatataacgttggcaatcgataaatcggggttattggtgtattcacaggagagcgccattgacgaacatccctgtgcgaaacgaacagattcggcaaacggcattccgtctacccaacacgaagcaagtcccgccatcatggcatcgcccgctccggtaacattaataacattggttttgatcggcgcagaccagccactttcaccgctgatatcgctgtaataaacgccgtcgccgcccatgctcaataccagtcggttcaggccatgttgatggaaccaggcagcaacttttgccacatcttcacgccctgacagcgcaatcccactcagggtttccgcttcaaggcggtttggcttgagagtatggatttgacttaatcgctcgcgtactttgacgcatttccacgcggaaaccggatcgacaaatacgggtacgttggcagcattatccagaatccatgccagtgcctcttcactgatattacagtccgcgacaatgacctttgccctctgaataaattcacggtgctgtgcgagatattcagctgtaatagcgttgctaatattcatgtcatttatagcaaccagcatttcaccggtattatcgagtaatgataaatagctcgacgtattttctcccggcacaatcaggcatttatcgacataaacgccagattgattggtttgcgttagcagcgattggccataaaaatcactgcctacggcgctcagtagccaggctttattacccagcaacgccaggttttgtgcaatattgcgccctaccccaccaggcgtaaattttattttacctggatttgaatccgcataatttaatgattcatgtgaatatccggcgacatcaatattcgccgagcctataattacgacataatccttttcgcgcatagcacgtcctctggtaaaaaattaccaaccctgtcaatccacaaggatatagatactgcaaagacggtttaaacatgtgttcatatttaaacatgtgctcatagtatgcatgttttacgtaaagtaaattgccgccagagaggcaaagcgggcagatttgagcaggctcacaaaatgcgattaaatgcctgaattacaaaagcgaggaatttgtgacgggatgcacagaacatgaacactaaaaaagggcagaaaagaatctgcccttgaggaaataaccttagtgtttgatgaacgtttcaggtttctactgaaagataaaaccatttaaattcataaaattacattcacaaaccggtcattctctttgcgctcatccaatgatacggggcagtaaatttctgccctgtaacacaccttttattacgcggctttcgctactgcgtccacttccggacgtttcaggaaggcataggccaaacccgccaccagcgtaccggcaataattgctaccaggtaacccagtaccggcgtaatagcgccagggatcagcagaacaaacagaccaccgtgcggtgccatcagtttcgcaccaatcgccattgagattgcgccagtcagcgccccaccaacgatacaacacggcagcacacgcatcggatcacgagcagcaaacggaattgcaccttccgaaataaagcacagaccaagaaccagagcggctttgccaccttcctgctgcgctttgtcaaatttgcgacgcgccaccattgttgccagacccattgccagcggtggcaccatacctgccgccataatcgccgccatcgggccataggtttgagtactcagcagacccacaccgaatgcgtacgctgctttatttaccggaccgcccatgtcagtacacatcatgccaccgaggatcgcccccagcagaaccgcattcgcagtccccatggtctgcagccagtgagtcaacccttcgagaatgccagcaaccggtttaccgatcaggtagatcatcgccagaccgaccaccagactggaaattagcggaatgatcaggatcggtttcagcgcctccatactctgtggcagtttcagttgcgtactgattaacttcgcaatgtaaccagccaggaagcccgcaataataccgccaatgaagccagaaccggtgctgaccgccagcataccgccaatcagacccggcgtgagacccggacgatcggcaatggagaaggcaatataacctgccagtaccggcaccatcagcgcaaaggctgaaccaccaccaatctgcatcagcgccgctgccaacgtacccggctctttaaacgcttcgataccaaaagcaaaagaaagcgcgatacacagaccacctgcaacgaccatcggcagcatgtaagagacgcccgtcagcaagtgacggtatgcgcctgcactctcgttcttaccttcagaggtcgccgtttgagctttgcccgccggttcatacggcgttgcttcagcaaccgctttatccagttcctgcgcggttttcttcagcgccagaccggtagaggtgcgatacatcggtttaccagcaaatttcgccagatccacttcgatatctgccgccacaatcaccagatccgctgcggctacttcttcgggagtgattgcattacccgcgccaacagaaccacgggtttcaactttcacccaccagccacgttttttcgcttcggtttcaatggcttcagccgccataaaggtgtgtgctacgccagtcgggcaagcagtcaccgcaactacgcgtttcggaccgctggcggcaaccggtgctgtcgcagcgaccggcgcagtgtaaggtttcgcatggcctttggcttcactcaggaacagctcagggtgcgcaactgcccgggaaatatcgcccagccagacatttttaccgttcagcgcgctgtcattcgggatggaatcaccgagaacaatcgccatttctgcgtcgttcggattgtcgatgatttccagttttgcttttcgcgccgccgcgcccagcagggtcttcgccatataggcgcgtgcctgaccgagattagcgtcaataatcagcagcgttttcattatgcctctcctgctgtcagttaaaaggttgtaagtcgacgcgcgccatcattgcggccaactgcggacgatcggtaatacccacattgctttgacttaccgccagggctgcaacagcagtcgccagacgcagtgtgtgttcactggattcacgcattagcaagccataaatcaggccaccaaccatagaatcccctgcgccaacggtgcttacgacatcgactgacggtggtttggcgatccattcgccggaggcattaacccaaagcgcgccttcggcacccagtgaaataacgacatgcgcaataccttgttcacgcagcgcatgcgcagcttcaatcacatctttcatttcaggcagtttacggcctgcccagatttccagctcgcggcggttaggtttcaccagccacggtgccgctttcaaacctgctactaacgcttcacggctactatcaaagataatgcaagggcactgactacgcaggcgagtcatccagtcggtgaacgcttccgggctgacgcctgacggtaagcttccgctgacacagaccatatcgaactgaccgagccagctcagagaatcagtcacaaagcgttcccagtcggcgggggtgacttcaaaacccgagaagttgaagtcggtcacttcgccgtctttttccgtcagcttaacgttaattcgggtgcgcccctgtacaacctggaaacggttggcaatgcccagctcgctgaacagttgctgaaaaccatcctgattgtctttaccgaggaagccgccaacggtgacatcaattcccaggtcttttaatactttggccacgttgatgcctttacccgccgcatgcagaccggtggttttcaccaggttcacttcgccgcgttcaatttccgggcagaaaccaacaaggtcataagccggattaagggtgatagtagcaacacgtctgctcattatgcgccctccccaagaccagcagcgatagcgtcgccgattgctttcagcgcctgttcagcatctgcaccctgggcggtaaagcgtaggcgatgacctttcttaacgccaagtgccacaactttcatcagactacgtccgtttgccggtttgccggtgccatcaaggtttgtcacggtaatatcactgttaaattgtttaatggtgttgaccagcatggtacctggacgagcatgcaggccgtgttcattgcgcaccacaaactccgcgcttaacacgtcgtcggtcggcgcatcatcgctggtcagcagcgccagcaacgttgccgcatccgctttcagcaagcggtcagctttattgtcgagcaacaaatcagcgagacgcttaagaaccgcaatgggctgatcgtcattcatcgccacactcaccagcatggctgccgtttcgccgtccacatcaaaagcatttgccgcacggnttaccgcaattgcgctacgcagattgccttcggcgctatcgctcagccagataccctgtccgaggttcagcggttgttcattgatggctttggtgacgaaagtggcgtcaactgcccccgcctctttcagacgcgcagcgttcagcgcctgaagagtcagcagatcgctggcgacgatatccagcgtcagcatttcgttgtcgagcttcagctgctcactctgcttttcgcccatcagcaatgcgcgaagttcttctgctgttgttgctgacttcagttgttcagcaacggaatcatcgctcagtacgtgggtcagctggcgtagcaggcccagatgctcatccgagctggcagcaataccgatcgctacgtacgctacctgaccgtcaccccaggtgacgccttccgggaactgaaatacctgaacgccggttttcagcacctgatcgcgggtgtcggtagtgccgtgtggaatagcaataccattgccgaggaacgttgaggtttgctgttcgcgcgccagcatgccattgacgtagccttctgctacattaccggcctgcaccagcgccgcagcgacctggcgaatcgcctcttctttgtctccggccttttcgcccggatggatgtcctgtacggataactggaacatagttctcctctcttgctgaattgaaacgattcagcttctatgagaaaaaaagcgccaacctggcttagggttaaagacaagatcgcgctgaaacgtttcaagaaagcataatacttctgtttcagcacgcaaggaaagccgtaaagttatgagcaaaagtttgatgtgctgcacaattttttgtcatttttcctaattgctgatgggaaaatccgttatcagcaatttcatttcagcagcgtcagcagccaatcagcaacagtgaaatggcattttgattattcgtggcgcttttgatttcgctgtctgtttattttctgacaagcagcgtaaactccgcgtcttcctcttccagtgatcgaccagcatgcataactcccccgcagtctccagcgcgaaatcgtttgacctgacctcgacggcgtttttaatcgttgcctttctcaccggtattgcgggcgctctgcaaaccccgacactcagtatttttcttaccgatgaagtacatgcccgtccggcgatggtgggattcttctttaccggcagcgctgtcattggggttctggtgagtcagtttctcgccgggcgctctgataagcgcggcgatcgcaaatcgctgattgtcttttgctgcctgttaggcgtgctggcctgcaccctttttgcctggaatcgcaactactttgttttgctattcgttggcgtctttcttagcagctttggctcgaccgctaacccgcaaatgtttgcccttgcccgtgaacatgccgacaaaaccggacgtgaggcggtgatgttcagctcttttttacgcgctcaggtttcactggcatgggtcattggcccaccgctggcttatgccttagcgatgggtttcagctttacggtaatgtatctgagcgcagcggtagcatttattgtttgcggcgtgatggtgtggctgtttttaccgtcgatgcaaaaagagcttccgctggcgaccggcacggttgaagcgccgcgccgtaaccgtcgcgatacgctgctgctgtttgtcatttgtacattgatgtggggctcgaacagcctgtacatcatcaacatgccgctatttattatcaacgaactccatcttcccgagaaactggccggtgtgatgatggggaccgccgccgggctggaaatcccgaccatgttgattgccggatatttcgccaaacgtctgggtaagcgtttcttaatgcgcgttgctgccgtgggtggcgtctgtttttacgcaggaatgctgatggcgcattctcctgtcattctgttgggcttgcagctgctaaatgctatttttattggcattctgggcggtatcgggatgctctattttcaggatctgatgcccggtcaggcaggttcagccaccacgctctataccaacacgtcgcgcgtgggctggatcatcgcgggatcagtggcgggcatcgtcgccgagatctggaattatcacgctgtgttctggtttgcgatggtgatgattatcgccactctgttttgcttactgcggattaaagatgtttaaggcgcggtcagcatttccagatcgataagccaggtcattgcctgctgacgcgagttaccgcacatttcagcgctggcttgtaagcctgcacagactttcggccgcagtggcgaggtgaaaattttacagcgttgctgttcatcaagctgaatgcagggcgtattggcgggcttgccatctggcataccgggaatagggctggaaattgaaggggcagtgcaacacgccccgcaacccggacggcattccatacgttgttctcttaaggttaaccaccggattgatgagcgcgcacagtaccaccttttttgcaccagcaaaagtgcgaataccacttgcccgaaaggctcgtcgcgagtactttgtcgcgatatttttgacattttcgactacaggaatttttcgatgccaagagcgaacgaaattaaaaaaggtatggtactgaattacaacggcaaactgctgctggttaaggacattgatattcagtcgcccactgcccgcggtgccgctacgctgtacaaaatgcgtttttctgatgtccgtaccgggctgaaagtagaagagcgtttcaaaggagatgatatcgttgacaccgtgacgctgacccgccgttacgttgacttctcctatgtcgatggcaacgaatatgtctttatggataaagaagactataccccgtataccttcaccaaagatcagattgaagaagagttgctgtttatgccagagggcggcatgccggacatgcaggtgctgacctgggacggtcaactgctggcgcttgagctgccgcagaccgttgatctggaaatcgttgaaaccgcaccaggcatcaaaggggcatctgccagcgcccgtaacaaaccggcgacattgagcactggtctggtgattcaggtaccagaatacttaagcccgggcgaaaaaattcgtatccatatcgaagaacgccgttatatggggcgtgctgactaacttcagccgcatgcagaaaagggatagctcaggctgtcccttttttaatttattataccaatcttctattttgcgcttcctgaacaccttacgccctcaattttcactcgttgattgatcgccctcacacttcatcgcattaacaatccagaccaatttcaattgctgtcatataactttacactgtcattgttaattaatcgttactaagacatgactcctatgaatacaatcgcctccgttacgctcccgcatcatgtacacgctccacgctacgatcgccagcagttgcaatcacgtatcgttcattttggctttggagcctttcaccgcgcacatcaggcgttactgaccgatcgtgtgctgaatgcccagggcggcgactgggggatctgtgaaatcagcttgttcagcggtgatcaactgatgagccagctccgcgcacagaaccatttatataccgtgctggagaaaggggcggacggcaatcaggcgataattgtcggtgccgttcacgaatgcctgaatgcaaaactggattccttagcggcaattattgagaaattttgcgagccacaggtggcaattgtttccctgacgattaccgaaaaaggctattgtattgacccggccaccggtgcactcgacaccagcaatccgcggattattcacgatctacaaacccctgaagaacctcactccgcaccgggtattctcgtcgaagcactgaaacgccgccgtgagcgcggccttacaccgtttaccgtgctctcctgcgacaatattcccgacaatggccatgtggtgaaaaacgcggtgctgggaatggcagaaaaacgttcgccagaactcgccgggtggataaaagaacacgtcagttttccgggaaccatggtcgaccgcattgttccggctgcaaccgacgaatcactggcagaaatcagccagcatctgggggtaaatgatccctgcgcgattagctgcgaaccgtttatccagtgggtggtggaagataacttcgtcgctgggcgtcctgcctgggaagtcgcaggtgtacaaatggtgaatgatgtcctgccatgggaagagatgaaactgcggatgcttaatggcagccactcttttctcgcttatctgggttacctctcaggattcgcccatatcagtgattgcatgcaggatcgcgcatttcgccatgccgccagaacattaatgctggatgagcaagcgccgacactgcggattaaagatgtcgatttaacacaatatgcggataagttaattgcacgttttgctaatccggcgctgaaacataagacctggcaaatcgcgatggatggcagccagaaattaccgcaacgcatgctggcaggtattcgcatacatctggggcgcgaaacggactggtcgttgctggcattaggcgttgcaggctggatgcgttacgtcagcggcgttgatgatgccggaaatgccattgatgttcgcgatccgcttagcgataaaattcgcgatcttgttgcgggcagcatcagtgagcaacgcgtcaccgccctgctttccctgcgtgaagttttcggtgatgatctgccagataacccgcattttgtgcaggccatcgaacaagcctggcaacaaatcgcacaattcggcgcgcatcaggcgctattaaacaccctcaaaatttaacgatttctgcggttaaagcggatgaagctcgccttcgtccgctctccccttctcttttctgccgtttttagccaggattaacgctcagttaacttaccagagtattgcggagctgttgtgaccaggaccaacctcatcaccggttttctcggcagcgggaaaaccacgtcgattcttcatctgttagcccataaagatcccaacgaaaaatgggcggtactggttaatgaatttggggaagtcggaattgatggtgctttgctcgccgatagcggcgcactgctgaaagagatccccggcggctgcatgtgctgcgttaatggtttacccatgcaggtagggttgaataccttactgcgtcagggaaaaccagaccgcttgttgatagagccgactgggctgggccatccgaaacagatcctcgatctgttaaccgcaccagtctatgaaccgtggatagatctgcgcgccacgttgtgcattctcgatccacgcctgctgctggacgaaaaaagcgccagcaatgaaaacttccgtgaccagctggctgccgcagacatcattgtcgccaataaatccgaccgtgcgacacctgaaagcgagcaagcgctacagcgctggtggcagcaaaatggtggcgatcggcaattaattcacagtgagcatgggaaagttgccggtcatcttctggatttgccgcgtcacaatttagccgagttgcccgccagcgccgcgcattctcatcagcatgtcgtgaaaaaagggttagcagcgttaagcctgccagagcatcaacgctggcgtcgcagtctgaacagtggacaaggacatcaggcctgcggctggatattcgacgctgatacggtattcgacaccattggcattctggaatgggcgcgacttgcaccggtggaacgcgtcaaaggcgtgctgcgtattcccgaagggctggtgcgaatcaaccgtcagggcgatgacctgcacattgaaacgcaaaacgttgcgccaccggacagccgtattgagctgatttccagcagcgaagctgactggaatgccttgcagagcgcgctgttgaagcttcgtttagcgactaccgcgtaaggttgcctgcgtttttcagtaagataattagagaaaatatgattaaaaatttgccgcaaatagtgttgttgaatattgtcggcctcgcgctgtttctttcctggtatattcccgttaatcatggattctggttgccgattgatgcggatattttttatttctttaatcagaaactggtcgaaagtaaggcctttttgtggctggttgcattgaccaacaatcgcgctttcgacggttgttcactgctggcaatgggaatgttgatgctgagtttctggctgaaagaaaacgccccaggcagacgacgtatcgtgattattggtctggtcatgctattaactgcagtggtattaaaccagctgggtcaggcattaattcctgtaaaacgggccagcccaacattgacttttaccgatattaaccgcgtcagcgaactgctctctgtccccacgaaagatgcctcacgagatagctttcccggcgatcacggcatgatgctgcttattttttcggcattcatgtggcgttatttcggcaaagttgcaggtcttatcgcccttattatttttgtggtttttgcgtttcccagagtaatgattggcgcacactggtttactgacatcattgtcggttcgatgaccgtgatattgatcggtttgccctgggtgttgctgacgccattaagtgatcgattaatcaccttttttgacaaatcactaccgggaaaaaacaaacattttcaaaacaaataactcacagtacttaacatcatcaggtttatttttatagtgaggataatcctgatgatgcgcaccgtgctttcatccatcgaaagcaaaaatcattctctaagtaaatgaatggattgcatgcatttcactcaatngtactttaattgaccaatcccgcttattaactttctgtatcactttttcttataaaaaatcatgtaaaaccgctcgccaagaccgcaccaatcgggtaatctcgaactcgttttgcctcggcggtagattatcctcacagcatataattttgtgcgttagtccacagatttggccttaaggaattgtttcaacatgcccaggtaattagtctcgtgtcgcttggcattttttttataacgatatttgtcgttaaggacttcaagggaaaacaaacaacatggtcaaatctcaaccgattttgagatatatcttgcnnnngatccccgcgattgcagtagcggttctgctttctgcatgtagtgcaaataacaccgcaaagaatatgcatcctgagacacgtgcagtgggtagtgaaacatcatcactgcaagcttctcaggatgaatttgaaaacctggttcgtaatgtcgacgtaaaatcgcgaattatggatcagtatgctgactggaaaggcgtacgttatcgtctgggcggcagcactaaaaaaggtatcgattgttctggtttcgtacagcgtacattccgtgagcaatttggcttagaacttccgcgttcgacttacgaacagcaggaaatgggtaaatctgtttcccgcagtaatttgcgtacgggtgatttagttctgttccgtgccggttcaacgggacgccatgtcggtatttatatcggcaacaatcagtttgtccatgcttccaccagcagtggtgttattatttccagcatgaatgaaccgtactggaagaagcgttacaacgaagcacgccgggttctcagccgcagctaataaaccgtttggatgcaatcccttggctatcctgacgagttaactgaaagcactgcttaggcagtgcttttttgttttcattcatcagagaaaatgatgtttccgcgtcttgatccaggctatagtccggtcattgttatcttttaaatgttg

(The sequence listing continues in the following parts.)

What is claimed is:

1. An isolated nucleic acid sequence selected from the group consisting of nucleic acid sequences having SEQ ID NO:66, SEQ ID NO:252, SEQ ID NO:1113, SEQ ID NO:1461, fragments thereof, at least 25 nucleotide sequences thereof and complements thereof.

2. An isolated nucleic acid sequence comprising at least 90% nucleic acid sequence identity to the isolated nucleic acid sequence of claim 1.

3. An isolated nucleic acid sequence of claim 1 comprising SEQ ID NO:66, fragments thereof, at least 25 nucleotide sequences thereof, complements thereof and nucleic acid sequences comprising at least 90% nucleic acid sequence identity thereof.

4. An isolated nucleic acid sequence of claim 1 comprising SEQ ID NO:252, fragments thereof, at least 25 nucleotide sequences thereof, complements thereof and nucleic acid sequences comprising at least 90% nucleic acid sequence identity thereof.

5. An isolated nucleic acid sequence of claim 1 comprising SEQ ID NO:1113, fragments thereof, at least 25 nucleotide sequences thereof, complements thereof and nucleic acid sequences comprising at least 90% nucleic acid sequence identity thereof.

6. An isolated nucleic acid sequence of claim 1 comprising SEQ ID NO:1461, fragments thereof, at least 25 nucleotide sequences thereof, complements thereof and nucleic acid sequences comprising at least 90% nucleic acid sequence identity thereof.

7. An isolated nucleic acid sequence selected from the group consisting of nucleic acid sequences having SEQ ID NO:1, SEQ ID NO:2, SEQ ID NO:3, SEQ ID NO:4, SEQ ID NO:5, fragments thereof, at least 25 nucleotide sequences thereof, complementary sequences thereof and sequences comprising at least 90% nucleic acid sequence identity thereof.

8. An isolated nucleic acid sequence of claim 7 selected from the group consisting of nucleic acid sequences having SEQ ID NO:1, fragments thereof, at least 25 nucleotide sequences thereof, complementary sequences thereof and sequences comprising at least 90% nucleic acid sequence identity thereof.

9. An isolated nucleic acid sequence of claim 7 selected from the group consisting of nucleic acid sequences having SEQ ID NO:2, fragments thereof, at least 25 nucleotide sequences thereof, complementary sequences thereof and sequences comprising at least 90% nucleic acid sequence identity thereof.

10. An isolated nucleic acid sequence of claim 7 selected from the group consisting of nucleic acid sequences having SEQ ID NO:3, fragments thereof, at least 25 nucleotide sequences thereof, complementary sequences thereof and sequences comprising at least 90% nucleic acid sequence identity thereof.

11. An isolated nucleic acid sequence of claim 7 selected from the group consisting of nucleic acid sequences having SEQ ID NO:4, fragments thereof, at least 25 nucleotide sequences thereof, complementary sequences thereof and sequences comprising at least 90% nucleic acid sequence identity thereof.

12. An isolated nucleic acid sequence of claim 7 selected from the group consisting of nucleic acid sequences having SEQ ID NO:5, fragments thereof, at least 25 nucleotide sequences thereof, complementary sequences thereof and sequences comprising at least 90% nucleic acid sequence identity thereof.

13. An isolated nucleic acid sequence selected from the group consisting of nucleic acid sequences having SEQ ID NO: 6, SEQ ID NO:7, SEQ ID NO:8, SEQ ID NO:9, SEQ ID NO:10, SEQ ID NO: 11, SEQ ID NO:12, SEQ ID NO:13, SEQ ID NO:14, SEQ ID NO:15, SEQ ID NO:16, SEQ ID NO: 17, SEQ ID NO:18, SEQ ID NO:19, SEQ ID NO:20, SEQ ID NO:21, SEQ ID NO:22, SEQ ID NO:23, SEQ ID NO:24, SEQ ID NO:25, SEQ ID NO:26, SEQ ID NO:27, SEQ ID NO:28, SEQ ID NO:29, SEQ ID NO:30, SEQ ID NO:31, SEQ ID NO:32, fragments thereof, at least 10 contiguous nucleotide sequences thereof, complements thereof and labeled derivatives thereof.

14. An isolated nucleic acid sequence comprising at least 90% nucleic sequence identity to the isolated nucleic acid sequence of claim 13.

15. A method of distinguishing an E. coli O55:H7 from a non-O55:H7 E. coli strain comprising: detecting at least one of a nucleic acid sequence selected from the group consisting of SEQ ID NO: 66, SEQ ID NO: 252, SEQ ID NO: 1113, SEQ ID NO: 1461, SEQ ID. NO: 1, SEQ ID NO:2, SEQ ID NO:3, SEQ ID NO:4, SEQ ID NO:5, fragments thereof, and complements thereof, wherein detection of one of the at least one nucleic acid sequences identifies E. coli O55:H7.

16. The method of claim 15, wherein detecting the at least one nucleic acid sequence comprises at least one technology selected from the group consisting of amplification, hybridization, mass spectrometry, nanostring, microfluidics, chemiluminescence, enzyme technologies and combinations thereof.

17. The method of claim 16, wherein amplification is selected from the group consisting of polymerase chain reaction (PCR), RT-PCR, asynchronous PCR (A-PCR), and asymmetric PCR (AM-PCR), strand displacement amplification (SDA), multiple displacement amplification (MDA), nucleic acid strand-based amplification (NASBA), rolling circle amplification (RCA), transcription-mediated amplification (TMA).

18. The method of claim 15, further comprising isolating nucleic acid from a sample.

19. The method of claim 18, wherein the sample is a food sample, an agricultural sample, a produce sample, an animal sample, an environmental sample, a biological sample, a water sample and an air sample.

20. A method for detecting Escherichia coli O55:H7 in a sample comprising the steps of:
a) providing an isolated nucleotide sequence of an E. coli O55:H7-specific nucleotide sequence selected from the group consisting of SEQ ID NO: 66, SEQ ID NO: 252, SEQ ID NO: 1113, SEQ ID NO: 1461, SEQ ID NO:1, SEQ ID NO: 2, SEQ ID NO: 3, SEQ ID NO: 4, SEQ ID NO: 5, fragments thereof, at least 25 nucleotide sequences thereof, complements thereof and sequences comprising at least 90% nucleic acid sequence identity thereof;
b) contacting the isolated nucleotide sequence with the sample; and
c) detecting hybridization of the nucleotide sequence to a complementary nucleotide sequence in the sample.

21. A method for detecting Escherichia coli O55:H7 in a sample comprising the steps of:
a) identifying at least a first target nucleic acid sequence specific to E. coli O55:H7;
b) hybridizing at least a first pair of polynucleotide primers to the target nucleic acid sequence;
c) amplifying the first target nucleic acid sequence to form a first amplified target nucleic acid sequence product; and
d) detecting the at least first amplified target nucleic acid sequence product, wherein detection of the at least first amplified target nucleic acid sequence product is indicative of the presence of E. coli O55:H7.

22. The method of claim 21 further comprising:
a) identifying a second target nucleic acid sequence specific to E. coli O55:H7;
b) hybridizing a second pair of polynucleotide primers to the second target nucleic acid sequence;
c) amplifying the second target nucleic acid sequence to form a second amplified target nucleic acid sequence product; and
d) detecting the second amplified target nucleic acid sequence product, wherein detection of the second amplified target nucleic acid sequence product is indicative of the presence of E. coli O55:H7.

23. The method of claim 22 wherein the first target nucleic acid sequence specific to E. coli O55:H7 and the second target nucleic acid sequence specific to E. coli O55:H7 are selected from the group consisting of SEQ ID NO: 66, SEQ ID NO: 252, SEQ ID NO: 1113, SEQ ID NO: 1461, SEQ ID NO:1, SEQ ID NO: 2, SEQ ID NO: 3, SEQ ID NO: 4, SEQ ID NO: 5, fragments thereof, at least 25 nucleotide sequences thereof, complements thereof and sequences comprising at least 90% nucleic acid sequence identity thereof.

24. The method of claim 22 wherein the first primer pair and the second primer pair are selected from a group consisting of SEQ ID NO: 6, SEQ ID NO:7, SEQ ID NO:8, SEQ ID NO:9, SEQ ID NO:10, SEQ ID NO: 11, SEQ ID NO:12, SEQ ID NO:13, SEQ ID NO:14, SEQ ID NO:15, SEQ ID NO:16, SEQ ID NO: 17, SEQ ID NO:18, SEQ ID NO:19, SEQ ID NO:20, SEQ ID NO:21, SEQ ID NO:22, SEQ ID NO:23, SEQ ID NO:24, SEQ ID NO:25, SEQ ID NO:26, SEQ ID NO:27, SEQ ID NO:28, SEQ ID NO:29, SEQ ID NO:30, SEQ ID NO:31, SEQ ID NO:32, fragments thereof, at least 10 contiguous nucleotide sequences thereof complements thereof, and labeled derivatives thereof.

25. The method of claim 22, wherein the detecting comprises using a primer selected form the group consisting of SEQ ID NO: 6, SEQ ID NO:7, SEQ ID NO:8, SEQ ID NO:9, SEQ ID NO:10, SEQ ID NO: 11, SEQ ID NO:12, SEQ ID NO:13, SEQ ID NO:14, SEQ ID NO:15, SEQ ID NO:16, SEQ ID NO: 17, SEQ ID NO:18, SEQ ID NO:19, SEQ ID NO:20, SEQ ID NO:21, SEQ ID NO:22, SEQ ID NO:23, SEQ ID NO:24, SEQ ID NO:25, SEQ ID NO:26, SEQ ID NO:27, SEQ ID NO:28, SEQ ID NO:29, SEQ ID NO:30, SEQ ID NO:31, SEQ ID NO:32, fragments thereof, at least 10 contiguous nucleotide sequences thereof complements thereof, and labeled derivatives thereof.

26. A method for distinguishing a bacteria from an E. coli O55:H7 comprising analyzing the genome of the bacteria for the presence of a sequence selected from the group consisting of SEQ ID NO:1, SEQ ID NO:66, SEQ ID NO:2, SEQ ID NO:252, SEQ ID NO:3, SEQ ID NO:4, SEQ ID NO:1113, SEQ ID NO:5 and SEQ ID NO:1461, fragments thereof, at least 25 nucleotide sequences thereof and sequences comprising at least 90% nucleic acid sequence identity thereof by the method of claim 21.

27. The method of claim 26, wherein the bacteria is a Salmonella Sp.

28. The method of claim 26, wherein the bacteria is an E. coli O157:H7 or an E. coli O26:H11.

29. The method of claim 26, wherein the bacteria is a Shigella spp.

30. The method of claim 29, wherein the Shigella spp. is selected from the group consisting of Shigella dysenteriae, Shigella flexneri, Shigella boydii and Shigella sonnei.

31. The method of claim 30, wherein the Shigella dysentaeria is a strain selected from the group consisting of strain 1012, strain M131649 and strain Sd197.

32. The method of claim 30, wherein the Shigella flexneri is a strain selected from the group consisting of strain 2457T, strain 301 and strain 8401.

33. The method of claim 30, wherein the Shigella boydii is a strain selected from the group consisting of strain BS512 and strain Sb227.

34. The method of claim 30, wherein the Shigella sonnei is a strain selected from the group consisting of strain 53G and strain Ss046.

35. A kit for the detection of E. coli O55:H7 comprising:
at least one pair of PCR primers designed from a group of nucleic acid sequences consisting of SEQ ID NO:1, SEQ ID NO: 2, SEQ ID NO: 3, SEQ ID NO: 4, SEQ ID NO: 5, SEQ ID NO: 66, SEQ ID NO: 252, SEQ ID NO: 1113, SEQ ID NO: 1461, fragments thereof, complementary sequences thereof, sequences comprising at least 90% nucleic acid sequence identity thereof and complementary sequences comprising at least 90% nucleic acid sequence identity thereof; and
at least one probe designed from a group of nucleic acid sequences consisting of SEQ ID NO:1, SEQ ID NO: 2, SEQ ID NO: 3, SEQ ID NO: 4, SEQ ID NO: 5, SEQ ID NO: 66, SEQ ID NO: 252, SEQ ID NO: 1113, SEQ ID NO: 1461, fragments thereof, complementary sequences thereof, sequences comprising at least 90% nucleic acid sequence identity thereof and complementary sequences comprising at least 90% nucleic acid sequence identity thereof.

36. The kit of claim 35, further comprising one or more components selected from a group consisting of: at least one enzyme, dNTPs, at least one buffer, at least one salt, at least one control nucleic acid sample and an instruction protocol.

37. The kit of claim 35, wherein the probe is labeled.

38. The kit of claim 35, wherein at least one primers of the PCR primer pair is a labeled primer.

39. A kit for the detection of E. coli O55:H7 comprising:
at least one pair of PCR primer selected from a group of nucleic acid sequences consisting of SEQ ID NOs: 6, SEQ ID NO:7, SEQ ID NO:8, SEQ ID NO:9, SEQ ID NO:10, SEQ ID NO: 11, SEQ ID NO:12, SEQ ID NO:13, SEQ ID NO:14, SEQ ID NO:15, SEQ ID NO:16, SEQ ID NO: 17, SEQ ID NO:18, SEQ ID NO:19, SEQ ID NO:20, SEQ ID NO:21, SEQ ID NO:22, SEQ ID NO:23, SEQ ID NO:24, SEQ ID NO:25, SEQ ID NO:26, SEQ ID NO:27, SEQ ID NO:28, SEQ ID NO:29, SEQ ID NO:30, SEQ ID NO:31, SEQ ID NO:32, fragments comprising at least 10 contiguous nucleotide sequences thereof, complements thereof and labeled derivatives thereof; and
at least one probe selected from a group of nucleic acid sequences consisting of SEQ ID NOs: 6, SEQ ID NO:7, SEQ ID NO:8, SEQ ID NO:9, SEQ ID NO:10, SEQ ID NO: 11, SEQ ID NO:12, SEQ ID NO:13, SEQ ID NO:14, SEQ ID NO:15, SEQ ID NO:16, SEQ ID NO: 17, SEQ ID NO:18, SEQ ID NO:19, SEQ ID NO:20, SEQ ID NO:21, SEQ ID NO:22, SEQ ID NO:23, SEQ ID NO:24, SEQ ID NO:25, SEQ ID NO:26, SEQ ID NO:27, SEQ ID NO:28, SEQ ID NO:29, SEQ ID NO:30, SEQ ID NO:31, SEQ ID NO:32, fragments comprising at least 10 contiguous nucleotide sequences thereof, complements thereof and labeled derivatives thereof.

40. The kit of claim 39, further comprising one or more components selected from a group consisting of: at least one enzyme, dNTPs, at least one buffer, at least one salt, at least one control nucleic acid sample and an instruction protocol.
